United States Patent Application Publication US 2005/0228172 A9 - sequence listing, part 164

SEQ ID NO: 729591 - DNA, 655 bp, Homo sapiens
ccctcatgcttattagttctaggattctatttttttttttttttggtctacatagatctatatctatgtagacaatcatgctacctacaagcaggtccggttttatttcttcctttttgatctgtatatgttatttattttccttgttttattgcagtggctaaaacttcctccagtagtatgatgaatagagtcataasagtggatattattgctttgttcccaatcttaaaggaaaagcaagcattcctttaatgctaagtatattagctgaaggttttttgtagatgctctttattaagccaagaaagttcccttcttttttatttttatcacagatcttggtaaatgctttttttgtgtgtcaattgttaagatcacgcaaagttttaaatttaacttatgatggattacattgattgatttcaaatgttgaaccagccttacatacctggaataaaccccacctggttatggtgtagaattctttgtatacattgctggattcaatttgttaatattttgttgagaatatctgcttctaaattgatgagtgatataaatcattgtattgtcttttgtaggcttgttataagggtaatactgacctcataaaattagtagggaagtgttttgcttcttctatttctgtagg

SEQ ID NO: 729592 - DNA, 625 bp, Homo sapiens
gatatcagcaccatgtttcttgtacagcctgtagaactgtgggccagttcaacctctttataaattacctagcctcagtatttctttatagcaatgcaagtacagccaaatacagaaaattggcaccaaaagtgggacattcctataaagatamttgagaatgtggaatcgctttggaactgcatggcaggaagaggttggaagagtttggagggctccaacgaagacaggaaggtgaggggaagtttggaacatcttagagactggttaactggttgtaagcaaaatgctgatagaaatatggacagtgaaggccaggctgacaaggtctcagatggaaatgaggacgttattgggaactggcataaaggtcacccatgttacaacctggcagagaatttggctgcattgtgttcaagctgtagggatctgtggaaattttaacttaagagtgatggcttaggttatctggtggaagaaatttctaagcaacaaggcattcaggaagtggcctggctgcttcgaatagcttagatcaggtacaggagcaaagaaatgacttgacattggaacttactattaaaaggaaaagcagaacataaaagtttggaaaatttggagcctt

SEQ ID NO: 729593 - DNA, 596 bp, Homo sapiens
cttaccctagcctgctgagttcttcctgaacataagctctttatgtgaaagatatctgaagacagcagatccccggggtattttactgaaaaactgcatcactatttcctggtctaaaatatacagattgctaaaattagccctctaataaatggagaagttctcctctagtggttcagtgcacttaaatacatagtctcaccagatctctggggtaggggctgtttcccccactttgtggatgggacactgagacgtgaagttatgagagctggccagggtyttagtgaatggtggcagagctggtcaggatcctggtgtcctggatggtccacagaaggaccttgtgttacagacagttcacctctgtcactggttcatggcacaggatgaccgctatatgctcaaggagtcaaatcacacattggagtttcacctaacagtgatggtgctcacagtgggtttaaggcaagtcttcaaggacagtccacattagagagagagaggaaaaaagtacccaaataagtattctacagagcagagctatgaaaggtcccatgagaaggccaaagtgtgggacctggaaggagagaaag

SEQ ID NO: 729594 - DNA, 600 bp, Homo sapiens
aggtagcagccactacccctagggctgagattgatgcccacagaagagcctcttcctcccactagggctgggattaagatcttggagaggggatagccatggcctactggatgagaaaaaactaatgaaggcagatgacttgctggtaggacttgctgggaatctgcctactarggtgtcaggggaaggtgtccacacatgccatgcctaggaactcactgtacagtcacctgagggagtcctgggggaaaccactcacaaggatgagtgtggcattccactggaaggttgccagaggacatggttgagagggagggggctgtgagtcactgggcactataggagctcaaaaagccccatctgcaggagcaaggcattgggaaaaggagttcactgcatgagcctagcacagcagaaactacatgctctcaggacctaagcctggagaaagcatgctctgtaggagcctggtggaccaggctcatgggaaccaggaaggggaaaccccttctctctccagtgtccctccaatgctctttgtcaataagggaaaaatatttacaaagcccacctccattatcaacaagcaggaaaataagg

SEQ ID NO: 729595 - DNA, 623 bp, Homo sapiens
gtgagactaaggcgttgtgcctgggtcaaagcaggaagtgatgcaatgtttatagagtgagtgaacaatctttttccctcctgaatgcctgtgaaaacattactatttgaaagaaacaatgaaggtgtttcaccaagtggacagaacttttaaatgacaggattttttatggctttacgtcattcattcaaaggtatttatttggcaccaactgtrtgtgctaaatgctgtcaaccaagaagaggcaaaagaccagagagcaaagcagtaagacaaggtattcactggagtcttaggaatcacaatttgggagatacagattcagctcgaagccaaattatattccaaagagagggaagggagtagggggtttttaagagaaaataacaagaaagctaagggtggttacacaagctgttttgaaaggattattattggtggacgcagctggcttagcacatgagcccatagctcattggttgttactgttcgggagttgcagcactggtgaaattcatttgttttccaggatgttgtggtcattgtactttggcatacttcaaaggttcaaagcaagtttctgttttgttttgccagtttgcaggacacgcaggcaatccttt

SEQ ID NO: 729596 - DNA, 623 bp, Homo sapiens
gtgagactaaggcgttgtgcctgggtcaaagcaggaagtgatgcaatgtttatagagtgagtgaacaatctttttccctcctgaatgcctgtgaaaacattactatttgaaagaaacaatgaaggtgtttcaccaagtggacagaacttttaaatgacaggattttttatggctttacgtcattcattcaaaggtatttatttggcaccaactgtgtgtgctaaatgctgtcaaccaagaagaggcaaaagaccagagagcaaagcagtaagacaaggtattyactggagtcttaggaatcacaatttgggagatacagattcagctcgaagccaaattatattccaaagagagggaagggagtagggggtttttaagagaaaataacaagaaagctaagggtggttacacaagctgttttgaaaggattattattggtggacgcagctggcttagcacatgagcccatagctcattggttgttactgttcgggagttgcagcactggtgaaattcatttgttttccaggatgttgtggtcattgtactttggcatacttcaaaggttcaaagcaagtttctgttttgttttgccagtttgcaggacacgcaggcaatccttt

SEQ ID NO: 729597 - DNA, 623 bp, Homo sapiens
gtgagactaaggcgttgtgcctgggtcaaagcaggaagtgatgcaatgtttatagagtgagtgaacaatctttttccctcctgaatgcctgtgaaaacattactatttgaaagaaacaatgaaggtgtttcaccaagtggacagaacttttaaatgacaggattttttatggctttacgtcattcattcaaaggtatttatttggcaccaactgtgtgtgctaaatgctgtcaaccaagaagaggcaaaagaccagagagcaaagcagtaagacaaggtattcaytggagtcttaggaatcacaatttgggagatacagattcagctcgaagccaaattatattccaaagagagggaagggagtagggggtttttaagagaaaataacaagaaagctaagggtggttacacaagctgttttgaaaggattattattggtggacgcagctggcttagcacatgagcccatagctcattggttgttactgttcgggagttgcagcactggtgaaattcatttgttttccaggatgttgtggtcattgtactttggcatacttcaaaggttcaaagcaagtttctgttttgttttgccagtttgcaggacacgcaggcaatccttt

SEQ ID NO: 729598 - DNA, 576 bp, Homo sapiens
cactgcactccagcctgggcaacagggtgagatatcatagctgtaattccaacgctttggggggctgaggaaggcggatcacttgaggacaggagttcaacatcagcctggccaacatggtgaaacctcgtctctagtaaaaatacaaaaattatccgggagtgtccaggagtggtggcaggcacctgtaatcccagctactcaagaggctgaggcaggagaattgcttgaacccgggaggcagaggttgcagtcagctgagatcgcgccactgtactccagcctgggcaacaagagtgaaactccgtctgccctccgtctgtctgcracagagctagactccatgtcaaaaaaaaaaaaaaggcaaaatatttgaacacatttttcactaaagatgatatatgaatggtatataaatgcatgaaaataagttcagaattattactatttaaggaactacaaatgaaaaccacaatgagataccactacatactcattttgatgagtaacattaaccgaatgatcacacctagctgttgaaggtatgaaataaactggagctctcatacattgctg

SEQ ID NO: 729599 - DNA, 642 bp, Homo sapiens
tatgtacctattaggccttagctctattaatattactggtgtagttactaatcactcctggccccatcacccaaattgtattgattgtacagaatgggctccctttgataattctcacccctgtccttggactcagtgtcttggccccttagctaracaacagtccatgttaatgggagacattatcgactggggtccccatggtcatttagatgggagaagtgagaatcagacctcatggcataaattttgctggcactggtggcgaaacttgaacatctcttcgctacatcccaatctgctacacaacttgcttggcacagaatgggctttagcccacctttgcctcaatggcattatcaaggaaagagaggtccaattcaggagtcaatatggaagacagcactcccatttatgaatggcagcatttgggttgggacactatccaataatagtaataatgctcaatgcagttttaatgttacctttgtagaaaatactaccacacagtttacaatttgtatttttaatccgtatgtttttctagcagcaaaaaaggaccaactccgggtaaacaatgcccaatcgatttgtgatgcctgtcaactgtatcattgccttaatcatagcacaatacaaaca

SEQ ID NO: 729600 - DNA, 642 bp, Homo sapiens
tatgtacctattaggccttagctctattaatattactggtgtagttactaatcactcctggccccatcacccaaattgtattgattgtacagaatgggctccctttgataattctcacccctgtccttggactcagtgtcttggccccttagctaaacaacagtccatgttaatgggagacattatcractggggtccccatggtcatttagatgggagaagtgagaatcagacctcatggcataaattttgctggcactggtggcgaaacttgaacatctcttcgctacatcccaatctgctacacaacttgcttggcacagaatgggctttagcccacctttgcctcaatggcattatcaaggaaagagaggtccaattcaggagtcaatatggaagacagcactcccatttatgaatggcagcatttgggttgggacactatccaataatagtaataatgctcaatgcagttttaatgttacctttgtagaaaatactaccacacagtttacaatttgtatttttaatccgtatgtttttctagcagcaaaaaaggaccaactccgggtaaacaatgcccaatcgatttgtgatgcctgtcaactgtatcattgccttaatcatagcacaatacaaaca

SEQ ID NO: 729601 - DNA, 642 bp, Homo sapiens
tatgtacctattaggccttagctctattaatattactggtgtagttactaatcactcctggccccatcacccaaattgtattgattgtacagaatgggctccctttgataattctcacccctgtccttggactcagtgtcttggccccttagctaaacaacagtccatgttaatgggagacattatcgactggggtccccatggtcatttagatgggagaagtgagaatcagacctcatggcataaattttgctggcactggtggcgaaacttgaacatctcttygctacatcccaatctgctacacaacttgcttggcacagaatgggctttagcccacctttgcctcaatggcattatcaaggaaagagaggtccaattcaggagtcaatatggaagacagcactcccatttatgaatggcagcatttgggttgggacactatccaataatagtaataatgctcaatgcagttttaatgttacctttgtagaaaatactaccacacagtttacaatttgtatttttaatccgtatgtttttctagcagcaaaaaaggaccaactccgggtaaacaatgcccaatcgatttgtgatgcctgtcaactgtatcattgccttaatcatagcacaatacaaaca

SEQ ID NO: 729602 - DNA, 642 bp, Homo sapiens
tatgtacctattaggccttagctctattaatattactggtgtagttactaatcactcctggccccatcacccaaattgtattgattgtacagaatgggctccctttgataattctcacccctgtccttggactcagtgtcttggccccttagctaaacaacagtccatgttaatgggagacattatcgactggggtccccatggtcatttagatgggagaagtgagaatcagacctcatggcataaattttgctggcactggtggcgaaacttgaacatctcttcgctacatcccaatctgctacacaacttgcttggcacagaatgggctttagcccacctttgcctcaatggcattatcaaggaaagagaggtccaattcaggagtcaatatggaagacagcactcccatttatgaatggcagcatttgggttgggacactatccaataatagtaataatgctcaatgcagttttaatgttrcctttgtagaaaatactaccacacagtttacaatttgtatttttaatccgtatgtttttctagcagcaaaaaaggaccaactccgggtaaacaatgcccaatcgatttgtgatgcctgtcaactgtatcattgccttaatcatagcacaatacaaaca

SEQ ID NO: 729603 - DNA, 649 bp, Homo sapiens
tgctgagacttgtgttgcctttgtaaaatttctaaattctaacaaatgcctggagaccctaccaaaacaactgaaactggtgtaaacttgaggaaagtttactctcatttaaataaatccctgtttgttcacttgcyttatttgttctttttactgtgaatgttttcatatagatatttaaaaactttattacttggcagaatatttgtaatgatacaaagaactgctacacagatgttaaaaatattcatagtaaaaagtttttaaatgatatatagaacaagtatatttcatatgtgaatttcacatatttggtgatccaagtagtattcccaattggaagaataccttgcaactctgttcctatgccattgcatggtttctccttctttgcattgtcacagtatagtaatgcccaacccaaaccatggcatgtggatacacattttaaattgatataatttttaatgtttgctttccttaaggatttgtgtttattttttttttaaagcaagtcttaaacttcccactactttgccaagagataggcaatatacaacaggcacttttaagaaaggaaacgtgcaatgcctcaccatgtttgcttggaagatccctaacattacgtggtaaactcatcacaaaaaaa

SEQ ID NO: 729604 - DNA, 569 bp, Homo sapiens
tattttatgatagagacaaacccacaatcgccttttgggaggcatgctcctataagttaatattctgaattctggttcatggaagcttctcctggggaagaaataatgctagattattgctggggaatggaactgaataacacttctaaaaatagaatcgtttatgtaagtcaatcctggcaccactggcatttgggactggataattctgttgtagggggctgctctgtgcaytgtaagatgtttggcaacatccctggtctccatcactggatgccaggcgcgccccgcattgtgacaaccaaaattgtctccagacattgccaaatgtcccctgggatgggaggagcaaaattgcccccagttgagaatcactgacttaagagtatacagaaatgtatttctgctttgctgatttttaactacatgaaaatacatatatatattgtcaaaatattttccaaccaattatgtaataccaagtgtgctgtgttttgttgaggtgggagaaagaaccatacctcttcactgaggttacatggataactgctttagaagatccattggta

SEQ ID NO: 729605 - DNA, 569 bp, Homo sapiens
tattttatgatagagacaaacccacaatcgccttttgggaggcatgctcctataagttaatattctgaattctggttcatggaagcttctcctggggaagaaataatgctagattattgctggggaatggaactgaataacacttctaaaaatagaatcgtttatgtaagtcaatcctggcaccactggcatttgggactggataattctgttgtagggggctgctctgtgcactgtaagatgtttggcaacatccctggtctccatcactggatgccaggcgcgccccgcattgtgacaaccaaaattgtctccagacattgccaaatgtcccctgggatgggaggagcaaaattgcccccagttgagaatyactgacttaagagtatacagaaatgtatttctgctttgctgatttttaactacatgaaaatacatatatatattgtcaaaatattttccaaccaattatgtaataccaagtgtgctgtgttttgttgaggtgggagaaagaaccatacctcttcactgaggttacatggataactgctttagaagatccattggta

SEQ ID NO: 729606 - DNA, 600 bp, Homo sapiens
aaactcagaaaattactttctgggcagagacaaagctaattcaatcttaatttgatctattactttaagatgatgattgagtgtactaaccaatacaaaagaggttaacaaaaagtacctgaggaagatcagttttgcaggatttcagagtattattcaccaaatctgctaagggtatgttatttaaatccatcaaaatcccatttctggggttctaggtaaatgtaaggtgtggctccagcaagctccatctgaggctagagtactaaaagccccccaaggaagacacacyatcagacaacagtagggaaagcagaaatacctcccatagccaggctatgtccattccattggtgcttgactactgtctggattcattcgatcacgttaatttacttgacaagttatgtttctggtaggcttcaagaattatcttgaatttgaaactagtggggtagaaatttaaaagctttcccaatgctttctggacatttccgcctcgtattttcccctgtggttagagctgatgctggcttacctggggacacccaggtacccactgatgtttgctgatgctagtattgatcctccaaaccagcc

SEQ ID NO: 729607 - DNA, 628 bp, Homo sapiens
gagcccaaatagaaaggaaccaggttgccaacaccaagttgtgagggtgccatcttagaaatgtattcctcggccccagtcaagcctttatatgattgcagccccagatgacacctgactgacaacttaggagcaaccacaagccagaactgtcacattgagctactactgaattcctgaccaatagaaaccttgaaaaatgataatagattattgtagctttaagccactaggtttggggtgatttgttccacagtagtagataactaatagaagtgttttcttcattctcattaggaacttcctgaaatgtgtctcttatctactgcgttaaaactcattaacaaatttctattttcaacatattaagtccaaacttcccttcattttctataatttggagcctactttaattctcaccactccacctatgctgcaatgtagcacagatatgatttcaagaattagycattattcctcaattagcctctatgaaactagcatggacttggcagtcagagagtcctgggtcctaattcaaaatccacttcttgtttgcctatctatatttgccattttcccagaagaggccactgcatgaagagtggaacacaacccacgacaagaa

SEQ ID NO: 729608 - DNA, 680 bp, Homo sapiens
tgatatcaaagcaaaaagatttttgcattgtcagactcaaagaaggatccttttgtacgaagagaaatgatcctataactgctttgttggattcttaatttaaatattcattaagtgaatttaacatatacagttcataatcctcttcctttgagaaagaaaagagstcatttatctgagactaagagctttccctacttaacaaaacccaagggctagaaatctgaagatttatttcaaattttcttaagggcagttgaataatgtataagatatacaacaccagatggcagtatttccatgttctagggcatacacacacacatacacacacacacacacacacacacacacacacacacgcacgcacacatacagagacatatatatatctatatacaagtagacaaaaaacggtgtttctatagtgaccaatatcgggcaggcagactttaaaatcagtatgacaataggcacagatatttacatcagaaatttctctttacacttgagatatgtgactcatttttcccatatagttcacttaaaaacagtttataattattattttttttcttatttactaaggcagcaacacataggtaggtaatccatataaatattgacaaacaatgaaaagaaaaatgagggaaaaaattaccgaaattgccaagctagca

SEQ ID NO: 729609 - DNA, 601 bp, Homo sapiens
aagtacaggcatgattggtccaccactgccactactggggcccaagaactggcctacctggaatgcctgtctccaataaaactttaccatagcctccattaacaactacaccctaagccacggatgacaccacagacaccatgaccactgtttacagctgaagaaattatacaaggactatactacttcacacacccaaaatcaaagccaaggtgccgtcccaaccaacaccatagttatatcttcaggaaaaatcctcccctcccctaggaaagcaaatccaaaataggaagaatatgttgttacaccagatgctcagatatcaatgtaaggacacaaaaaacacgaaaaagcaagaaaatatgacacctgcagaggaacacaataattctccagcaacagattccaatgaaatttatgaaatttcataaaatcctagaaraaattcaaaatattgacattaaaaaattcagtgatatgtaagagaatacaggtaaacaatacaaagaaatcagaaaaaaacaattcaggatatgaatgagaaattaaccaaagagatatcatagaaaagaaccaaacagaaatactggaaatgaagaat

SEQ ID NO: 729610 - DNA, 544 bp, Homo sapiens
gtttcagaagtcttgatggtatccaaatcgactcttgattttggcctggagaaacacaagcattacctctaccccaagttattattttacctatttcacaactttttgttattggatttctgcaccaaatcaattgttctgcttctgtctttgcagctggtttctatagatgctgttcagctgctsttaacatctggcctttgggcaggcttgaaaaatttaaagttaataatgctagattcagttgcatctgtggggttccatattctctatttcccccttttggcttttgcactgctattttagggaaagattcattctttccgctatggcttgtccttgagaattgtatgggataccagtaatgtgtttaatattccatatagagaaaaatgtagctagagcttggctagtataacctggggcattatctgttttaatagaagctggaatgcccatcacagcaaaacactgcaaaaggtgacatttaacacagcagaagactcttctgattggcatgtagcccagacaaagtgagaaaagg

SEQ ID NO: 729611 - DNA, 544 bp, Homo sapiens
gtttcagaagtcttgatggtatccaaatcgactcttgattttggcctggagaaacacaagcattacctctaccccaagttattattttacctatttcacaactttttgttattggatttctgcaccaaatcaattgttctgcttctgtctttgcagctggtttctatagatgctgttcagctgctgttaacatctggcctttgggcaggcttgaaaaatttaaagttaataatgctagattcagttgcatctgtggggttccatattctctatttccccctttyggcttttgcactgctattttagggaaagattcattctttccgctatggcttgtccttgagaattgtatgggataccagtaatgtgtttaatattccatatagagaaaaatgtagctagagcttggctagtataacctggggcattatctgttttaatagaagctggaatgcccatcacagcaaaacactgcaaaaggtgacatttaacacagcagaagactcttctgattggcatgtagcccagacaaagtgagaaaagg

SEQ ID NO: 729612 - DNA, 606 bp, Homo sapiens
cttggtgcagagctgagttcaattcctggatatccttgttaactttctatctcattgatctgtctaatgttgacagtgggctattaaagtctcccattattattgtgtgggagtctaagtctctttgtaggtctctaaggacttgctttatgaatctgggagctcctgtattgggtgcatatatatttaggatagttagctcttcttgttgaattgatccctttaccattatgtaatggcctcctttgtctcttttgatctckgttggtttaaagtctgttttatcagagactaggattgcaatccttgctttttttttttgttttccatttgcttggtagatcttcctccgtccctttattttgagcctatgtgtgtcattgcacatgagatgggtctcctgaatacagcacactgatgggtcttgactctttatccaatttgccatctgtgtcttttaattggagcatttagcccatttacatttaaggttaatattgttatgtgtgaatttgatcctgtcatgatgttagctggttattttgctcattagttgatccagtttcttcctagcattgatggtctttacaatttggcatgcttttg

SEQ ID NO: 729613 - DNA, 586 bp, Homo sapiens
gggaattgaacaatgagaacacttggacacagggttggaaacatcacacaccagggcctgttgtggagggggaggggagagggatagcattaggagatatacctaatgtaaatgatgagttaatgggtgcagcacaccaacatggcacatgtatacacatgtaacaaacctgcacgttgtgcacatgtaccctagaacttaaagtataayaataaaaaataaaaataaaaaaaaaacaaaaaaataaaaatataaatataaaatatgcccttgcttcttctttgctttctgccataattgtgaggcctccctagccatgtggaactatgattcctttaaacctttttcctttataaattacccagtctcaagtatgtctttatgagcagcataagaacagactaatacagtaaattgttactgcagagagtccatcgctgctgtaaagatacctgaaaatgtggaagcattttggaactgggtaacaggcagaggttgaaacagtttggagggctcaggagacagaaagatgtgggaaagtttggaacttcctagagacttgttaaatgccttgaccaaaatgctg

SEQ ID NO: 729614 - DNA, 680 bp, Homo sapiens
aaatgatgaaacatagaaattctcaaacagtgagatatgagctgttattcccagcttatagacagggaaactgggccaataaatgagacagccagccccaaactgtctacctttggcacacagctaagtcttttagccacaccatgctactcccaaatattgacaaagaagtcactgtgttccattgtgccgacactctcctaggacattccattcagtctgaacagcaaatctgtggggccgtactgctgtctcccttctacagacaaagggacagctgagaattagaatccagacctgcctaataccaaagtccacgctcttttcacaacatggtacaccayctgccccttcctgcctctgtgatccccaaatgatctcttctggaagcccacatggcatcctgtgtggacactgatgtcacttggttgagcccctgatgaaaaggtaagagtgcatgtccttcttggggaccagcaaggaggtcagggaaacctggaagaaaataatacgtaggaccagaccctctctatcaggtgaaattgacagggaatccactctctgcagccacaccccaaagtccaggcagacagggagacccccgtaccagggacaaagatccaaacccaacctggaactccaggccctgggatgggcccacaggacccagggagaactcc

SEQ ID NO: 729615 - DNA, 611 bp, Homo sapiens
cctaaagatttgttgaatggttttggccaaaatgctgatagtgatatggacaatgaagcccaggctcaggcggtcacagatagagatgaggagcttattgggaactggagcaaaggtcactattgctatgctttagcaaagagactggtgccattttgaccrtgccctggagatctgtggaactttgaacttgagagagatgatttagggtatctggcagaagaaatttctaagcagcaaagcattcaagaagtgacctgggtgctctcaaaagcatttagttatacgcattcacaaagacatggtttggaattttaacttatgtttaaaagggaagcagagcataaaggtttggaaaatttgcagcctgaccacgtggtagaaaagaaaaacccagtttctgaggaagaattcaaatgagctgcagaaatttgcataagtaaccaggaaccaaatgttagtagccaagacaatgggaaaaatgtctccaaggcatgttagagatcttcaagccagctcctctcatcataggcctggagtcctaggaggaaaaaataattttatgggcaaggcccagcaccctgctgctttgtgcagccttggcacttggt

SEQ ID NO: 729616 - DNA, 597 bp, Homo sapiens
attcctcctgcctgcctgcctgccttccaactaagacatcaccgtttgtttcctgccttcagtctcaaactggaacatttggctcttcctgggttttgagcctgtcggccttcagactggaactacaacatcagctctcctgggtctccagtttgccctctcactctgcagatcttgggatttgcctccataattgcataagctaattctttataacaaatttcccttggccaggtgctgtggctcccacctgtaatcccagcaccttgagaggccaargcaggagaattgcttgaggctaggagtttgagaccagcctgggcaacaaagcaagatccccatctctacaaaaatgaaaaataaaaaattagctgggcacagtggcatgtgctgtagtccccgcttctcaggaggctgaagcaggaggatccttgggcctaggagttcaaggctgtagtgagctatgatggtgccactgcactccaacctgcatgacaaagcaagatcctgtctcaaaaacaaaaattaaaaattaaaaaatatataaaaactctatatatatatagattgataagtaggtacatagataacagatag

SEQ ID NO: 729617 - DNA, 584 bp, Homo sapiens
cttccagttcagttctgaaaagtaaggttgggacctgggtacgtggatccctgagtagatcccagcatctgggccatggagaggttggggcaacaggttattgattaacctgactttatagggactgaagtccacctccagagacaagtccaagttcttgatccacccattccccctataatggcagaggacctttatgtctcttttctctcccttatacccttggrtcacagctccagttgtccccagagcaccctgggcctgggctgagccagaccagacccttgggaggtggccctatccctaggcagtggtgctaggaggacagaaggctatatgggcgtggcagaggctggttaacaagggcttagtacacgcttgctgttctgtgcccagtatgtgggcggatgacgcaagactacaagatccttgccctcaagctgctaggaacttacggttttattaggagagcagtacaagggtatctatcccagtaccaaatggtgcttcagctctaacatggaggtcagagaaagggacttggaccaataaaatgacatggaggcctaacaggttgcctgaat

SEQ ID NO: 729618 - DNA, 548 bp, Homo sapiens
atttatttttgattgatggagaatgttttctactagtttctaatctgttagtgcttattctagacataactaggacaattaatttaaacactgactctaattcttaataaggcctccataaacatcaactgtatttaaaaaaaaaatggtaagtattccagcacattaggcagaaaaataatgacacaaaagtctctttaaatgccaagatgtcaaatgtgtctgcattaaaggaataacagcaaatttactaggtttacagattttcatgaatgagaaaatatacaaatatccatatagaagaaagagatgagtgataaggacaggcaataggaagaaggrgaactaacctacttttcttccactatcaggtcagtaagaatggccttctcctttcctttatcaccctcttctttcataagagagatacggacctaaagaggagacactgggctgaaccaggctgaaacagtagactcatccaaaccaggacaggctgataatttactctctaaagtaggatggtgtgaaattctaaattatgtagt

SEQ ID NO: 729619 - DNA, 576 bp, Homo sapiens
ctcctcttcctctcactgccagagtgatgtcagaagattctgtagcaggttctcggaagcctattgtacagtaacaaagaattccagcagtgagctgtgagttctgtccttgctggctttcccaagtggaaggctaccctcatctttcactaatggcagactaggacaagcattacccaggcctgcaagcttgttaaggactaggaacccaagcaagaactcaccatgccaatcaaacctgttgggtggatatgtgggcaggtgttgaagaacttttctggaagaagtatacacaatcttgttgtaaagggcgtatgggtgtgggaacaattgggaataagatcccctagagttcctttactttccgagtcatctaggaatttgatcaagtgtttcatgttmttttgaaacatttaggggatgttttcaaagttttctttttcctaacctctttttgtcttagtcgaggggatccagaaagcaatcatggaccttgtagatgagtttaaagatgaatttcccaccatcctaagattatcacagtctaatcaggtaatgtgattttataacctttaa

SEQ ID NO: 729620 - DNA, 611 bp, Homo sapiens
aaatgtttctcatttttctccctgttcttagtcttgattcctcttcagtctattttgtgcactagttcctggtaaatgtttcccattggccaggtcaccacactaagagcatgatcataattcttgatgctacctatggagtgctgattgtataccaggcactgtgatacttactgtacatatattatctcatttactctttatgatagccctgtaaagtaggcatgatttatccccattttatagatgagaaaaccgacggtccaagagatttacaaatgtgccacattatttaagtagcagagccaggatatgaactcaggttagcctggttacaatcattatgaaacaccattctcctaaatataaatacattttgttmcttcattaaaatatacccagcagaacctcaacctggcaaaaatagaagctcaatgaatcgcagcattgaaagcactttattaaatgagttgaactgagcagggtgcatgctgaaagctcccactgaccttcaagcctgcgccttccatttgttccagctcatagtgctccactcccacccctttcaaatctcagggagattttatagttatgttgttgcattcaggtag

SEQ ID NO: 729621 - DNA, 546 bp, Homo sapiens
ttgtaagacaaggggtaaatgtttgaggtagtagatacccccatttacctctatgtgattattatgtactgtctgtctatgttagaatatctcatggaccccataaacctatacacctactatgtacccacaaaaagcaaaaagaaaaagagcttatgggtatcaatttttctgttagtaacgcttttgttgtgtcccagcaagttttggtacattgtcttctcatctttatttgcatttaagtattttctaatttcccttctgattttttttttttttaatttaagtcccaggacacatgtgcaggacatgcaggtttgttacgtaggtaaatgtgtgccacggtggtttgctgcacctgtcaacccatcacctaggtgttaagccctacatgcattaactatttatwctgatgctctctctccctctgcccccctttttctttgattcattggttaagagtatgttgtttcatttccatacatttgttaatttttccattttacttctattattgatttctaagcttatcccattatcgttgga

SEQ ID NO: 729622 - DNA, 582 bp, Homo sapiens
ctggtgttcaccaaaggagtcactctgtaaaatttggggagttatttattctgagccaaatatgagcaccggtggcctgtgacacagccccaggtcctgagaacttgtgcccaaggcggtctggctacttaattgtrtacattttagggacataggacattgatcattacatctaagatgtacgttggtttagtcggaaaggtgggacgatttgaaggggagggactttcaggtcataggcggattaaaagatgttctgattaataattggttgattttatctaaagacctgaaatcaatagaatggactatctgggttaagaggagttgtggagaccaagattattatgcagatgaagccgccagattgtaaatgtttcttatcagacttaaaaaggtaccagaatcttagttaattctctcctggatcaggaaatagacctggaaagggagggggattctctatagaatgtagattttcccaagagacagctttgcagggccatttcaaaatacatcagagaaatatattttggggtaaaatacttcggtttctttcagggcctgctgtcacgttggtat

SEQ ID NO: 729623 - DNA, 476 bp, Homo sapiens
agacattcgccaggcataaggatcctctggagagacacatcagcttgaggaatacagggtggtggctctgtccagccaccctgccccatctcctaccctcccatccattctgcattgggtgcctcctgcatgcagagtcctcctccaacagcaaatgcctcccagatttgctgaagggcctgctccagggtctctgtggagacgcccctgggacccttgctgaccaccctccacaatctgcacccccatcctgtgcccccttcgttttttttgycccaccactacctggtggtgagacagctctgtaacctgcgcctagaacagcgcctggcactcagccggtgctctgcgaggatctgggggaatgaacgaatgattgaatgaatgaataggtaggaagactacctgaaggaggatgttggccaggaagcctgtggtggcctggctgttctagcagcccagccctggcccgcaga

SEQ ID NO: 729624 - DNA, 592 bp, Homo sapiens
tgcagagctgagttcaagtcctggatatccttgttaaccttctgtcttgttgatcggtctaatattgagaatggggtgttaaagtctcccattaatattgtgtgggagtctaagtctctttgtaggtctctaaggacttgttttatgaatctgggtgctcctgtattgggtgcatatatattacgatagttagctcttcttgttgaattgatccctttaccattatgtaatggccttctttgtcttttttgatctttgttggtttaaagtctgttttatcagagactaggattgcaactcctgcttttttttgctttccatttgcttgagagatcttcctccatscctttattttgagcctatgtgtgtctctgcacgtgagatggttctcctgaatatagcacagtgatgagtcttgactctttatccagtttgccagtctgtgtcttttaattggagcatttagcccatttacatttaaggttaatattgttatttgtgaatttgatcctgacattatgatgttagctagttattttgcccattagttgatgcagtttcttcctagcatcgatagtctttacaatttggc

SEQ ID NO: 729625 - DNA, 514 bp, Homo sapiens
ataagcttatctgcaacaatcccatcattacgtctttctttctttttgccaggatgtcattcttcttgtctacagttaaccctttagcctgtgccctggatcacattctctgattttctcttggctcatgttgcaccaattttcctttcattcttctgcatctttcactattcttactctttattcttggtcattgkcatatgcagtagctcaagtctttatcatagaaaacctttcatcgaccatataacatccttaacttattttctcttcttctctcctcagccaagattcttgaaagtattgtttacaatacagtaatctttttgtttaatggaattaaattccttctgaaactggattctgcttttaacatcacactgaatttgctccagaaaaaaatcatcagtaacctctgtacataccatgtatatcaaatctggtctttctggacatttctccatcgttggaccctggagatgattttttttttcgacagctcccttttccactg

SEQ ID NO: 729626 - DNA, 543 bp, Homo sapiens
agaatatacatttttctcagtgtcacatgacacttactttaaaatcgaccacataattagaagtgaaacacacctcagcaaatgcaaaagaactgaaatcataaaaaacagtctctcagaccacagtgcaaacaaattagaatccggattaagaatctcaygcaaaactacacaactatatggaaattgaacaacctggtcctgaatggctcctaggtaaataatgaaattaaggaagaaatcaaaaagttctttgaaaccaatgaaaacaaagaaacaatgtacaagaatctctgggattcagctaaagcagtgttaagggggaaacttatagcactaaatgcccacatcagaaagctagaaagatctcaaatagacaccttaacatcacaattaaaagaacgagagaagcaagagcaaacaaatccaaaagctagcagaaacaagaaataactaagatcagagcagaactgaaggagatagagacacacaaaacccttcaaaaaatcaatgaatctaggagctgtttttttgaaaaaatta

SEQ ID NO: 729627 - DNA, 524 bp, Homo sapiens
attgaaaactataaaaactctagaagaaaacttagacaataccattcaggacacaggcatggcaaagattttatgatgaaattgccaaaagcaattacaacaaaagctaaaattgacaaatgaaatctcattaaactaaagagtttctgcacagcaaaagaaactatcatcagagtgaacaggcaacctacagaatagcagaacatttttgcaatctacccatctgacaagtctaatatctgraatttacaaggaacttaaagaaatgtacaaaaaaaaaaaccaaacaaccccaccaaaaagtgggcaaaggatatgaatggacacttcttaaaaggagacatttatgtggccaacaaacttatgaaaaaaagctcaacatcagtgatcattagagaaatgcaaattgaaaccacaatgagataccatctcatgccagtcagaatggcgattattaaaaagtcaagaaacaatagatgctggcgaggctgtggagaaatgggaacactacactgtttgtggga

SEQ ID NO: 729628 - DNA, 600 bp, Homo sapiens
aagttattgattttgattctcctttcatctttatctcatgttagaaatcggccatgccaacactcccctgggatttccctccattctgccatctaattttatcccatcatttctttcaaaatctggctcaaaccacatttctgcccagatgtcttccctggtaaatttcatacaatttgggtctcttttttttttttcagcccatgtcctcatatggccaatttatgctaacttgcaacactttctgtgttgccaggtattaatttataatttgtatatcatttccatttcaaactacaatttttctcaaagtaacagtccttaagcccttaacttaaaaaaaaaaaaaaaaaaaagcctcaayctcagaaaatgatagtatggagtgcatctagtccattgagcattttatttaacaattaaataaaatagaaaatttacccaggaagcaatgaagcagataggtaaatgtttagccctgtgtttctacaagtatcttttcttcaaaataaaatgcagacatataatataccatgcgaatttacaagtcactttgctactgttgatgacaaaggagtgcttccgtgctgtgcgtgttat

SEQ ID NO: 729629 - DNA, 599 bp, Homo sapiens
tttaacataggaggtttaaattgacaataaacattttatctctgatggaaatactttaaattttcatattaggaatttagcttaataagaaaccaaattatatttctctagctgtagcatagcttctgtatttaatactgtgtattaaatgcattttattttattaaatggcgtatcctttccattttatgttactgtcatttttacagccttttttcttctctcaatrtattgacacagctcttaccttttcaagttatggattatgtcacttatatttattgagtgcctgctataaaccaaaaaagaaaaacaccaataagaagggttagaatgaataagagaatattgaccactaagcttttgtatgcgtcaaatttgtatgcagattagtgctatatgaattataagttcatcctgagctcagacccacagaccccccaaaaaaaagaaaagaaaagaaaaaacaaatctagaaccagaactggactattgtggtttattataaaagggattcattatctggcatcatgcaaaatgtatggagcataaagtgtagtaatataatacctttcttgtcgggttttcttaaaattaag

SEQ ID NO: 729630 - DNA, 599 bp, Homo sapiens
tttaacataggaggtttaaattgacaataaacattttatctctgatggaaatactttaaattttcatattaggaatttagcttaataagaaaccaaattatatttctctagctgtagcatagcttctgtatttaatactgtgtattaaatgcattttattttattaaatggcgtatcctttccattttatgttactgtcatttttacagccttttttcttctctcaatatattgacacagctcttaccttttcaagttatggattatgtcacttatatttattgagtgcctgctataaaccaaaaaagaaaaacaccaataagaagggttagaatgaataagagaatattgaccactaagcttttgtatgcgtcaaatttgtatgcagattagtgctatatgaattataagttcatcctgagctcagacccacagacccccmaaaaaaaagaaaagaaaagaaaaaacaaatctagaaccagaactggactattgtggtttattataaaagggattcattatctggcatcatgcaaaatgtatggagcataaagtgtagtaatataatacctttcttgtcgggttttcttaaaattaag

SEQ ID NO: 729631 - DNA, 685 bp, Homo sapiens
agttgggaagaatgaaggaaattgtctaagtagttctggcatccctgatcgattgcttattggatgtgtggtctttgttatatttttcatttccggcatctaccttatttttcttattgtagaccagtatctcttctctgttagagagttttagtattattcagtgagaagtgtttaagcaaatactgcattttgaaataataatttgaagtcrtggcagttccacttcatcattagacttgaaaccagagaagccatattgactttctgtgactctaagtcataggatacaaaaggattggttctgaggggttgggattttcttgttgatggttggctcagtcatttggattgtggcaaagctttggtcttttctcttttgactagtcatcctatatgccaacagaaaacccacagaaatgtcttatccaattttctttgtaaagccagcagtcactgagatcatttttaaacctgtaaaattccctttacagccccatttgctaagaagattttatttgtaattgtatgttattttccataaaatgtgaatctcttaaggattgttatcatagctaatatatttgtaggtactacaccagctattgagttctatatactgttgtttttaaacatgaaagtcaaatataactcttaaattatatgaaagaagtgtcagtcatgt

SEQ ID NO: 729632 - DNA, 685 bp, Homo sapiens
agttgggaagaatgaaggaaattgtctaagtagttctggcatccctgatcgattgcttattggatgtgtggtctttgttatatttttcatttccggcatctaccttatttttcttattgtagaccagtatctcttctctgttagagagttttagtattattcagtgagaagtgtttaagcaaatactgcattttgaaataataatttgaagtcatggcagttccacttcatcattagacttgaaaccagagaagccatattgactttctgtgactctaagtcataggatacaaaaggattggttctgaggggttgggattttcttgttgatggttggctcagtcatttggattgtggcaaagctttggtcttttctcttttgactagtcatcctataygccaacagaaaacccacagaaatgtcttatccaattttctttgtaaagccagcagtcactgagatcatttttaaacctgtaaaattccctttacagccccatttgctaagaagattttatttgtaattgtatgttattttccataaaatgtgaatctcttaaggattgttatcatagctaatatatttgtaggtactacaccagctattgagttctatatactgttgtttttaaacatgaaagtcaaatataactcttaaattatatgaaagaagtgtcagtcatgt

SEQ ID NO: 729633 - DNA, 570 bp, Homo sapiens
aagaccagtaggcctcaggaaaagtgtgtgctgggcggaccagtaggcctcaggaaaagtgtgtgctgggcggaccaggaaacagaggggcagccttgcttcctgcccccaccccccagtgggtttggaactgaagccaatagtggctcagaggctgggtctcaggctgaagctggtctccacactgactggacacagcccctgccctcccagaacctgtggctgctcctcctaaaggcaggagcgctagcctggaggccaacctctgcctggcatgggcctcaaagaccagaatcccaccctccacctggcagtaggggcccagtgagaggaagggcaggwccctgttctctgggacatgggctagtaacaggcttcaccttgccccacccctgagttcctaaacctaccattctgctttgactcaggagatgcgagatgacccaacacacagcctcaggggccaggagcttcctgagaaggctggggccctgtgcttcctagtgtggggacacatctgcacgaggcccaggaagtgcaggccccaggcccctttgagctcccccaggc

SEQ ID NO: 729634 - DNA, 612 bp, Homo sapiens
atcggccgaggtgggcagatcacaaggtcaggagatcgagaccatcctggctaacatggtgaaaccctgtctctactaaaaatacaaaaaaattagctgggggtggtggcaggtgcctgttgtcccagctactcgggaggctgaggcaggagaatggcgtgaacccaggaaacggagcttgcagtcagccgagattgcgccactgcactccagcctggggggacagagccagactccgtcccccctcaaaaaaaaatttagtgttccattacccaatctgtgcagaagacatagctacaagctcaagtcatgtgaacttattccttctttcatgttctttctttctttatgtagatccaaatttctgatctgtattrttttcctcctttccttaaaaaaattgatggccaggcacggtggtttacacctataatcccagcactttgggaggccaagacgggtggattgcttgagcacaggagtttgagaccaacctgggcaacacggagaaaccctgtctccacaaaaaatacaaaaaaaattagccaggcgccgtggcaagtgcctgtagtctcagctattcaggaggctgaggtggaaggatccttgagc

SEQ ID NO: 729635 - DNA, 612 bp, Homo sapiens
atcggccgaggtgggcagatcacaaggtcaggagatcgagaccatcctggctaacatggtgaaaccctgtctctactaaaaatacaaaaaaattagctgggggtggtggcaggtgcctgttgtcccagctactcgggaggctgaggcaggagaatggcgtgaacccaggaaacggagcttgcagtcagccgagattgcgccactgcactccagcctggggggacagagccagactccgtcccccctcaaaaaaaaatttagtgttccattacccaatctgtgcagaagacatagctacaagctcaagtcatgtgaacttattccttctttcatgttctttctttctttatgtagatccaaatttctgatctgtattgttttcctcctttccttaaaaaaattgatggccaggcacggtggtttacacctataatcccagcactttgggmggccaagacgggtggattgcttgagcacaggagtttgagaccaacctgggcaacacggagaaaccctgtctccacaaaaaatacaaaaaaaattagccaggcgccgtggcaagtgcctgtagtctcagctattcaggaggctgaggtggaaggatccttgagc

SEQ ID NO: 729636 - DNA, 457 bp, Homo sapiens
ggataagccacctggtccttgtgtaaaggaagagctcaaatctgcggcaccacagaccgttgcaaaactctgaaaatattaactgatggtaatcgccatcagtctagaaaggcccaaacaacctgacccgtccaagctccccagtaagctccactggtaagtcctggcagctgtctggcttggaatttgtagacagtagaacatgaatcagaagccccagaacaggtaacttaaattgagcttttaggatgacatgcccattatgarcaaggcactggctggggcttcgccgacattgtgtcacagggcaccacatcagccctgcaaagaagaagcagctgttattattctcagttggttactgagtcaagacttgaaacctagtctctttgaaccagatccaaagcccgttctttggaagctttgagggggaaacaaattaaacatgagaaggttt

SEQ ID NO: 729637 - DNA, 576 bp, Homo sapiens
cgtcaagttctataaaacagctagctgggattttggtaggtgttgttgaaagtttagatcaacttgggtgatactgccatcttaactgtggagcccaatggaacatctctcctgtaacacagaggtgtgcaggaaagaaggactgcactcctcaagccaccctgcctgaatcctccctatgtagagggaactgggrttagaaatgggtgagctatgaaaaatgggatctgctgatgtgtattggctgctgggaggattgggaactgccactcagctgcccagcacatggtgcttctggaaggcagagacatgagaaataatggagtccctcatttaaacatcatagcccccagtgttcttatcaagtttccattttttgtgtgtggttgttgagtaaatgcttctcatttgttgtaagccctttaatcaatgcctagagcctttgactgatgtctttgttaattttgagtggcttaatagatgtctttctaggggagagacttccccaagctcttcataccaccatttctgtgcttcttcaaacagattttggaccttcacattctagcttgtctg

SEQ ID NO: 729638 - DNA, 618 bp, Homo sapiens
tgtttacaattagcgttttagtccattggtgagtactgttggtaagtttttaatcttttgtaggtcataagtgtttaggcctaaatactctcctgagttctaaagcaggagccagcgtcacctcttgtttatacaccctgtcctggcctgagcctcctgaaggctggcacattcagcacagacccctctcactcctacttcccacccaccgcccttctgtgggtcacctgcccactactcaagatagcactcttggcttcttctggaacttctgtcttcaccaccctgtgttcggctctattccaactcatctctaatttctctttaccgagaccaggccgctgacagccctctcaacgattctaggagatttttgttatttcttctctggaaatacaatataaagaatttttatatggttttcyaagtagatatgaagctttttaaattaaaattttgtgttctgataagagaaatgaaccatcttcatcattttaagaagtagaaaatatattatagaaaagcaccaaagaaaataaaaacaacatagaaagtaaaaagtgaaagccctaccaccttcaagaggtgacctctgtcaacagttgatatatctctttc

SEQ ID NO: 729639 - DNA, 547 bp, Homo sapiens
aatgttccccttgagaccagaaaccagtaaatgatgattgcttttaccacttctgttcaacactggaagtcctggccattacaataatgcaagtaaaaaaagagaaaagtcacaaatatcagaaaaacagaagaaatgctgtttctatttgtgagtgatatgattgcttacatagaaaaaccacaaaataactcacagaatgcataaatgaatttagcatgttacatggttagtgyagaaaacaataaactgagtttttacaaattacctcaagcatttggaaaatgaaattcaaaaatataattccacttatagtacccccaaaacataaaagtatttaataaaaaaagaagaaatctaaacactttaccttgaaaattaagaatgttgcttcaaaaagttaaaggtaatagatgaagaatgaatgctaaatgtgtgaattacaggactcaacattgataagagcaattttcccaaaactgatctatagttgttatgtatttgattgcagaacaatcaaaattccagcagaatttttctgttgtta

SEQ ID NO: 729640 - DNA, 640 bp, Homo sapiens
attataaaatacctgaaaacatcctaagccctaacttctgatcaaacctcaggctcatcacaggtaggaattgaaaattaagaaaaaactgtaatctgcctgactgaatgtggcaggtatgagccccaacaagcccatctgcaaaatggaagttgtttctgttttttcttcttttttcctactttccttcttcgtgtgtttttttcttccttcctgagaataaatcatttaaatataaaattaatattgatgaattatctgtttcagttctggtaggttttgtttcatgtatttcaaggcacttttcataggtgagtatatattaataattgttaaatattcacgatttaccaactcctttctcattatagatgtctttcttggactttagtgttatatcctgcttaaagtatatattgtaaaacrtaatatagtgcctgtaactctcttatggttactatttgcaaggtctatattttccagtcttttacatttaaactatttatgtctttgaatcaaaagtatgtcttttttagacagtacatagttgattcttgaatttttttaatccaatttgacaatctctgccatttgattggggtgtttagaaaaagcacatttaatataacattgatatggc

SEQ ID NO: 729641 - DNA, 640 bp, Homo sapiens
attataaaatacctgaaaacatcctaagccctaacttctgatcaaacctcaggctcatcacaggtaggaattgaaaattaagaaaaaactgtaatctgcctgactgaatgtggcaggtatgagccccaacaagcccatctgcaaaatggaagttgtttctgttttttcttcttttttcctactttccttcttcgtgtgtttttttcttccttcctgagaataaatcatttaaatataaaattaatattgatgaattatctgtttcagttctggtaggttttgtttcatgtatttcaaggcacttttcataggtgagtatatattaataattgttaaatattcacgatttaccaactcctttctcattatagatgtctttcttggactttagtgttatatcctgcttaaagtatatattgtaaaacataatatagtgcctgtaactctcttatggttactatttgcaaggtctatrttttccagtcttttacatttaaactatttatgtctttgaatcaaaagtatgtcttttttagacagtacatagttgattcttgaatttttttaatccaatttgacaatctctgccatttgattggggtgtttagaaaaagcacatttaatataacattgatatggc

SEQ ID NO: 729642 - DNA, 538 bp, Homo sapiens
attgaaaatgttgcctttttttttttttttgagaaggagtcttgctctaccaccaggcaggagtgcagtggtgcaatctcggctcactgcaacctctgcctcccaggttcaagcgattcccctgcctgagcctcccaagtagctgggactacaggcgtgtgccacacgcccagctaatttttttgtattttaatagagatggggtttcaccatgttggccaggatggcctcgatctcytgaccttgtgatctgcccgccttgggctctcaaagtgctgggattacaggcgtgagccactgcacctggctgctttttgtttttgagacagtgtcttgctctgtcacccaggctggagtgcagtggcctgatcatgactcgctgcaacctctaccttcaaggctcaagcaatcctcccacactcaagcctcagtttcctgaatacctgagactacaggtatgtgccatcatgcctgactaattttttatttttattttttggtagagataaggtctccctgagcttcccaggctggggta

SEQ ID NO: 729643 - DNA, 658 bp, Homo sapiens
ttgggtcataaagtctataatgtttgtaaggtttaatattaatattgctatgacagctctcttttggttattgtttgaatgatatgtcttcatcgtattataaatgtcatccaatatagctctactccccttttgtgctattattgtgatacaaattgtatctttaaacattataattccatcaacataatttcatatatattgctttacatagttgtcttttatatcagatagtagaagagaaaaattgcaaacaaacttcttcatactctttttaatagttacctatgtagttatctttactagtgcacckttgctgtaaatttgagttacaatccagtgttcttatttttatattgcctgaagaactctctttactatttattgtagaaaatttctgctagtgataatttctcttctttttaatatgcaaagagcttaatttgaccttcatatttaaaggatagttttacttgaaataatattctttgttgacaatatttttacctttagcactttgctattctatccaactacttttaacctacatgatttctgaaaaaagtcagcagttgatcttatggaaaatcactaatttgtagtgagtaatttttctttctctattttcaagatgatctatttgtctttagttttgaca

SEQ ID NO: 729644 - DNA, 634 bp, Homo sapiens
attataaaatacctgaaaacatcctaagccctaacttctgatcaaacctcaggctcatcacaggtaggaattgaaaattaagaaaaaactgtaatctgcctgactgaatgtggcaggtatgagccccaacaagcccatctgcaaaatggaagttgtttctgttttttcttcttttttcctactttccttcttcgtgtgtttttttcttccttcctgagaataaatcatttaaatataaaattaatattgatgaattatctgtttcagttctggtaggttttgtttcatgtatttcaaggcacttttcataggtgagtatatattaataattgttaaatattcacgatttaccaactcctttctcattatagatgtctttcttggactttagtgttatatcctgcttaaagtatatattgtaaaacrtaatatagtgcctgtaactctcttatggttactatttgcaaggtctatattttccagtcttttacatttaaactatttatgtctttgaatcaaaagtatgtcttttttagacagtacatagttgattcttgaatttttttaatccaatttgacaatctctgccatttgattggggtgtttagaaaaagcacatttaatataacattga

SEQ ID NO: 729645 - DNA, 634 bp, Homo sapiens
attataaaatacctgaaaacatcctaagccctaacttctgatcaaacctcaggctcatcacaggtaggaattgaaaattaagaaaaaactgtaatctgcctgactgaatgtggcaggtatgagccccaacaagcccatctgcaaaatggaagttgtttctgttttttcttcttttttcctactttccttcttcgtgtgtttttttcttccttcctgagaataaatcatttaaatataaaattaatattgatgaattatctgtttcagttctggtaggttttgtttcatgtatttcaaggcacttttcataggtgagtatatattaataattgttaaatattcacgatttaccaactcctttctcattatagatgtctttcttggactttagtgttatatcctgcttaaagtatatattgtaaaacataatatagtgcctgtaactctcttatggttactatttgcaaggtctatrttttccagtcttttacatttaaactatttatgtctttgaatcaaaagtatgtcttttttagacagtacatagttgattcttgaatttttttaatccaatttgacaatctctgccatttgattggggtgtttagaaaaagcacatttaatataacattga

SEQ ID NO: 729646 - DNA, 565 bp, Homo sapiens
atgcccagcctcaacttctaacatagccctgatcacacttgtctatctttacctgtatactacaaactatccaagggtaacatctagatctcttgagccactacagagtatcattaaatagtcaacagatgaattagataaaacagagaagagttggaagtcagaaaaagaatgagtaatgttggtacaatctagtcaccagcgaatatggttaataggcttggttaaaaaacccaagttctatcccaaactattactatttcattatcatggttacatggaaatgaagcagctaaatgatcttgtttaatgttcacagaagagccagaagtagaaactccatctwacataaaaggcgacagcaaaaatacctacatacttatgaaacacttagaaaaaaggtgttcaaaattttatctctacacaaggcattttctaacagaaacttttcctggtttttgttctcatacacacgaaatagaagtcgataccttagtttctggcagagaggagaaagaaggggactgaattgtcaaagctctagcctgaaactcatttctattat

SEQ ID NO: 729647 - DNA, 619 bp, Homo sapiens
tggctgaggccgtggtctgctcttgaccagtaagctgagaagctggggagagacagtgcgggaaggaggcattggtggggaggtgactgccagacaggggttgtctggaaaggaggggaaggagaggcgccagaggggatctctgtaaaatgtctctcccctaagtgctaaattcctattttttctcctctctgctaatccaactccttttgctttaggtgagaatagccaagagttcagccccaccttttcagaacgcattttcatcgctgggtccaaacagtacaggtaagcaggggagacaagcctgagtgggaaggtggggactggacccagcgccctcrtccccagcacttgcctgggccgctcctgctgaccccgggctccctccctcagcacctgtggttcagctcctggaactcacccaggctttcctggctgagccgctctctcagccaaataagcttttcaaaggcttttcacagcttgtggctgactgcctctgggccacatcaacttgacattttatttttattctcctcagagtccttaatgcaccccctcgtttcccatcaacagggagggtgctgggaacagaagctgcttcccactcttgcgt

SEQ ID NO: 729648 - DNA, 616 bp, Homo sapiens
tcttgatatgttgaccaggctggtcttgaacttctggcctcaagtgatcctcctcccttggcctcccaagaaaataaaaacttttaaagagagacaaggatatgatcaggaacctatatcttaaaaaaaaaaataagatgattattcaaccatttaaactagtaaggtgatttttttcttgtggcagaggctaggcagctgtgcctccaaaattcatttgaaaactttttggttcagtgattattcagcaaaccagatgatctatgatatggcaggtcaaggagaacagaaagaggtgaaatgccatagtttcaatgcagttcagtcctgcagacccactctggaccaggatgggggaagagccttgcaggtgtcttcttaaacctgactcaatttactgtgtattctgtgcaaacttcagagggagaacactgtgcttttcttcccttttatccaggttctcattgtcgttttattayctcctgctcataatatgtagagacaaatgccttgggaagggtagtaacaaggctgtaaatccagtggaggaaaggactgttcactgttttgaacagtgaacaatatgcctactgccattactggcagataaaataca

SEQ ID NO: 729649 - DNA, 639 bp, Homo sapiens
ataaatactgtctacattgaattgaattgtgagtgacaaaattgaaaaaataactttagagtttatgttggaccatttaatgtcgaacctcttcaaagtcttttggagatgtccagatggacaaaatcagccaatatgatgttcatgaccaggcaagggaagccaaaatgaagggcarctttatttaaaatgaatagaacaagatatagttacattcatgccactgttcttttaaaatatatccatagaaatgattagtcctttaaaagtcttcatgccacagttctgcaaagaaatcaggagactttgtaaatatcctgtccgcaaaaagttagaatgacaagcacccttaaataaacaggaataattaatcataggtgtggttgttttgatgagcatgcaagagtgacaagttaataaataagcagttcatacagggaaagtggctaaggaggtgctgtggtttaatttacatctttggaaggtagcaaagatttaataatctccctgcctcatacatcaaacgaatacccctgaggcagaaaagcaaaacgtttttaactgttaatctgagaagcaataaaatcctgcctcaggtcacaaataaattgagtttctagtggtctcgatggatcccta

SEQ ID NO: 729650 - DNA, 611 bp, Homo sapiens
tgagagttctgatttctctacacttattattttcctatttcatatattatcattatagccatttaatgattgtgaagtaggattttattgtggttttgacttgcatttccccaatgactaatgatctttagcatctttttatgtacttttgggccatgtctcttctttggggaaatttctatccaagtattttcccattttwaaaatgagttgtggctgggtgcagtagctcacgcctgtaatcccagcactttgggaggccaaagcgggcagatcacctgaggtcaggagttcgagaccaacctggccaatatggtgaaaccccatctctactaaaaatacaaaaattagccaggcatggtggcaggcacctgtaattccagctactcgggaggctgaggcgggagaattgcttgaacccaggaggtggaggttgcagtgagccaagatcacaccactgcactccagcctgtgcaaaagagcaaaactctgtctcaaaaaaaaaagagagagaaagaaaaaaggaaagagttgtttgtctttttgttttgagttgtagtcttttatatattctagatattaaactctcatcctatatgtgattcacaagt

SEQ ID NO: 729651 - DNA, 600 bp, Homo sapiens
gtgactcctcccactttgttttttttcaagattcttttggctaatcagggtcccttgcagtcccttatgaatctgaagatcagcttttccttcctgcaaaaaaaaaagaccactgaaaatttttttagggatgcattgaacttgtagatcactttggggagtattgtcatattaccaatattaaggctttccaactataaatacaagatgtctttccttttatttatgtttttctttcagcagtgttttgtaattttcagtgtacaagtctttcatctacttggttgaatttattcctaggtattttattattttggatgttattgtaaattaaattatttttataatttcctttttaatttgtttattgatgatatattgaaacacaactaatttttctatgttgctcttatatcctgcaactttgctgaattaatttattagytttagtagtttttatgtgggttctttgggattttctgtatatatgatcatgctatttatgaatagagatagttttacttctttctaatttggttgctttaatttctttttcttgcctaattaccctacataaaacttctagtataatgctaaggg

SEQ ID NO: 729652 - DNA, 619 bp, Homo sapiens
gtacccactgggttcccttctaccttcagttctgatgactttggaacttgtccctcattggactcacagtccgttcagctcaagtattttgtgtgtctgtgtttgagggacgcgggttgggggtgagtggggtaccctggaaagaggcagacagggtccagggagaaggcctggagctgacagactggggattgaatcctgtctctgccaccaactagcactgtcctgggcaaggctctaacctctctgagcctgttgtccatctgctggtaatagctgtctcccttggggtttttaggaaattaaattagagactcctgagaactcttcaactaagcacctgccacagaaaatgtccagtaaaggagagctgctgctattattgttgttatttgttattgttagggaggtcagcaagcaagggccctgaaatctcacctagmatcttctaaagagaactggaaaaggccaatcaaatgggagggaattcttcaaatagaaaccccacctcccagctccagggtgagccaatcagagcatcccatcttccagctacagtgattggctcacagttgggcacatgactcaagctgagccagtgagggacaactctgggact

SEQ ID NO: 729653 - DNA, 636 bp, Homo sapiens
ctggaaggggatccttgaatgaaagaggatagatgggaaggtggcagctgacatggttacctcttatgccatgggggggctgctctctctggaaatttaggcctggggtcagggcactgttgagcattttacaccctaggccagaggaggggtgacctgtggagcagggctaagctagtagcccatgaggtatgatgtgkaggcagcacctggggctcacagagcctgttacccatgttatctcctctgaccttggaaagagctggggtgtatgaacaagtatttataagtttacaaaaatcatatgaggaaactgaggcacggggaaggtaaatgacatgccctaggttacacagcttataagtagcagggattctgcccttctgtcacaccaagtcccactgtcttttcttcctggagtccctgtgactgatctaaaggccacatgtttaacagaataaggaggaggcctctgttgcagcaaaccagctaccccacccgcacacagactctaagggacatcctgctttaagctgtccttagttactaatacctcagtgagaatgagtttgaaattttctcaagagccatgggagactaggaagtctctaagcttcatagagagcctggcttggg

SEQ ID NO: 729654 - DNA, 559 bp, Homo sapiens
atcaataccagcccacttgcagtggatgagctggtggccatttgtagtgaggaaagggatgtgtcaacctccatcttagactccacaattgagggatgtgaccaccattcctccccagccagcccccaaaccacgtttgttgctgcctttccagatcattgccatgaaggatggcaccatccagagggagggtaccctcaaggacttccagaggtctgaatgccagctctttgagcactggaagaccctcatgaaccgacaggaccaagagctggagaaggtgggtatatccagggrtggccaagcagccacccctggatgcaaaggttctgctagaacctgaactcataaaggtcttcctgtccttagtgccccaggaagccccctaaagggcagatgtgggagctgggcatgaactggctcctaccagaggagagacagtacctgtgccaggtgcccagggcagaatcaggtgggcaccttcgccttatcctgaggtagtcagatactatttagttgcaaagtttcagaaaatcaactcaaactggcaaagaaaact

SEQ ID NO: 729655 - DNA, 644 bp, Homo sapiens
catagctttttgacactcaaaaaattcaaagtgctgcacaagctgttctacaaagttcatttcttctgccagagaaacagcccagtctctgtggcacccagtctgaccctggagatggtttatcagggaaatcaacttcctgcatcccaaactggcctccctggcactgatgtgcttgtcgaggtgcagctttggggagcaggaggcaattctgttgccatggaaacctctggccttaccccgagacgaaacctatcatttcagcacatcactggccagggtctaaagagctccttgatggggtaagcggaagacgggrttgaacgctttgagtttggtcttctgttcctttggccagctgtctcaaggttcagattgttcacctgtaaaatggaactagcactgcctgcccagccttagctcagctccaggctgtgcagcagaagtacagggacagatggcgacctggggttgacaatgcccaggacagcagtaattgtgccccacatcaggctgtgtctaagcattgtacataaacgatctcattcagtgctcacaaaagctcaatgggctggtggcattgtcttcccccttcacggggtaagaagctgaggcctagagaggtaaggccattcacccacaca

SEQ ID NO: 729656 - DNA, 605 bp, Homo sapiens
ttcattaggacggtggcacattatccaacagaggtggtacaaggccacaagtaataactgatcacccttgttatactgggttagtcttagaactggagcctcctgaatttccttttttgattggttttattttagcctgaatacctttgtgttttggagactacctgaggttgataaatcagaccccttagataaatattttaggctctgggaatgacttccaaattgaatctgaatgaatcacttcagttccctgtttctcattctcaccaattctaaagatgagtgacctgagatctgcctcttagtttgaaatataaagagggaaatatgaagagctggccttgagacaaagtgtatattaaagcttgctctccaccttgtctttgggcttgcatccattctgactaaattgatcagttacwatttgcttataaattagcaactggtcaattcggctgaaacagctgaattgttgaatcactaagactgtgtctatattgccatttaacatgataacctcaacgaacatgtgaaactaatcgcacaaggagagataagcatttagctactttgttcaaaatggtatatatgactccggatgt

SEQ ID NO: 729657 - DNA, 657 bp, Homo sapiens
tatttccattggcttatgtgcccctttctcctcctggatttttacaaggatgtttgagcacagggaaagtgacttctcactggataagaagatccttgtacccttgtgaagcaaccttatatcttcatttcaaaatcccattttgtcctgtggttttacatgaaaaaagctctgagtcctgttggaggtggtgtaagatgagggggtggctggctttggtgtctgtacttcggtttggagaagggcagttttgaagtgagcctttctgctggtggagaatgtaattagcaccttcatcctaattgcaaccagagtagaaggagccagggcaggctyagaggagagatggaggtaactgatcttcccggggatacctctgatgctttctccagttatctgacacctggcttcactactagttagcagtttgtccttcattttctttttgctctgaattcaagctgctaattggaaaaaagaagctgaactattaagtatgctattaccttgacaaagaattgtatttttttggtatcttcccctaaggaaaatgtcagcctgaaagtgagtagaaagcactttgtaatcctactcttcacatctaagatcatctatgattgaagaaagcctctctcctggaccttagtcaccgcaaag

SEQ ID NO: 729658 - DNA, 644 bp, Homo sapiens
caagaaagatttacacatcaaaatgtagaggtattaatgtcacattataaacatagtttgctgaaccctacagcaatttgtaaagtttgtgtataccaatcttagattttctaaaacataataaagttttttttttacgttgtctttaacatactaaagtccaaaatatatccaggcaggcaggaactatggctgccacttttaaaaaacaaatgttttagcacgatacactattctgtgtatgtacggataaataatcaaactttgaacttttcaaatcataaacagatacattatttgttactttgagcctttaataygtaaaacaaatacaattgactcttcttagtttaaaatatacttactttgaacaattcaactaatgcaagactatcaaaaacttcataagccatacaaatgtcaacttcattttcaaaattataagaactcaaaaaaaaaaaagctaaagcatgacactttagtttaaaaaaaaacaaataactttttatttgcacttgtgttgagaatcacctttattcatttaggaataaacaggaaatggtgcagttgtaactcactgtgtggtgactgtgatggtatttactgtcctagggatggtgggatccagtggaccagaatcgtca

SEQ ID NO: 729659 - DNA, 627 bp, Homo sapiens
aaagtgtttggaaggtctcccctcactggctttctctccttctgccatgtaagacgtgccttgcttccccttcaccttctgccatgattgtaagtgttctgaggcctccacagctgtgtgaaactgtgagtcaattaaacccttttcctttataaattacccagtctcaggtagtatatttatagcagtgtaaaattggtctaatacagataattggtaccagcagagtggggtcctgctataaagttaamctgaaaatgtggaagcgaatttggaactaggtaacaggcagaggttggaagtttggagggctcacaagaagacaggaagatgtgagaaagtttggaaattcctagagaggttttcaatgttttttgaccaaaatgcttatagtgatattgatgatgaaatcctggctgaggtggtctcagatggagatgaggaacttgttgagaactgaagcaaaggtcattcttgctatgttttagctaagagactggcagcattttgccccttccctagagatctgtggaagtttgaacttgagagagataatctaaaattggaacttatgtttaaaaggaaagtagaacataaaatcttggaaaatttgcagcctgaccatgc

SEQ ID NO: 729660 - DNA, 627 bp, Homo sapiens
aaagtgtttggaaggtctcccctcactggctttctctccttctgccatgtaagacgtgccttgcttccccttcaccttctgccatgattgtaagtgttctgaggcctccacagctgtgtgaaactgtgagtcaattaaacccttttcctttataaattacccagtctcaggtagtatatttatagcagtgtaaaattggtctaatacagataattggtaccagcagagtggggtcctgctataaagttaaactgaaaatgtggaagcraatttggaactaggtaacaggcagaggttggaagtttggagggctcacaagaagacaggaagatgtgagaaagtttggaaattcctagagaggttttcaatgttttttgaccaaaatgcttatagtgatattgatgatgaaatcctggctgaggtggtctcagatggagatgaggaacttgttgagaactgaagcaaaggtcattcttgctatgttttagctaagagactggcagcattttgccccttccctagagatctgtggaagtttgaacttgagagagataatctaaaattggaacttatgtttaaaaggaaagtagaacataaaatcttggaaaatttgcagcctgaccatgc

SEQ ID NO: 729661 - DNA, 665 bp, Homo sapiens
ttgagggtttttaacatgaaaaatgttaaattttattgaaagctttttgtgcatctattgagataatcttgtgctttctgtctttaattctgtttatgtgatgaatcacatttattgatttctgtatgttgagcaaaccttaaatccccaaaataaaccatagttgatcatagtgggttagctttttgatatgctgctggatttggtttgccagtagtttgttgaagatttcttttcttttcttttttctttttttttttttttttttttttttttttgrgatggagtctcactgtgtcatccaggctggagtgtagtggtgcaatcttggctcactgcaacctctgcctcccaggttcaagtgattctcctgcctcagcctcttgagtagctgggattacaggtgtgtgctaccatgcccagctaattttttgtgtgtttttagaagagacagggtttcatcatgttggctaggctggtcttgaactcctgacctcaggaaattggcccaccttggcctcccaaagttctgggattacaggcatgagccaccaggcccagccttttgttgaagatttttgcatcaattttcaaggatattggcctgaagttgcctttttttgttttatctctgttaggttttggtatcagaatgatgctgttct

SEQ ID NO: 729662 - DNA, 625 bp, Homo sapiens
caaggatattggcctgaagttgcctttttttgttttatctctgttaggttttggtatcagaatgatgctgttcttacataatgagttggagaggagtttcttctttttaatcttttgaaattgttctagtaaaaataatatcagcttctatttgtacatctggtagaattcagctgtgagtatgtctggtcctgagcttcatttagttggtaggctatttattactaattcaatattttgagcttatctatgtatttagggctttgattttttgtttgtttgtttgtttgttttgagatggagtttcgctcttgttgcctaggctggagtgcaatggctygatctcggctcaccgcaacctccgcctcccaggttcaagcaattctcctgcctcagcctcccgagtagctgagattacaggcatgcaccactatgcctgggtaattttgtatttttagtagtgacggggtttccccaggttgaggctggtctcgaactcctgacctcaggtgatccacccacctcagcctcccaaagtgctgggattacaggtgtgagccaccgcactcagcccagggctttgatttttgtgtgtgtgtgttcagtcttgggaggatgtgtttgt

SEQ ID NO: 729663 - DNA, 535 bp, Homo sapiens
aattcaattttttgtctgtgcatgtctttcctagaaaataatgtatttttatatgattaggtgttgttttcttacattatgttattttcagtggtaaaaactgctttcggcatctttcttatggaagacatatgcagtgctaatatacttcttaagaatttagttattttgaaagttgttttttttcccccattaggcaggacagagttgctgatggtattattctcacttgatagcytttttttttttttttttttttttttttggactttgactatatcacacagttttcttctggactgcaaatcttttgttgacatttcactggtcatttttgttcttatcctcatttttctgattttctatacacttttgtgttcctatttcactcattgagtgttattcagtttttaaaattagtatatccattgctaatgggttctttctgaaaattgtataatatttttgatggaattatattgccctatattgtatagattttaatctttgagatttggacatttaaaaaggctac

SEQ ID NO: 729664 - DNA, 535 bp, Homo sapiens
aattcaattttttgtctgtgcatgtctttcctagaaaataatgtatttttatatgattaggtgttgttttcttacattatgttattttcagtggtaaaaactgctttcggcatctttcttatggaagacatatgcagtgctaatatacttcttaagaatttagttattttgaaagttgttttttttcccccattaggcaggacagagttgctgatggtattattctcacttgatagcttttttttttttttttttttttttttttggactttgactatatcacacagttttcttctggactgcaaatcttttgttgacatttcactggkcatttttgttcttatcctcatttttctgattttctatacacttttgtgttcctatttcactcattgagtgttattcagtttttaaaattagtatatccattgctaatgggttctttctgaaaattgtataatatttttgatggaattatattgccctatattgtatagattttaatctttgagatttggacatttaaaaaggctac

SEQ ID NO: 729665 - DNA, 535 bp, Homo sapiens
aattcaattttttgtctgtgcatgtctttcctagaaaataatgtatttttatatgattaggtgttgttttcttacattatgttattttcagtggtaaaaactgctttcggcatctttcttatggaagacatatgcagtgctaatatacttcttaagaatttagttattttgaaagttgttttttttcccccattaggcaggacagagttgctgatggtattattctcacttgatagcttttttttttttttttttttttttttttggactttgactatatcacacagttttcttctggactgcaaatcttttgttgacatttcactggtcatttttgktcttatcctcatttttctgattttctatacacttttgtgttcctatttcactcattgagtgttattcagtttttaaaattagtatatccattgctaatgggttctttctgaaaattgtataatatttttgatggaattatattgccctatattgtatagattttaatctttgagatttggacatttaaaaaggctac

SEQ ID NO: 729666 - DNA, 325 bp, Homo sapiens
tgtggaagaaaactgtactacctttttctataaaaaaaaaacaactcaatatagattaaagacttgatctgtgagtctccaagctacaaaaatcttagaataacacttagataatactggcctctgtaaagaatttatgactaacatctaacatgagtgcaacaaaaataaaaataaaaaatggcatytaagccaaagagcttctgcacagtaaaagaaactatcagcaaagtaaacagatgacctacagtatgaaataaaatatttgcaaactgcagacaatgaaggattaatgtacagaatctataatacatttaataaaaaa

SEQ ID NO: 729667 - DNA, 586 bp, Homo sapiens
actgacatcaggatccggtcaattctttgtgatgggggctgtcctgcacctggcaggatgtttagcagcttctctggcctccacccactggatgccaggggaatgcagaagaggcttgttcattctcccatttaatcctcaggacaatatctgacataaatgttatgtcttttattttataaatgaagaaaatgagactcagaaaggtttaagtgagttacttaagaacacacagacagcaagaggtagaactggaaaccgaacacaggtgtccacatgggacaacaaaaaagttcacgttccatcttcttttgagtctctcatttcaataattaccattgtgtggatatgagctgaagtacaggaaacctggggctgaactctcctcccatcaggcctaggagccccagaccagaaccccagcccaaggtctcccagtcaggcccgctggcgtgagctggcatctacactagcatggtytcccaaagctgcagggatgccagtctcgccgctgatgaaggaaatgaagggcatttgcttctcctgcaggctctcgggatttaacacagattccttttcttgctgt

SEQ ID NO: 729668 - DNA, 612 bp, Homo sapiens
cctcagctaaaggacttgcttctcttcagcacacggggcttgtttgtgttggggtctgagccctgagcccatggtcaaggagacccccaggtctttctgaacagagacagctggcctgagggcctccctctcactgcgtgcaagaggctgttagggtgcaagactcaaggcgctgagggaggctgtttcaggagggagccccaggagggtggtggagacagaagggggcagcatctgccgaggccctactgtgtgcctggcaccgtgtggggtttctggcccatatgggctaagtgaccctgcacactcctcttaggagaaaggctcagatggagaaattgcagttcaggaaggtgaagcaagctgctagcctgtggccatgttgggatctgggcctcagccttccagccacraaggcagccaagtgtcataaagaaggcatcacagaggcaattccaggctgtagtggtgaactttccactctgcatccccgggtgctgtgccctgtgccctgtgccctgtctaaggtagccctgcgggtttctatatgtttaagttatccccagcatcaatgatgctctcctgtggatcccaagccatggagatgtcctg

SEQ ID NO: 729669 - DNA, 334 bp, Homo sapiens
gtgcctggcaccgtgtggggtttctggcccatatgggctaagtgaccctgcacactcctcttaggagaaaggctcagatggagaaattgcagttcaggaaggtgaagcaagctgctagcctgtggccatgttgggatctgggcctcagccttccagccacaaaggcagccaagtgtcatraagaaggcatcacagaggcaattccaggctgtagtggtgaactttccactctgcatccccgggtgctgtgccctgtgccctgtgccctgtctaaggtagccctgcgggtttctatatgtttaagttatccccagcatcaatgatgctctcctgt

SEQ ID NO: 729670 - DNA, 606 bp, Homo sapiens
acttcagtctcctactggtcggtgccggatccttttgtggccaccccaggtgtccagatatacacaggagactgtggctggggacccagatgaaagtcgagagtgtggtgagcacttccctgtccggatcatgtgagggatgggctcrgtgtcacagtgtcctgcccagcccacctggccggacctccctctgggccagaacagcggatcatgaggacagtgtgaggaagctgccctcgggccagtcggggtctgaccccagggctccccaggccccgctgggcacacgtagacttactctgctgaaccttaaaggcgattcttgttatcggcatcaacgcctgttcgccttctaccagatacacgtcccacaggcgcagggtgagcccgagagagatctgtggggacagcaggtgtgaaagaacctggtccttccaggctggggctggtggctcgagctgcgcacactggggcttcagtctccagagtcagtgaccttccccatgagggtcgcctgagccctccaggacgctgggtcagacaaggtcttgaagctcctcatggggggcactcatttgagtggggatgtggctcctggagagaggg

SEQ ID NO: 729671 - DNA, 557 bp, Homo sapiens
acttcagtctcctactggtcggtgccggatccttttgtggccaccccaggtgtccagatatacacaggagactgtggctggggacccagatgaaagtcgagagtgtggtgagcacttccctgtccggatcatgtgagggatgggctcggtgtcacagtgtcctgcccagcccacctggccrgacctccctctgggccagaacagcggatcatgaggacagtgtgaggaagctgccctcgggccagtcggggtctgaccccagggctccccaggccccgctgggcacacgtagacttactctgctgaaccttaaaggcgattcttgttatcggcatcaacgcctgttcgccttctaccagatacacgtcccacaggcgcagggtgagcccgagagagatctgtggggacagcaggtgtgaaagaacctggtccttccaggctggggctggtggctcgagctgcgcacactggggcttcagtctccagagtcagtgaccttccccatgagggtcgcctgagccctccaggacgctgggtcagacaaggtcttgaagctc

SEQ ID NO: 729672 - DNA, 557 bp, Homo sapiens
acttcagtctcctactggtcggtgccggatccttttgtggccaccccaggtgtccagatatacacaggagactgtggctggggacccagatgaaagtcgagagtgtggtgagcacttccctgtccggatcatgtgagggatgggctcggtgtcacagtgtcctgcccagcccacctggccggacctccctctgggccagaacagmggatcatgaggacagtgtgaggaagctgccctcgggccagtcggggtctgaccccagggctccccaggccccgctgggcacacgtagacttactctgctgaaccttaaaggcgattcttgttatcggcatcaacgcctgttcgccttctaccagatacacgtcccacaggcgcagggtgagcccgagagagatctgtggggacagcaggtgtgaaagaacctggtccttccaggctggggctggtggctcgagctgcgcacactggggcttcagtctccagagtcagtgaccttccccatgagggtcgcctgagccctccaggacgctgggtcagacaaggtcttgaagctc

SEQ ID NO: 729673 - DNA, 508 bp, Homo sapiens
tgtcttctgatgaactgtgatgtctcacctatcgccttcctgggctcaaggatccacgaaaagccgacgactcttttggggaggctctgcagtgccttcatctcactaggctccccaggaagcttgcgaacttggcttgagccctaagcagccgagtatgtgccgggcctctgcttctctctttcagtaagagggagaaccaagaaagaggctgaagcatggtctgcagagaaggcacttgtgcaaacaccaggagaatgaggggcctgagttgtcttcatttctcctaaaaacacgcatttcctcccaggccaccctagtgagggcatgaagcacagcgtgtgtgtgtgtgtgtgtgtgttygcaggaatatgcatgtgtgtgtgcatgtgtgtgtgtgcaggtatatacatgtgaatgtatttatgtatgtgcatctgtgtgcatgtgtgtgcgtgtgtgtgcaagtatatgcatgtgtatgtatgtgcatgtgtgcgcgtgtgtg

SEQ ID NO: 729674 - DNA, 593 bp, Homo sapiens
aaagtaaatagaggttaagcaattttccgaaggccgtaaagctgatgactagcagagcagggattcaaatccaggtagtctgactctaggtaccacacgctacacatcctgtaccacaacttattatatttgatcctcacaacactcctataatggtagattttttagagtgtcttctcagattgtaaaccaactccagaccatgtcttgttggttgatttaaaccaaatcctagcacatgatgattwtaacatgatgagcctcgtgacctagtctctatctcttattattgtgttctttataataaagatgatttattgaatatataattctatctcagtgtttatatatttgtaagactttctctatcaatccccaaaccaggaactatccctttgccatgtgttttgcttggattgaaatatagttacatgcacagcatgtgcttaatttatatacattgaatgaataatataagggagatgtaggacggggttgagttgggagggtcttagacatttcctaggtggtaaattgatgttcccagttgaaatgacgtacccatggtcatgtggatggaattggtcagtttt

SEQ ID NO: 729675 - DNA, 563 bp, Homo sapiens
tggaaatcttttaatgggaacactgttttgtttttcacaaagaaatagagcttttatgaagtcggtagagcgtctgctcattcccgcatgcaggaacagcatctgggagctttacccaaaccccagccttggagattccacatcagtgggcctgaggtgggcttgaagcatttgtaaggtgtggacttcctttgagcttcagtttcttcatttgtgacatggggattccaatggaaatgaccccacaggctagcagggcttcagggagatgacaggtataaaatgcaagccgggggcstaacctacaagtgcatacttaacaaaagtcaactgttgtcattatcattccctccttagcaatactgcagctaagtgattgaaatgcatgcctcagcaaaactatcacaggccatgaataccctatgctgcatattggaaactgcaaatgctggagaagcaaacgccaggtgctattgtcttacacagtttctgctaattaatttctttatctaattgttgtgagagttatttgctcgatattcgcaattggggtaggtcttaag

SEQ ID NO: 729676 - DNA, 507 bp, Homo sapiens
ccccatacattcatatgaaaaaaggagaataaggccaacccagctcattttctccagcctaggtgacaagggcaaaactctgtctcaaaaaaaaaaaaaaaaaaaaaaaaaaaacaagaagaagaagaaatctttgcctatcccaagatcatgaaactatttctacaatatcttctaaaagctttattgtttcttctttcacattaagtccatgatccatttggaagagatttctgtgtgtggtgtggggtaggagtcaaggttcctttttgtttacatgaataagccaatcaagccagctacctttactgaaaaagcattctttccctctttgaactacagcggctcctttgtcataarttatgagatggtgtgtttttgttacactgatctatttggtatcttgcactgctgttccatttactgccacattataataaatcctgataaatggtagcttaagtccctcaactttgtttaagactgtcttgattattcttgcctttt

SEQ ID NO: 729677 - DNA, 639 bp, Homo sapiens
cgttggaaaagcgcagtattcgggtgggagtaacccgattttccaggtgccgtccgtcacccctttctttgactcagaaagggaactccctgacccgtggcgcttcccaagtgaggcaatgcctcgccctgcttctgctcgcgcacggtgcactcacccactgacctgcgcccactgtctggcactccctagtgagatgaaccsggtacctcagatggaaatgcagaaatcacccgtcttctgcgtcgctcacgctgggagctgtagaccggagctgttcctatttggccatcttggctcctctgaggctttcttttacttcttagcttaagctgtatgctagagagaaacaatttttctttctttcttcctttttttttgagattgagtcttgctctgtcgcccaggctggagtccagtggcacggtctctgctcactgcaacctccgcctcctgggttcatgacattctcctgcctcagcctcctgagtagctgggagtacaggcacctgccaccacgcccagctaatttttttttatatttttagtagagatgaggtttcaccatgttagccaggatggtctcgatcttctgaccttgtgatccacctgccttggcctcccaaagtgctgggatta

SEQ ID NO: 729678 - DNA, 639 bp, Homo sapiens
cgttggaaaagcgcagtattcgggtgggagtaacccgattttccaggtgccgtccgtcacccctttctttgactcagaaagggaactccctgacccgtggcgcttcccaagtgaggcaatgcctcgccctgcttctgctcgcgcacggtgcactcacccactgacctgcgcccactgtctggcactccctagtgagatgaacccggtacctcagatggaaatgcagaaatcacccgtcttctgcgtcgctcacgctgggagctgtagaccggagctgttcctatttggccatcttggctcctctgaggctttcttttacttcttagcttaagctgtatrctagagagaaacaatttttctttctttcttcctttttttttgagattgagtcttgctctgtcgcccaggctggagtccagtggcacggtctctgctcactgcaacctccgcctcctgggttcatgacattctcctgcctcagcctcctgagtagctgggagtacaggcacctgccaccacgcccagctaatttttttttatatttttagtagagatgaggtttcaccatgttagccaggatggtctcgatcttctgaccttgtgatccacctgccttggcctcccaaagtgctgggatta

SEQ ID NO: 729679 - DNA, 639 bp, Homo sapiens
cgttggaaaagcgcagtattcgggtgggagtaacccgattttccaggtgccgtccgtcacccctttctttgactcagaaagggaactccctgacccgtggcgcttcccaagtgaggcaatgcctcgccctgcttctgctcgcgcacggtgcactcacccactgacctgcgcccactgtctggcactccctagtgagatgaacccggtacctcagatggaaatgcagaaatcacccgtcttctgcgtcgctcacgctgggagctgtagaccggagctgttcctatttggccatcttggctcctctgaggctttcttttacttcttagcttaagctgtatgctagagagaaacaatttttctttctttcttcctttttttttgagattgagtcttgctctgtcgcccaggctggagtccagtggcacggtctctgctcaytgcaacctccgcctcctgggttcatgacattctcctgcctcagcctcctgagtagctgggagtacaggcacctgccaccacgcccagctaatttttttttatatttttagtagagatgaggtttcaccatgttagccaggatggtctcgatcttctgaccttgtgatccacctgccttggcctcccaaagtgctgggatta

SEQ ID NO: 729680 - DNA, 597 bp, Homo sapiens
agacattgttgaggtcatcaatgattatttggcatgctttaatatttaattttaacttgaaacatttctttatactttcatggttacactcatcttgttttctttgctcctcattgtactctctttctcaatatttctacccaatgactgtatcttatacatagctgttaatttagaaagacctgttcctctgttctgctgacaatcttttctttagatkatctcatccagttctaagtcttaaaacaacctgtgtaaactgaagactcacagattcacatcactagctatttcctcttttactgagtctaagctacatatatccacatatctatttgctacttcagcttgcatgtctagtacctcaaaccctgcaatgctagagtagaactgttccctcccttacacacatgcacacacacacttcaattccatccaaggtttatctcagttgagttgcttatcatccattagcttctcagctctaaattcagtgaaacttggagtttcctaaatctctctctctcattcctcaaatccaatctgtaactgaaccctgatgtttataactctgagatatattccaattgaaccact

SEQ ID NO: 729681 - DNA, 637 bp, Homo sapiens
ttcaccatggtggccaggctagtctcgaactcctgacctcaggtgactcaaccgccaaggcttcccaaagtgctgggattacaggtgtgagccaccatgcctggcctgttggaggattacttaaagccaggagttgacaagaatgagcaacaaagtgagacccccatatctactaaaaaaataaaaaaaattagctgggcatagtggtgcctgtcatcccagttacttagggggctgaggcaggaggatcacttaagcccaggagtttgagtctgcagtgagccatgattgtgtcactgaactccagcctaggcaacagagtgagaccctgtacatacatacatacatacatacgaattaaaagaaacaacaaaattctagttcragagtgatctattagagttttcccttgctcccgttttcccccagtagagataatcaaccatgcattttttcctactatgactgtactttattatttacttctatttttctcccaagactatattgttattttgaattatatgtgtgttgctagtagactccctgagcagcgggaccatgtcttcatctctggatcatgagtgcctaaaatacagtaggtgctatatcatttttatttgatttgcatgattgt

SEQ ID NO: 729682 - DNA, 570 bp, Homo sapiens
tgaagacatcaagccatatgttctactctgttggattttcaagaggcctcatgaccaccgcgttaaagcactgaacaccatcaactgtggtggagaaaaaagtgctggtccccctgaccaataaagaaaataccacacagaagtatgatattttgccaccatgatactgatagggaggaggaagaccttagaggtatattgtttttaaggggagggggctctgggtttgaatcctagtttcactccttattagctgtgtgaccttgggccagctatttaactaacctctctgagcctgagttttctaacctgtaaaatggaaataatgacagtacctacttcatcacatggtcattaaraataaaataatgaatgtaaaacttatttaggacttgcaataaatattagtgttcctgctatactcactgtattaggttcccgtggctgtattagattatcatagactaggtgccttaaagcaacagaaacttagtctctcacagttctgaaggccagaagttcaaaatcaagatggtgtcaagattggctctttctggaggtcctgaggga

SEQ ID NO: 729683 - DNA, 570 bp, Homo sapiens
tgaagacatcaagccatatgttctactctgttggattttcaagaggcctcatgaccaccgcgttaaagcactgaacaccatcaactgtggtggagaaaaaagtgctggtccccctgaccaataaagaaaataccacacagaagtatgatattttgccaccatgatactgatagggaggaggaagaccttagaggtatattgtttttaaggggagggggctctgggtttgaatcctagtttcactccttattagctgtgtgaccttgggccagctatttaactaacctctctgagcctgagttttctaacctgtaaaatggaaataatgacagtacctacttcatcacatggtcattaagaataaaataatgaatgtaaaacttatttaggacttgcaataaatattagtgttcctgctatactcactgtattargttcccgtggctgtattagattatcatagactaggtgccttaaagcaacagaaacttagtctctcacagttctgaaggccagaagttcaaaatcaagatggtgtcaagattggctctttctggaggtcctgaggga

SEQ ID NO: 729684 - DNA, 506 bp, Homo sapiens
ctccccccacctttcttttaacctttgcctgagaagaatttaaatggcatatttagtggctgtatattgtgcttcctgtacccactgctgcataaaagggattgatttaaatcgcttacagtaaccatgtgggggaggagggtctagttttstgcaccaaatgctccaggatgcataataagcaaccacaaatacagacaacaaatgagtgtgcttgcatttgtctcttctctggtaaagaattattctttagtacggatggactgcacacttttagcatcaacaagagagcagctcagatgtgcgagcaccaataaaggatacttaagcctccgtcccccaggtaatgagtctcagaaatgttggctaaaaaagtcagagaatgttcctatttataatttttttgaatcatgaaatttataacacctcccaaagcaggaacggaccaagtttaaagattacagctgagtgccagtaaagcgttaaaggcaaccattgttaataac

SEQ ID NO: 729685 - DNA, 626 bp, Homo sapiens
gaacattcctattcaacatggagaaagtaattggactctcttccacatctggcgaactgctaattcgttttaattttgtttacaagctttcttcttgcataaaaaaaatgcttcctctgtttacaagtcatttttaaaaatccttttcaatcaaactgatcatgtatcttggtaaaagcccttccgcatgggctcggggatttcagagtgctgggtcctggccccatgagtaagggatcacccgctcatctttcagcccatccaagcatcttggaggtttagaatctgtcaggcctggcattccttcgctcttcttatcactctctaccccttcaaaaaggcaattgattagtttcagcttttccaaaccgagatccgatatgtttttcaggatcaaacgtctttgagaagtccagagagcaatgtgggaagtggggaatgtgaagaaggaaaacaggarggggatggtgaaattcatctctcaccctaactctccaaaggaacctaggggatgcgcattttgggcaggagatggaattgtgacttctggaagatgcacttaacaacttgagatgtgtcttccctttctgaaagcaaatgtttaaagaagaaaatagatatctaga

SEQ ID NO: 729686 - DNA, 639 bp, Homo sapiens
tgtcatataaaaaacaaacataaaagatagaaagaagataggcaagctactaacatcaggacccaagaagtggccagagtagtgtcagcaaagacctatgggggtcccctactcctgacccctaatgtcagtggaggccaagtgaaaaacctggactttcactgtaatttggcagtaatgatgtggcaccttcctgcactcaatggagtggggtcagaagaagcttgttgaaatggaagattagataagatccaaaattctgtaacataatacacaaaatatccaggtatcaatgaaaaactcacttgtcatgaaaagaatccgggacagctcaaactgatgagaaaagacaatcaggagatgtcaacaacaagatgatagttgttggaattatctgaccagaattttatagctgccatcataaaaatacttctatgagcaattacaaatacacttggaacaaatgcaatttargaagtctcaaagaagaaatagaagatatgaaaaggaaccaaagagatgtcttagaactaaagattataataactgaaatttaaaaactcaatggatgggactctgaatttatctccaatatgcaaagagattggatgtcgttattttcatccttaaaacaagaaa

SEQ ID NO: 729687 - DNA, 599 bp, Homo sapiens
ctgtgcaactttgccagttctgatttccccctcatactttctctcagattatcttagccattgcccaacacgatgtgacgagccccaggcacctctcttttttaagataagggggaatcttcagaggaaaagtgactgcaacagggccagggcacaagggtctctggagcccactgctgtctcccttggctgcaaagctgaaggcctgagacccttgacaaatgagaatcagattgtgtccaaaatacatctcagcctcttggggctgtctgtagccatataaggagctggtcaagagctatttatcagaaaagttcttgagggcaaagagaacctacagggcacttcaattagctgagcagtccccagctctgatrtgcctgcagctgtcaccaggaaggggtatcaactattcaaatggcactgttattgcgctttcatatgcaagggctacaaagtgccccccttcccttcatcaactcctttgaacatctttgcccatatttgcctaggatcttggaacttcagaaaatactagcatttaaaaattgccaaggtattggcaagtaggtgttttaatcacaatgtcaaatgagact

SEQ ID NO: 729688 - DNA, 577 bp, Homo sapiens
agacataatagaccaatggaacagaatatagagcccataaataagcccaataataaatatatggtcaactaatcttccacaggattgccaagaatacacaatggggaaaaggtagtctcttcaacaaatggtgttgggaaaactggttatccacaggcaaaagcatgaaatttgacccctttcttatattacrtataaaaattaacttaaaatggattaaagacttaaacataagacctgaaattataaaactcctagaacaaaacatagggggaaactttatgacattagtcttggcaatgattccttgggtattatgacagaagcacaagcaacacaagcaaaaatagatgagaagaactatatcaaactaaaaagcttctatctctgcaatggaaactagaatgaaagtcaccctgcagaatgggagacaatatttgcaaaccatacatctaataagaggttaatatctaaaatatataaggaatccctacaacttaatagcaaaaaaccaaataacctgattaagacatgggtaaatgacttggataaaaacctctccaaaaaagatgtgcaa

SEQ ID NO: 729689 - DNA, 577 bp, Homo sapiens
agacataatagaccaatggaacagaatatagagcccataaataagcccaataataaatatatggtcaactaatcttccacaggattgccaagaatacacaatggggaaaaggtagtctcttcaacaaatggtgttgggaaaactggttatccacaggcaaaagcatgaaatttgacccctttcttatattacatataaaaattaacttaaaatggattaaagacttaaacataagacctgaaattataaaactcctagaacaaaacatagggggaaactttatgacattagtcttggcaatgattccttgggtattaygacagaagcacaagcaacacaagcaaaaatagatgagaagaactatatcaaactaaaaagcttctatctctgcaatggaaactagaatgaaagtcaccctgcagaatgggagacaatatttgcaaaccatacatctaataagaggttaatatctaaaatatataaggaatccctacaacttaatagcaaaaaaccaaataacctgattaagacatgggtaaatgacttggataaaaacctctccaaaaaagatgtgcaa

SEQ ID NO: 729690 - DNA, 577 bp, Homo sapiens
agacataatagaccaatggaacagaatatagagcccataaataagcccaataataaatatatggtcaactaatcttccacaggattgccaagaatacacaatggggaaaaggtagtctcttcaacaaatggtgttgggaaaactggttatccacaggcaaaagcatgaaatttgacccctttcttatattacatataaaaattaacttaaaatggattaaagacttaaacataagacctgaaattataaaactcctagaacaaaacatagggggaaactttatgacattagtcttggcaatgattccttgggtattatgacagaagcacaagcaacacaagcaaaaatagaygagaagaactatatcaaactaaaaagcttctatctctgcaatggaaactagaatgaaagtcaccctgcagaatgggagacaatatttgcaaaccatacatctaataagaggttaatatctaaaatatataaggaatccctacaacttaatagcaaaaaaccaaataacctgattaagacatgggtaaatgacttggataaaaacctctccaaaaaagatgtgcaa

SEQ ID NO: 729691 - DNA, 563 bp, Homo sapiens
acctgttcactgcattaaaaatttcttccccgtgctaggcatacaatgaataaaatatgcagtctttcagaaaactgtatgtaatgatatgtcatagcagttcacacaattgtactaaacaatatgcatgctttctgtttttctatcaattaaatattcaggaattactgtcaaatgccatgtcatagcatgacagagatttascccagattttgaaatctggtttgaaccactagaattagcaaactaagcagcaacataaaatattaagcatgtcaaccaaataatccactttccctctgtctttggagatgccttattaaatttcctaagagaaaaataaaagtacttcatgtaaaaagttttaacccctgctttgaaaacacatattttagcccatcatataaggttttttaatatgattggttctaataatcatatttttaaaatcccaaccagaagaagcactttaaaagtattttttcagtttaatatgcacaggtctgccagcataatatttgtccataattaagaaaattgcttacttgctcagtaggcaatac

SEQ ID NO: 729692 - DNA, 544 bp, Homo sapiens
cattgacgataaaacttgcttgaacttcagtcatcacatccacattccagaaagtagaaagagggatattccccctcccttgtatgaaacttttcagaaccttaaaaagaaacttttgtttgcattctattgaccagaacttaatcacatgatgatatggttgggaaaagtagcctctgttctgagtgatcaggtgtccagtttaaatgggatatttatttctaaggaagaaggggagaatgttcattggttctctstgccatatggcttatttcacacagattgatacttgttaataattaactttgaaaatattctaaaattatttacatgtgtgtgttttcaactaaaatttgtaaggagatattgaattattgagtaccagttacatgcagaaaactctgttaagcgtgttgagattatttataaagataatctgggttgttaaatcaaggagcatacatatatttagaaatactataaaatataaaacatagtgaaaggatcccaatacagtgtttagttaatagaagaagcttaaatt

SEQ ID NO: 729693 - DNA, 604 bp, Homo sapiens
gcaatacttctgagacgtagatctccttattaatctagctcagtgttttgttacctgcagcacagaaacactttccctgaaaaacagatacaacttttaaagcataatttttattctttaggtattctggtaagtgatctaaactatatgtctatttaaaaaataaacctacattagacctaggattaatttatgaattgggattacttattttaaaaatatagggagaacatttaaagtcaggtttattgaggtataatttatattcagcaatcctcctttaaatatacagtttgattttggcaaatgcatatttctttatggattagtctttatgctyatttaccaagtaaataattatgaagaaactatcataactgcagttttaatttaaggaaagttctctccaaatggggtaaactcttttaaaataggtggcaccagtttaatttctaaaggagctgtgaagacatctgtagacatagagataagagttctatttagatcagtatttttttttttagagacggagtctcgctctgttgcccaggctggagtgcagtggtacgaacttggctcattgctacctccacctcccgggttc

SEQ ID NO: 729694 - DNA, 578 bp, Homo sapiens
ttcaattgttttacctttcttttttaactcttatttcataaattgacatttaagcttatgttccaaattgagcatgtgtgctgtgcagtaaaaacacataaaaatatttatatctacatgtgttcattgcatagagcaaggtaagagtaggtgtgatggagaaccaaaaaagcagtaaaattttccaaaagatggaaatgaaagggaaagaaacaaactactgagaatgttggtgtattctttttttcttcgtgataaagacataccttgttgtcattcttgtattatataaaacatataaaataatatgcagttttaatgccaaagcagraagggtcaaattgatttaaaaaatctcaaattaccttcagttgaaaatccaatttggcataacaattgagcaaactgctatctttaaatttaaaaagaaaacaaagaatatatcatttaattatgaaaaataaatcctaacgtcagtctttacaagcctccataacactgagaggatgttaatattgctcaaggcattgagtaggacttctgggctaactgccaattcctattagaactattttctc

SEQ ID NO: 729695 - DNA, 728 bp, Homo sapiens
aagtacttatcatgatgtctgctgaagacagtagtgggagttttatttgtttaccactgtattttcttcttctgttctactaccaagtgttgagagaatccctgtggaaacttacataatattttttcctctagacagacagacatgcacacctacccacacacacactcacacatacatttttattggtaactcagaaccatttttaatttaagagtgaacatttgagcttagmaaactataaaaaggaaaaccttatctgaactaaatcttaaaagcagtaaatttgtaaagaccaagtacaaatctatgaatggagtagtaataccatttcaaactcccattttaaagaatttctaggctgggcacgatggctcacgtttgtaaacccagcactctgggaggccgaggttggtggatcacctgaggtcaggagttcaagaccagcctggctaacatgatgaaaccctgtctctactaaaagtacaaaaaaattagccaagtgtggtggtacaggcctgtagtcccagctactcaggaggctgagacaggagaatcacttaaacctggaaggcagaggctgcagtgagccaagatcgtgccactgcactccagcctgggcaagacagaggcagactctgtctcaaaaaaaaaaaaaaaagaatttataaaacaggaggccaataaagattcaccttttaataaatttagctgatataaaatacccc

SEQ ID NO: 729696 - DNA, 597 bp, Homo sapiens
tgaaatactagccagcaattagaaaggaataaatttttgagatatgcataagaacaaactattggtaatagatgtatctaaaatatgttgaattaaaatagccagatacaaaaagtacagactttaatgttttcttaatgtaaagttctagagcaggtaacatttatcaattgtgacagaaatgagatcagtgagtgcctggagtggaagctgagagaaaggctgactcaaaggagcatgatgggactgtttggggtaatggaaatgtcctataatatcttgactgattggtgtggtggttacacagtgtatgtgaatgtcaaaagtcatcttctgtaacttaaaatgtgtgcatttgacagtaatttttcctcagtaaaattgatttttttaaaaaaatgaaaaaaaaaaaaaaaaaraaatgggttatacacacctgaacgtcagagtaaaatgtaaaactataaaacttctaaaagaaaatcttcattaccttggagtaggcaaagattttttagataggactcaaaaagcattctcatatgagaaaaaaaactgaacttcattaacgttaagaacttgggctcttagaaagtc

SEQ ID NO: 729697 - DNA, 612 bp, Homo sapiens
aggccctgctgctgacctactgaatcagaatgtgcattttaacaagatggccaggtgattcctattcctatacaagaggacatacatattcaacaggttattcaaatatagtgtgaaaatgctcaggaagggcacgtgtagggcattctaagaggagccatcacgttaygcctgtgccagaggaggcgtggctctgggtgctctggggaggcttcgaagcaagagactggtttttttttgtttgtttgtttgatttgttttttgttttttgttttgagatggagtcttgccctgttgcccagactggagtgcagcagtgccatcttggctcactgcaaccttcacctcctaggttctaagtgatcctcttgcctcagcctcccaagtagctaacaggcccgtgccaccacacccggctaattttttgtatttttagtggagatggggtttcaccatgttggccaggctggtcttgaactcctgacctcaggtgatctgcctcccaaagtgctgggattacaggcatgagccaccatgtccggcctaagaggctgttttagttgatactggaaggacaaagaagcatgaaccaggtggagactggtggttgtg

SEQ ID NO: 729698 - DNA, 558 bp, Homo sapiens
ccctccttaccttcttaccccaggccttaggagcgcccagaatggaaagatttcatggggattagcgttgtattcactcaggacccctgagaatatttcagattattctggaaaccaagggtgtcatccccaccttccattattcagtgaagtcctggggaggatacttttctaaacagtattcctttccccatcaaaaacaactgaaggatatgtgtggtccccatgtttaaccaacggagctgaaattcaagtactcttgatttgggaaaacctgcattcaaaccctgcttgatcatacagtaactgtgaacttcgagcttctgtgtctgagtaggaaaaaacacaatgatttttcctcttccctcacaccacaacgatccacacagaagacttctcgaccaaacgtggrgatttctccccaccaacaagcagtcagttctgcagcagacaccagctgaggggcctccaaatcagttctggcgcgacacacctggagaccacagaagaccccccccccccccccgccgccactgagaccaagggctcagtcccaca

SEQ ID NO: 729699 - DNA, 633 bp, Homo sapiens
actcttctttatccacatagtttttttttccttcacatctttttcgtcatgagtagtttagtttagttttggtttgctttgtaaggttagagataaatttgtaccaagttaggagaccttttttaaagaaaacttttgttttagaagcttctttttggtggtggtgctggggagggataggtgaaaggagataacagtagataaagcccgacaagttttcagctggacagatcttcccactggcctactaaatctgaaagagccaaaggtttgtggtgggtttgtctagcaagttctatgttctagttcctgaattttccctaccctagagtgtcatgtttccatacttccttccraataagaccatgatctgcagacctccttgtaagtccaatcatccctaatacttccatgtttcagaattaaaaatgatttctaaaaacattacctaagcattatattactaaagcaatatgaccaaaaaatgttatttccaagaattgatgaagaaattttacataaaagataattgagcattaatacttagtaaatgaaattctaactggttttatcttcaacagacaaacaacagaaaggtgaatttgcaatagatggctacagtgtcagaatgaa

SEQ ID NO: 729700 - DNA, 577 bp, Homo sapiens
agacgtaggattcatgtgaatgtaataaagtattcgtttactcaggacataatttttttagactattttagtgatctagggcatcatttaatttctactggttaattttgaaatgaggggttattacatgaaggccctaattcatgctttctctttcttcttcctaggggataagagcactgattatgctaatttttaccagggattgtgggattgtactggagctttttctgatgagttgtcatttaagcgtggtgatgtgatttacattcttagcaaggtaagaagataccccaaaatgacgtttgtaaagagggaatacaaagctcgatttttaatgcatttggatttacagmgctagggaagaatgccaattggaattcttctaggtccttgttaacaattgggagttcacaataattaattattttgtcaagtgaaatgtaatcaaattttaaacacaatcagataacaggattcaacttaacagtgtgtttacctatcacttcagcccttggctgacatccacctactgccttctccagaaacaatatacttatgtgaaagttaacattgt

SEQ ID NO: 729701 - DNA, 642 bp, Homo sapiens
tcactaccgccttactattattttctcggattactgggcaagtttggcttttttttgcttctttgattgccacactacattttgccttgaagccatccattttgcagatattgaatttcttttgagtactatttttatacaataagcatcactacacctctggatcttgatagcattactgcaggaggagaaagcagctttgtgtyagtaattacctaacattgtcagaagctgactgcaggcctctttctagtgataacagaataaccgcataatgtagctttatagcacatgattaatagaaaataattacacgtcctacaaagggatgcaatatttcttataaattgactagaatggtttcctgtagattaaaggactcttcattattttatcagtcctcctgaagtacagtcacttgcctatgttagcatttcagctgatgttaagagctgaataggtgaaggataccagatggcagacctccttgtacctgaaaccttgtgttccataaagattacatgatgcttcctaacatttcaaagatttagacaacagcctggtatggattgtctattttttgtttgctaagaagataaagtttgagagttttcctttttgttttttaaatgatccacttgt

SEQ ID NO: 729702 - DNA, 604 bp, Homo sapiens
ttagttcatgtcctttgtttattcagttaccttttaattttatattaaggaaacttgcaataattaaggggccttgtttattctctagtttgtcatttgtctttgactttttccaccatgtggaaattttaggtttttctgtggtcaaaccaatcttcttttctcacataataattcatacaattcaatagcaaataaataaataacctgattttttaaatgggcaatggacctgaacagacatttctccaagacatacaaatggccaacaggtatatgaaaagactaatcatcasggaaatgcaaatcaataccataatgagggccggacgtggtagctcatacctgtaatgccagcactttgggaggccgaggcgggcagattacttgaggccagcagttcaagaccagcctggccaacatggtaaaaccccatctctactaaaaatacaaaaattagctgggtgttgtgacacatgcctgtaatcccagctacttgggaggctgacacaggagaatcgcttgaacctgggaggcagaggttgcagtgagccaagattgcgtcactgcactccagcctggacaacagagcaagaccctgtct

SEQ ID NO: 729703 - DNA, 604 bp, Homo sapiens
ttagttcatgtcctttgtttattcagttaccttttaattttatattaaggaaacttgcaataattaaggggccttgtttattctctagtttgtcatttgtctttgactttttccaccatgtggaaattttaggtttttctgtggtcaaaccaatcttcttttctcacataataattcatacaattcaatagcaaataaataaataacctgattttttaaatgggcaatggacctgaacagacatttctccaagacatacaaatggccaacaggtatatgaaaagactaatcatcagggaaatgcaaatcaataccataatgagggccggacgtggtagctcatacctgtaatgccagcactttgggaggccgaggcgggcagatyacttgaggccagcagttcaagaccagcctggccaacatggtaaaaccccatctctactaaaaatacaaaaattagctgggtgttgtgacacatgcctgtaatcccagctacttgggaggctgacacaggagaatcgcttgaacctgggaggcagaggttgcagtgagccaagattgcgtcactgcactccagcctggacaacagagcaagaccctgtct

SEQ ID NO: 729704 - DNA, 573 bp, Homo sapiens
ttcccaaagtgctagaattaacaggtgtgagccaccgcgcccagcccccattctctattctctctctctctctcttttttttttttttttttgagacagagtcttactctgttgcccaggctggagtgcagtggcacaatctcagctcactgcaacctcygcctcccgggttcaagcaattctcctgcctcagcctcccaagtagctgggattacaaccaggctgggagattcagcttgtccatttcatgttctgtttctcacaatcatctgtgtttgcttgtcactgcactttaaagagaaggcataactcaaaagtttcacccttcaacttgatggagaattattttttatttatttatttatttatttatttatttttatttttttgaaacagggtttttctctgttgcccaggctggattgccgtggtgcaatctcggctcactgcagcctcaacttcctgggctcggtcgatcctcctgcctcaggatctactccctcctgagtagctgggactacaggtacatgccatcatgcccggctaatttttttttcttttgtagagatgagg

SEQ ID NO: 729705 - DNA, 624 bp, Homo sapiens
ctgtcaaacacaactatacacaaaaaggatcaaggccctgtctacgggttcttccagagtttcttcgccctgcgcttccctagtttacatgagccagctgatctccaccactaacagactacagagtaggcccagtacaaaccccagaaagctcagtatcatgtgaagggcatactaaatgctatgttgaaaaaatatgcatatgattatttatgcttccgattaatgtcaaaattgtaaactgcaaaagaccactaaccatgagcagggacattaacttggtactatattctatgtcatgacagtgtgaaaaacacctagaacagaaaggtttaccttttccccttcacatgcaatctcctctgtctctattcagttccccctaggaaatgctgtggtatgtgtttagcgcggtataatcactcactcartgtttactaaacatctaccgcagactggataccactctatgtactgagccagaagtatccacaaatatagtacaagtactcctcacagcaactctctgcagtaggtattcttatctgtattttatagatgaggaaagctggggccagacaagagaagcaatttgccaaaggtcacaaagctcggtggtggtac

SEQ ID NO: 729706 - DNA, 375 bp, Homo sapiens
tgctttggatggtgccacactgatggtaatgaagaggacagttcatagaggaatcatcacctagagggaggacttggaaataagttagaaaccgtaacactatgacaaagtctttcctctgaaaagttacataacttagcaggaaattcagatacaactcactgaatactgtatagctaaatacaactatctcccaaattttgggccatactcattggcarcaaacaacagaatttgagcatatctcaaaaactgatacgacaacattaatttctgaaccaaagattttcattacaaagtacttcaacctggatgtaaacacactatgccattcacatgcatagtcacaatgaaacttttgatagtgcaaacata

SEQ ID NO: 729707 - DNA, 487 bp, Homo sapiens
tacccagcagaggcaagtggacacagatgctccagttttttacccaagcctgaaaagaccccgtccttccctctgagcctgctagagasctgttcctttcttaagattcggcccaagggccccattcttagcaccacatctacgagaaagcttttcctgactttccacaaaacaaaagatggcgacgtactttgagtagcttccactcaacatccaagattgcatatatcaaagtgcatcagacatgctgtacacttctatctccctgattagactcagagctcagtgaattcaagaaccaaaccacattcactcccatattcctcaggcctggaacatactagacattcaagtatttaccaaaggcaaagatgaggtcagaaattatgaataatgaaagttatatatctacatagagatagagatacagatacacacacacacacatcacccaaaagatatcagggatataagggaagcatttaaa

SEQ ID NO: 729708 - DNA, 487 bp, Homo sapiens
tacccagcagaggcaagtggacacagatgctccagttttttacccaagcctgaaaagaccccgtccttccctctgagcctgctagagacctgttcctttcttaagattcggcccaagggccccattcttagcaccacatctacgagaaagcttttcctgactttccacaaaacaaaagatggcracgtactttgagtagcttccactcaacatccaagattgcatatatcaaagtgcatcagacatgctgtacacttctatctccctgattagactcagagctcagtgaattcaagaaccaaaccacattcactcccatattcctcaggcctggaacatactagacattcaagtatttaccaaaggcaaagatgaggtcagaaattatgaataatgaaagttatatatctacatagagatagagatacagatacacacacacacacatcacccaaaagatatcagggatataagggaagcatttaaa

SEQ ID NO: 729709 - DNA, 619 bp, Homo sapiens
aagacaaggatatctttctctcagcacatctattcagcgctgcactggaagttatagtcggtacagtaagacaatagaaggcaagagatttaaaagaagaagaaaaactgtgttttttcacagatgacctgattatgtatatagaaaatcccaagaaactcaccaaaaccctgccaggactaagaagtgaatttttagcaaggttgcaggatataaggttgatatacaatgtaccttgtatttctatacatgagaaacaagtggaaaataaaatcagtgtcttagcastatttacagtggcttccaaagccgtgaagctttttaggaataattttaataaaatatatgcaaggtttgtattctaaaaactccaaaatattgttgagaaaaattaaagaagtcctaactaaatagatacaccatgttcatcagttggaatgctcaatattgttaagatgtcagttcgctccaaactgatttatagattcaattcagtcccaatcaaaacaccagaagacatttcctttttccttttggtagaaattggcaagcttatcctgaaaatttgtgtgaaaattcaaaggacttaaaatagctaaacaattttgaaaaagaaaaa

SEQ ID NO: 729710 - DNA, 619 bp, Homo sapiens
aagacaaggatatctttctctcagcacatctattcagcgctgcactggaagttatagtcggtacagtaagacaatagaaggcaagagatttaaaagaagaagaaaaactgtgttttttcacagatgacctgattatgtatatagaaaatcccaagaaactcaccaaaaccctgccaggactaagaagtgaatttttagcaaggttgcaggatataaggttgatatacaatgtaccttgtatttctatacatgagaaacaagtggaaaataaaatcagtgtcttagcactatttacagtggcttccaaagccgtgaagctttttaggaataattttaataaaatrtatgcaaggtttgtattctaaaaactccaaaatattgttgagaaaaattaaagaagtcctaactaaatagatacaccatgttcatcagttggaatgctcaatattgttaagatgtcagttcgctccaaactgatttatagattcaattcagtcccaatcaaaacaccagaagacatttcctttttccttttggtagaaattggcaagcttatcctgaaaatttgtgtgaaaattcaaaggacttaaaatagctaaacaattttgaaaaagaaaaa

SEQ ID NO: 729711 - DNA, 619 bp, Homo sapiens
aagacaaggatatctttctctcagcacatctattcagcgctgcactggaagttatagtcggtacagtaagacaatagaaggcaagagatttaaaagaagaagaaaaactgtgttttttcacagatgacctgattatgtatatagaaaatcccaagaaactcaccaaaaccctgccaggactaagaagtgaatttttagcaaggttgcaggatataaggttgatatacaatgtaccttgtatttctatacatgagaaacaagtggaaaataaaatcagtgtcttagcactatttacagtggcttccaaagccgtgaagctttttaggaataattttaataaaatatatgcaaggtttgtattctaaaaactmcaaaatattgttgagaaaaattaaagaagtcctaactaaatagatacaccatgttcatcagttggaatgctcaatattgttaagatgtcagttcgctccaaactgatttatagattcaattcagtcccaatcaaaacaccagaagacatttcctttttccttttggtagaaattggcaagcttatcctgaaaatttgtgtgaaaattcaaaggacttaaaatagctaaacaattttgaaaaagaaaaa

SEQ ID NO: 729712 - DNA, 632 bp, Homo sapiens
catactcatgaacaattttcatagtctaaaattcttcactgaattgggtaggaaattaattctgtcttcgaggaagccataagaccagcgaaacactctggcatttactgcatcacattcttttctccaatttgttacttaagatcttatcattgcagtatttatgtagtctgagcattagatgaggctatgcagttgactcactggtgtctctttcctcacttataaaatacgaataataaatacatgtgtttctcggactatggagaacaatgtttgcattgttctttgggatgacctgaaagaaaaataagtttatgcaatgttacatgctcttattttaatgaytggtgaatcagtctccataacctgacttctatccgatgagtggaccttccccaacaatcttcccaccccttatgagtaatgagtccaattggttgttcaaataccctgtagatgacataacttttctgattaaatttttgagttaattttggtgatgtgactatagaagctgtactttacacctttattttcaaaatgtaaaaatcaatttttaaaatcttttggctttaaaaaaaatttcccactcactcaatcttgccaaaaacctaccttcaagaactttc

SEQ ID NO: 729713 - DNA, 601 bp, Homo sapiens
acacatttaaaggcagcaatacatgctgagttatggctatgaagaatctccctacagctattctcagagtcaagacagggccctgaccactatgtttacaagtgtttttgactttgcagtatctgcaactacagatggcacacacaaagtatccccaaacactttcttggcaaaaccagtttggaaacctttatcttactcatgaggcatgtttctgttatgtaatacagcacgctgtgaagaatcacaaggcctgsaaggactgtaccctctccagcatttctagatcagaggtgaaataacaaaagaatatgaattgataagactataaagagaaaatgttttatcaagctgtagttgagggaaattgcagtgatccacccaaaggcctgttatttgctctggtaaacattatcattttactattttacaactgaggaagccaagtttgggagaatataactaactttcccagtagcactgctagataatatgacaaaggtaagatgacaaagtcaaatgatcccatattccaataccacatggattctgacatcctttccttaactgaatacatgtgaaaaatactattgtttagtta

SEQ ID NO: 729714 - DNA, 651 bp, Homo sapiens
agttttgggggtgaaggtatcaaatgtaccctaaacattagttttcccatgcagtacagttattattatgcaattatagacacttccccaggatttgtgtctttaaaacttattaggtgcttttagaccaaaaattagaaaagtttacaatatgaaatgtttgaaattcttaaatttgtagttttttaggtagtttattttccatttcttgtctcgtgtctaattgaagagatatgcaatttcaaggttcaatttcctaaaataatacatacaggtataaataacccttatctcacggaaaaacaaatattgatgtaattttatagaattttgaacagatgaaatcaacatatagatgtgattcttgttttttaagcctactttgcrtaaatattctaatattttctttcttgtttagttgatgtatttcagcatcaatatcccttaaactttctatctttagccaattaattgtgggaattgaactatatgtatatgaagaaatatataatttaattaattcccatatatgactaataatatatgtttttaaaactgtatactggtaaaacctatcatgaaagctaaaggtttaaggtggtgattaaaaaatatttagaaggcttgtgataaaaagaatcttagcattta

SEQ ID NO: 729715 - DNA, 651 bp, Homo sapiens
agttttgggggtgaaggtatcaaatgtaccctaaacattagttttcccatgcagtacagttattattatgcaattatagacacttccccaggatttgtgtctttaaaacttattaggtgcttttagaccaaaaattagaaaagtttacaatatgaaatgtttgaaattcttaaatttgtagttttttaggtagtttattttccatttcttgtctcgtgtctaattgaagagatatgcaatttcaaggttcaatttcctaaaataatacatacaggtataaataacccttatctcacggaaaaacaaatattgatgtaattttatagaattttgaacagatgaaatcaacatatagatgtgattcttgttttttaagcctactttgcataaatattctaatattttctttcttgtttagttgatgtatttcagcatcratatcccttaaactttctatctttagccaattaattgtgggaattgaactatatgtatatgaagaaatatataatttaattaattcccatatatgactaataatatatgtttttaaaactgtatactggtaaaacctatcatgaaagctaaaggtttaaggtggtgattaaaaaatatttagaaggcttgtgataaaaagaatcttagcattta

SEQ ID NO: 729716 - DNA, 587 bp, Homo sapiens
ctaatttttgtatttttggtagagaggggatttttaccatgttgacaagtctggtcttgaactcctgggctcaagctattctcctgcctcagcctcctgagtaggcggggctacaggtgcatgccaccatgcccggctaatttagagatggggtttcactatgttggccaggctggtcttcaactcctgacctcaagygatccaccagcctcgatctcccaaagtgctgggattacaagcgtgagccaccgcacccagctccattagtttttgagtttgtaatcttaattacagtatagtcatataaacattagtttttcttcatgaaataattgtgattgaaagtcgtttcttcccctgactatacactatgctttcaggttatacttgtgttttgctgttgttgttcttgctgctgatgctttatggatttcaaaatgacggaaaaggaaaacagcatagggaagctgatcctcttccacacccagagggccattctgctgcctctcttccagacacaaaaggagacagagcagacattcatgtggctgaattcctaattttccattatagctgccagcatgtgt

SEQ ID NO: 729717 - DNA, 587 bp, Homo sapiens
ctaatttttgtatttttggtagagaggggatttttaccatgttgacaagtctggtcttgaactcctgggctcaagctattctcctgcctcagcctcctgagtaggcggggctacaggtgcatgccaccatgcccggctaatttagagatggggtttcactatgttggccaggctggtcttcaactcctgacctcaagcgatccaccagcctcgatctcccaaagtgctgggattacaagcgtgagccaccgcacccagctccattagtttttgagtttgtaatcttaattacagtatagtcatataaacattagtttttcttcatgaaataaytgtgattgaaagtcgtttcttcccctgactatacactatgctttcaggttatacttgtgttttgctgttgttgttcttgctgctgatgctttatggatttcaaaatgacggaaaaggaaaacagcatagggaagctgatcctcttccacacccagagggccattctgctgcctctcttccagacacaaaaggagacagagcagacattcatgtggctgaattcctaattttccattatagctgccagcatgtgt

SEQ ID NO: 729718 - DNA, 599 bp, Homo sapiens
aaaaacaaagttctgatgagcaggacctcctcccactaaggctgacaaatacaagatgaacacacagtgagggaggcacccatgccccctgggcttgggaggccaacaagagctgcccacacacccatcacaagtcatcacccagcttaggggtgacttgtttttaatctgaaaggtcaatgttctacagcagagcacaaagcgcagatgtttccactgaactaagagacagtgtgggggcagaacttagcactatgactggcacattgcactcaaaaatgttggcagacrtggtggtccttcccctctgctcgcctctgtcctcatgagccttgccacctggcatggcatgtgtctgcctggtgcaagcatagcccatctggctgggaacttcctgaggcaggagcacactttgcacatctctgtattcctaagaacccaaaagcaaatgcaacaagaacaaaaataagtaaatgggacctaattaaactaaaaagcttccacacagcaaaagagataatcatcagagtaaagacaactcacagaataggagaaaatatttgcaaactttcatccattaaagtactaatatccaaaat

SEQ ID NO: 729719 - DNA, 599 bp, Homo sapiens
aaaaacaaagttctgatgagcaggacctcctcccactaaggctgacaaatacaagatgaacacacagtgagggaggcacccatgccccctgggcttgggaggccaacaagagctgcccacacacccatcacaagtcatcacccagcttaggggtgacttgtttttaatctgaaaggtcaatgttctacagcagagcacaaagcgcagatgtttccactgaactaagagacagtgtgggggcagaacttagcactatgactggcacattgcactcaaaaatgttggcagacatggkggtccttcccctctgctcgcctctgtcctcatgagccttgccacctggcatggcatgtgtctgcctggtgcaagcatagcccatctggctgggaacttcctgaggcaggagcacactttgcacatctctgtattcctaagaacccaaaagcaaatgcaacaagaacaaaaataagtaaatgggacctaattaaactaaaaagcttccacacagcaaaagagataatcatcagagtaaagacaactcacagaataggagaaaatatttgcaaactttcatccattaaagtactaatatccaaaat

SEQ ID NO: 729720 - DNA, 417 bp, Homo sapiens
cctagcatatctctgcttaacttaccattcttccccatgggtgaaataaatggatcctggagaataaatatagactatagatactgtaagctcagccaagtaatagttcttgttgtagctactataccatgggtggtattattgckagagccgatattaaggcttcaggtaatgtagtatgcagatgtggattttgcaaatgcataatttaaaaaaattctgatcagaaaaaatcacggaaattttcatatatgtggaatggacagcaatattgacttacagttttaccctaggactatattaactctttcaaccctttgtcataatatatttaaaatggatctcaaccatctggacacttcataggctattacattgatttgttgatttattgtgatttatttatttattttattg

SEQ ID NO: 729721 - DNA, 528 bp, Homo sapiens
aatacttaagatgtactcactggctcctcatcatttcagtttgaaaattgattataagcttttgttgttgctatctatagtcatgtcttactactccaagaacacttagaaaaatgcattaaacatagtgattattaaaacgaatatacctgaactaggctaataagacctctttaaaaccataatttgcacagatggatgttctatcttatgtggacaaaacttattatctagctttttacaataatttctgctttttaattgaggttattgtcctaaatactaccagctcacatacggaaattctaaaagggactaacaagtccgcttcttayttcatatttgggaaagctctttggaggattctgtagatatgaagagaatcctaaaaagttgtatgaattgcatttatctcaatccattatgtttattttttacttatcagaatgttccctatcaaacataaactaaagggaaataagtctaagtttttctgtgaacacccaagtactgctatcagaataagat

SEQ ID NO: 729722 - DNA, 561 bp, Homo sapiens
gccaggtgtgccccagcccatctgtgttatagctcatattatgggtctggtgattcctgagttcttgtcctgtgtcctagaaaaatgaggatatgctgacaattgaagggtgaggagggtggagaagaattttattgagtgacaaaacagctctcagtggagaggggtcacaggagagcttccccacccgaagtcaggtggtttctcccccggtgtggatgagtctagggtttttacaagcacaggatggggaggggtgggacgaaggtagcattggaataggtaacttttggttagtttaaaagcattattcagaaagaaccaattgggaaagagcaggcaaacaggaatagaagatctcactctaggttgcaggtctcgggctgattttggattgaaggtggggtttcactcgggaccttccyctgtctacttaggcatttgtctacctcctgctgctctcattttgttatgaatgttggccatgcccctcatgatggagaggaaaggtattaatctctactatttctgattctacaatgtctactattcgtgttctgg

SEQ ID NO: 729723 - DNA, 612 bp, Homo sapiens
atctcattaggggagagaggacgttggcaaggactgattgtatgccggccctaccaactgtaaattacacagggccatgttgtcacctaaatctgcagggaaatttcggtggtcacggaaggtggaagctgcttggagggcttctctgcgaatccttctgcttgttgaacatcacgtttatggccttagcaacggtgcagagtgaattgactgtcaaggaaaatgcactaactcacatcaagccagggaaaaaagctcctgggacaagactgacacgagtgcaatgaccagagactaaattaccacctgcttagggtrgagtgaaaaaaccaaacaacaagcaaggggatttatctgcaactggagacaatgacataaaatacaagctagcacttcaattattcaagtctggtaattccacacagtctgtatgtctggttaaagaactctgtgtaaattctgagctgcaggtttttagaggcaatgtgtatgaggcaagacaatggagttggagattaggagacacaggccttgccttggccatgccttgattccgtgcagtatggcgagaaatcatctagcatctttttacctttgtatctgagcaatcca

SEQ ID NO: 729724 - DNA, 612 bp, Homo sapiens
atctcattaggggagagaggacgttggcaaggactgattgtatgccggccctaccaactgtaaattacacagggccatgttgtcacctaaatctgcagggaaatttcggtggtcacggaaggtggaagctgcttggagggcttctctgcgaatccttctgcttgttgaacatcacgtttatggccttagcaacggtgcagagtgaattgactgtcaaggaaaatgcactaactcacatcaagccagggaaaaaagctcctgggacaagactgacacgagtgcaatgaccagagactaaattaccacctgcttagggtggartgaaaaaaccaaacaacaagcaaggggatttatctgcaactggagacaatgacataaaatacaagctagcacttcaattattcaagtctggtaattccacacagtctgtatgtctggttaaagaactctgtgtaaattctgagctgcaggtttttagaggcaatgtgtatgaggcaagacaatggagttggagattaggagacacaggccttgccttggccatgccttgattccgtgcagtatggcgagaaatcatctagcatctttttacctttgtatctgagcaatcca

SEQ ID NO: 729725 - DNA, 505 bp, Homo sapiens
gaaaaccatgagagagctggaagcagggactaaccagctgaaaattaattagaaacgtttttcttcctcctaaactgttaaaagtcactcaatctcaggacataacttacttggaaaattcaaatttctcttgaagatttagattcagcccttctttactggagtaacagctactgaagaaaatgtatacaaatgttgttatctgaggcttgaatgcagtctctggaaaaaactttagagtaatatcattttaaagaacagtccaaagcactttaagaaagggaaataaaaatgaatagtgaataatgagtatgcaggaaacygaggatgactgtcctgagggaattatttactgaatctctgattttaatgtgtggttctcagagattctttagaattgagcgttccatccagccttggtgttttaggacttggaactctgcaccaaaccctggaattgctcagtgtactttctcaccagttagatcatactcagagtgctcag

SEQ ID NO: 729726 - DNA, 618 bp, Homo sapiens
gttgttactataggctatgcattggatcctctctaatgatatttgagagatttgagagatgccagtaagattgggattacttctaattacctttcactgctgggatcaatctgcgacaccctgctgagaccaagccaggtgagtgcctgggggagttaatttgtctgtgggtgtgtgtataaaacctttatatataaaaaatattaatatattgtacattaatatataacaataacatgtcatattatatatgcaatatataatctattcatatatacctatgtgtatacatatactatatttagggaatacgggtttaaatacttaaacaccagcctggacaacatggcaaaaccaaaaccccgtctctacaaaaaatacagaaaattagctgggcatagtagtgtgcacctgtaatcccaactacttgaggggctgaggcaggaggatggcttgagmccaggagttcgaggctgcagtgagctatgattgcaccactgcactccagcctgggtgacaaagtgagactctgtctccaaaaaataaataagtaaataagtatttaaattaatgaggcgtgagatgattggaatatacgacaagacagaacatagtaat

SEQ ID NO: 729727 - DNA, 616 bp, Homo sapiens
ctattgaatcagaaactcggggtgggcccagcctgtgtgtcacaagccctccaggtgattctaatgcgccctcaagtttgagggctatagttgcaaacactgaagacagatgttgctcatcatgcccaactatacatgccctgttagtcctcactccaaccgtggactgagaggattgcgatcttgtggttagcttgtgtcttactccatttgtgttgctataaaagaatacttgaggctgggtactttattgagaaattttggctcaagttctgcaggctgtaggataacggtatcagcacctgcttctggtgagggcctcaggaatcttccactcatggyggaaggcaaaagggagcaggcattacatggtgagggaggaaggaagattgaggggcagggtcagaatcttttaataatcagttctcaggggaactgagagagtgagaactcactcactaccacgaagacagcaccaggccattcatgaaggatctgcccccatgatccaaacacctcccactaggccccacctccaacattggggatcagatttcaactcgaggtttggaggggacaaacatctaaactatatcaaactgtgactcatccaagg

SEQ ID NO: 729728 - DNA, 636 bp, Homo sapiens
aggtatatctcccaatgggatccctcccccctccccccacctcacaacaggccccagtgtgtgatgctccctaccctgtgtccaagtgttctcattgttcaattcccacctatgagtgagaacatgcagtgtttggttttctgtccttgagacagtttgcccagaatgatggtttccagcttcatccatgtccctacaaaggacatgaactcatccttttttatggctgcatagtattccatggtgtatatgtgccacattttcttaatccagtctatcattgttggacatttgggttggttccaagtttttgctattgtgaatagtgccgcaataaatatatgtgtgcatgtgtctttatagcagcatgatgtataatcctttgggtatatacccaataatgggatggctgggtcaaatggtatttctagttctagatccttgaggratcaccacactgtcttccacaatggttgaactagtttatagtcccaccaacagtataaaagtgtttctatttctccacatcctctccagcacctgttgtttcctgactttttaatgatcgccattctaactgggcctagcacctttttaatcccctctgatattcccctgctcccacttggtattaaa

SEQ ID NO: 729729 - DNA, 610 bp, Homo sapiens
taacccaaataataataataatcccagagcagacctttttttcttttttctctcttctccttcccctcttctctctccctctctctctccctctctctcctttctctttcgttctctctctctcatttcctctgtctctgtccccgccacctccccgtcttttgcaagcgtgctcgtggcgcgtgcgggacagggaagtaaggggcgtgtgcgcggaggctcttcatcccttccggagatgccgcggccgaccagcgcgctttggttcagcaagcacagaaggtgcaagccgaacaaggccattcagaaatgaggtggagrctatgaggctgatgagctctacgattaaaaatccatttttgtttaattccaagataagttttaacgatgggatttgagtgagtcagatcgcccatttggccattatatccggattaaaagaaataaattactgccttgacaaaagatgccaaccacagtggaatgaaaagcaaccaaattgaggaaacagttggggcaggatagataacttgtaatattacttaaaaataaaaatgatgaggacaaccaactcttcctcccctcccccgcgcaccttttcacttgagca

SEQ ID NO: 729730 - DNA, 610 bp, Homo sapiens
taacccaaataataataataatcccagagcagacctttttttcttttttctctcttctccttcccctcttctctctccctctctctctccctctctctcctttctctttcgttctctctctctcatttcctctgtctctgtccccgccacctccccgtcttttgcaagcgtgctcgtggcgcgtgcgggacagggaagtaaggggcgtgtgcgcggaggctcttcatcccttccggagatgccgcggccgaccagcgcgctttggttcagcaagcacagaaggtgcaagccgaacaaggccattcagaaatgaggtggagactatgaggctgatgagctstacgattaaaaatccatttttgtttaattccaagataagttttaacgatgggatttgagtgagtcagatcgcccatttggccattatatccggattaaaagaaataaattactgccttgacaaaagatgccaaccacagtggaatgaaaagcaaccaaattgaggaaacagttggggcaggatagataacttgtaatattacttaaaaataaaaatgatgaggacaaccaactcttcctcccctcccccgcgcaccttttcacttgagca

SEQ ID NO: 729731 - DNA, 655 bp, Homo sapiens
aaattccaaagtatgacaaaaatgaataattctctttgagattttgaaattaaaaaataaaagaaagaaagaacaagcaaagaatccaactcctctttgggttaatttgaatagtcaaatacagaagaaatcatcaagctcccatcagttttgacaatgtgttctcagcagcatttggtccacagatactctcacaataaacccattaataaacaggaaagaccactgggtaaacacgacaccaatatccaatacccaaatgaaakattattttttactttaattactataaactcaatacacatcttttcagaagtacctagctccattcatactttcacaacgtgaggtggaatgaaagtgctaccaatcagtaatacagatatctgtgtacatgtcagtttcttccaggaaattataaactacttgaaagcaggaattcattttgttaataataccttatatttgtataatattggatctttgtatacataatttcatttgatcagagtaaaccactaaggtctaaagagcagtagtaatttctatttttattgtggggatatggcagccaagagacatgaggaatttaccctaggttactcaactattaaataataagcagaggaatcaggataagaatcagttttctgac

SEQ ID NO: 729732 - DNA, 655 bp, Homo sapiens
aaattccaaagtatgacaaaaatgaataattctctttgagattttgaaattaaaaaataaaagaaagaaagaacaagcaaagaatccaactcctctttgggttaatttgaatagtcaaatacagaagaaatcatcaagctcccatcagttttgacaatgtgttctcagcagcatttggtccacagatactctcacaataaacccattaataaacaggaaagaccactgggtaaacacgacaccaatatccaatacccaaatgaaagattatwttttactttaattactataaactcaatacacatcttttcagaagtacctagctccattcatactttcacaacgtgaggtggaatgaaagtgctaccaatcagtaatacagatatctgtgtacatgtcagtttcttccaggaaattataaactacttgaaagcaggaattcattttgttaataataccttatatttgtataatattggatctttgtatacataatttcatttgatcagagtaaaccactaaggtctaaagagcagtagtaatttctatttttattgtggggatatggcagccaagagacatgaggaatttaccctaggttactcaactattaaataataagcagaggaatcaggataagaatcagttttctgac

SEQ ID NO: 729733 - DNA, 624 bp, Homo sapiens
gcgttttcagtgctgcctcctggatcttggacaaagcccaacatcatacacactaacttctcctgttaacaattcactgacacccagatttcatctctgctgtgttctgttacatcaagaagctcacaattaatttacttcctatgaagacagagcaactcatctgaacctcatgagaaagaacaatagtgtgattagttcctcagaagkcatggaaaacacatatttgcttatgtgtctgatggttattatgccatctaatttttaagtattatgatgtttttatttcattaaccagaatgttacataatgtgccagagccacattatgtaatatttcattcatcagacaagtactaagtgtttcaatttttcctactcctctttgtctaaaatgaattcaatattattaatgaattacctgcataatttacctgtatcatcatttaactatagctattttaaattattataattaatttaaattatcataattatagcacaacttccttaaaagaagaatttactggaataatactcttgtagagatatacttcagtatggcatactgcagaattcaggaatttactgaatttttattcatttatcgttatgtcattcattc

SEQ ID NO: 729734 - DNA, 553 bp, Homo sapiens
ataatatataaatataataaagtattaatagtactttattttttgatgcataatagttcattgaatgggtgtaccatagtttgttttactgataaaatattatagatgtatcttatagtttacattcttatatgaatagtcattcagattgtttctaatttttgctaccataaataattcttcaataaataatcctggatgtggtttcttatacaacagtacaggtgtttctrtagaataaatgcttagaattagatttgctggggtgcacatattaattttaatcaatgactatactgccaattgccctccagagtagttatactaatttaatacataagcaatatgaaaatacctcttcccctcattcttaccagtagatataatttaaaaattttatattttgccagacttgcattaaaaaagagtattttattttcctttttatttgcattcttctgaattcttgtgaagctaagtaactttttggatattcatttgccatttataattctgcaattggctttcttatatattcttatatattatatat

SEQ ID NO: 729735 - DNA, 540 bp, Homo sapiens
atgttcccatccttggacttggtatttattcatttatttagttcttctttttgtctgtaaaaaatgttatttttttcacaagtattgtgcatatttatttattcctaggtaatttatagtttttttgtgatatcatggcatactagtttcccagggctgacataaaaaattaccacaggccaggcatggtggctcacacctgtaatcccaacactttgggaggccaaggctggaggatcgcttgagcccaggagtttgagcccwaactgggcaacaaagtgagatccctgtctctacaaaataaaactattagccaggtatgattgtgcatgcttgtagtcccagctattcaggcggctgagacaggagaattgcttgagcccaggagtttgaggctgcagtgagccatgattgtgctactacactccagcctgggtaatagaatgagaccctgtctcaaaacaacaacaaaattaccacaaaatcagtggcttaaaagaacagaaatttattttctcatagttctgatggccaaaggtt

SEQ ID NO: 729736 - DNA, 540 bp, Homo sapiens
atgttcccatccttggacttggtatttattcatttatttagttcttctttttgtctgtaaaaaatgttatttttttcacaagtattgtgcatatttatttattcctaggtaatttatagtttttttgtgatatcatggcatactagtttcccagggctgacataaaaaattaccacaggccaggcatggtggctcacacctgtaatcccaacactttgggaggccaaggctggaggatcgcttgagcccaggagtttgagccctractgggcaacaaagtgagatccctgtctctacaaaataaaactattagccaggtatgattgtgcatgcttgtagtcccagctattcaggcggctgagacaggagaattgcttgagcccaggagtttgaggctgcagtgagccatgattgtgctactacactccagcctgggtaatagaatgagaccctgtctcaaaacaacaacaaaattaccacaaaatcagtggcttaaaagaacagaaatttattttctcatagttctgatggccaaaggtt

SEQ ID NO: 729737 - DNA, 612 bp, Homo sapiens
attgtatttttcagttataaaatttacattttattcttctttatatctttttttttctttttttgtgacatggtctcgcatatgtcatccaggctggagtgcagtggtgcaatcatagctcactgtagcctctgactcccaggctcaagcagtcctcccacctcagcctcccaggtatctgaaaccacagacacatgccaccatatctggctaatttttaaaaaattttatagagatgaggtctcactatgttgccaaggctcatcttaaactccagaactcaaatgatcctcctgccttggcttcacaaagtgttaggattataggcatgagccaccatgccctaccacatcttctatttctttgatgatattttttaatttttcttttgttccaaaagttttcataattgcttgttaaaacactttttgacagcttcttgaaaaccacattcakacaattacaatatctgtgtcatcttggcattagcgtctattgatcatcttttctcatttgaatttagattttcttagttcttggtatgaccagtaatttggaatgtatcctggacattttgaatgttgttttaagactctggttcctattaaatat

SEQ ID NO: 729738 - DNA, 604 bp, Homo sapiens
tgataaagggctttctttatttttccatacacaggcaatacatgaatgctcttgcattgcaaaatattcaaaggttactggtaaaattatagtctccctggctttcttctagaagaaaacactattttcagcttaagatgtatgcctttcttatcatcatcttattttcttacttattatcattctcttattttcatatgtgtaattaaaaaaaaagttcctgtagaaacatatggtactattgtgtgtgtgtgtgtgtgtgtgtgtgtgtgtgtrtatattcagcaatattgtcaactaattttttggtgccccaagcatgacttttttttgccatagaaaatactctaccatccaggtgcagtggcccacacctgtaatcccaacactttgggaggccaaggcaggcagatcacctgaggtcaggagtttgagactagcttggccaacactgtgaaaccctgtctctactaaaaatataaaaattagccggatgtggtggtgcatgcctgtaatcccagctacatgcctcgggaggctgaatcaggggaatcgcttgaacccaggaggcagatattgcagtgagccaagatcatgccactgc

SEQ ID NO: 729739 - DNA, 642 bp, Homo sapiens
caacatcaccttagaacatttttcatctcaattattgttgctaaataggtaacttctattttagatatattagactttctaagtaactaatgagatatacattaagatatgtatttgtgtatcaaaatatatttaatttctttttttatcttagtgacatgggaggtagtgaacctcaagatgatttgttcaagtattttccaaagrgcttactagagtaagacagccaggagaatcatttatggacagagtgctccatcacccaagatttcaaagctccttacctaaaaacaaccaaaggacaagatattctgccctaggaggaaaatataatgcatagcttccttttctcttccttcctttctctgtccctttctttctcttccttcctttcttccttccttccttcttccttccttctttttctttctttctctttcttttttttttgttaagggattcatctcattttcagaggggtaagtatttcctttattaaggttttatctagcagtaaccagtaataaaaggggaaagggggatagtctttaccttgtataactgtgtctttctttaggtagtacatttttcacatcattctttggctgtattaaagaatattgtccttacagcacagtagac

SEQ ID NO: 729740 - DNA, 642 bp, Homo sapiens
caacatcaccttagaacatttttcatctcaattattgttgctaaataggtaacttctattttagatatattagactttctaagtaactaatgagatatacattaagatatgtatttgtgtatcaaaatatatttaatttctttttttatcttagtgacatgggaggtagtgaacctcaagatgatttgttcaagtattttccaaagggcttactagagtaagacagccaggagaatcatttatggacagagtgctccatcacccaagatttcaaagctccttacctaaaaacaaccaaaggacaagatattctgccctaggaggaaaatataatgcatagcttccttttctcttccttcctttctctgtccctttctttctcttccttcctttcttccttccttccttcttccttccttcyttttctttctttctctttcttttttttttgttaagggattcatctcattttcagaggggtaagtatttcctttattaaggttttatctagcagtaaccagtaataaaaggggaaagggggatagtctttaccttgtataactgtgtctttctttaggtagtacatttttcacatcattctttggctgtattaaagaatattgtccttacagcacagtagac

SEQ ID NO: 729741 - DNA, 601 bp, Homo sapiens
atatgatattcattatacagatacctttgagatatattcctgtttgaatgtagtgtcataaaaatatcttggtctctgcagacaaattgtgtcttttcttttgtcagaaataaaacctgaggcctttagctgccaggaaacttaaaagttgaaggcattgctcatttgtagttatcaatttgcctaggtgtctaagcttttagatcatctttatcttgcttttattcctgttgacaaatttggctttttgcttcctcagatgctkgaatttgtggaaattttactgatgctaaatatatcaaaaagatattcgctccactactgtaacagatgtttgcatcattctcagttgtgccacattttcccccatacattttaagttccttgattatcccaattatctgtaatatattatatcccccatccctatcagagtgctgtgtatgtagcaggttcccaataaatgtttccatgttggactgacttaatcacggttaccacagcttttcaatttatggccagcagtaaaattttttcccaagttacataaaaacaaaaagaaagtgttttacctcttagctacttttatatgtgctaataa

SEQ ID NO: 729742 - DNA, 504 bp, Homo sapiens
cagaaggcaagaaataactaagatcagagctgaactgaaggaaacagagacacaaaaatcccttcaaaaaatcaatgaatccaggagctggtcttttgaaacaatcaacaaaattgatagacctctagcaagactaataaagaagaaaagagagaagaatcaaatagaygcaataaaaaatgacaaagggaatatcaccaccaatcccacagaaatacaaactaccatcagaaaatactgtaaacacctctatgcaaataaactagaaaatcttgaagaaatggataaattcctcgacaaatacaccctcccaagactaaaccaggaagaagttgaatctctgaatagaccaataataggctctgaaattgaggaaataattaatagcttaccaaccaaaaaaagtccaggaccagatggagtcacagccgaattccaccagaggtacaaggaggagctggtaccattccttgtgaaactattccaatcgatagaaaaagaggg

SEQ ID NO: 729743 - DNA, 504 bp, Homo sapiens
cagaaggcaagaaataactaagatcagagctgaactgaaggaaacagagacacaaaaatcccttcaaaaaatcaatgaatccaggagctggtcttttgaaacaatcaacaaaattgatagacctctagcaagactaataaagaagaaaagagagaagaatcaaatagatrcaataaaaaatgacaaagggaatatcaccaccaatcccacagaaatacaaactaccatcagaaaatactgtaaacacctctatgcaaataaactagaaaatcttgaagaaatggataaattcctcgacaaatacaccctcccaagactaaaccaggaagaagttgaatctctgaatagaccaataataggctctgaaattgaggaaataattaatagcttaccaaccaaaaaaagtccaggaccagatggagtcacagccgaattccaccagaggtacaaggaggagctggtaccattccttgtgaaactattccaatcgatagaaaaagaggg

SEQ ID NO: 729744 - DNA, 573 bp, Homo sapiens
cactgtgactcttattgacttgtagagatacttccctggtcatcttggctactatcctggagaattacccagattatcattcagagtctcttgtcctcttcccttaccttttcctaaactaactgagtctctttctccatgctatcctgcctggagtttggggaggagtgaaacaggagtccctgtgtccaccacactggsaccatgctgggccagacttgacgtcagcacagtactgagtctcacccaaagcctgtgttgactattgcttagctaccattgagatttattcaaggtccaagggctctttagatagcagatggtaaagccagccagggttgtgtctttctctgcagggcaacaggttcctttctggcccagggttggtctagaaatgctgtctgatagctagggcctgaagtcaggaacattaggaatttacttggtgctttagtttgctgcagctgaacttatacccaaattgaaagactaagtcctttttactcttctgtttcctttcatcaagcagagtgagtcttgccccatgttcacgcccaccccaggccaatggtg

SEQ ID NO: 729745 - DNA, 621 bp, Homo sapiens
tatctcccttaacttatttgtagcctcccactctaactctgagaaaactggctctaaccatcttccacttatttatctaactgttaaattctagtatacataaatgatgcttttaaaactgctacctgtacctctgtgggaaacaccttatcaattagagtatagtgctgtgtatactaccttgtgccttttgtcttgatgaaacttccatttccaaagttatttaggtaacttttcccttttcctctacccttttcagtgaggttgtttcataattcctcatacagtgagattcttttgtcaaattcagcattccatgctgggatccccccaaaacttctaaaggagttttaaaaaatttgtatacatcaaggttcactctttgtgttttaaagttctaggtatatcaacaaatgtaaagtttcatgaattgaccactatggtgtcagacagaatagttctgttaycctaaaaatgttctatgtgtatgtgtgcacacacacattgccctgtttgtacgattatcttaaagactaacattggtaaactcgactctgtctttggccaagaaaacgttcaatctgcagacttctatgcattgaagtccatgtgtctgaagga

SEQ ID NO: 729746 - DNA, 588 bp, Homo sapiens
cactttttagttgtatttttattgttgcattttaagaattgtttgtatggcttagataaaagtcttatcacatatgtgttttgcaaatattttctctcagtctgtagcttatctttccttaattttaagtttctttctcagagtagaagtttttcattttaataaaaatcaacttattaattttttctttcacggattgtccttttagtgttgcatctaaaaactgattgccaacacaaaaatgtgaatatatttaatgctataaaattgtattcttaaaatagttaaaatagggctaggtgcactttgggagatcaaggtgggcagatcacttgaagtcaggagtttgacaccagtctggccaatatggtgagactccatctctaccaaaaactagagaaattaggcagagtggtggggcrtgcctgtagtcccacagctgtttgggaggctgaggccggagaatcgcttgaacctgggagacctaggttgcagtgagcttagatcatgccactgcgctccagcctaggtgacagagtgggactctatctcaaaaaaaaaaaaaaaaaagttaaaatggcaacactt

SEQ ID NO: 729747 - DNA, 586 bp, Homo sapiens
gtttgtttttggtctgtttttcaactatttttcttcttataacattggaagagcacaaatcccaaaacggtatttttttgaacgttattgtgttgtccaaggcagagttatcttaagtgaaaaatctctgaagcagtaaagaaaatatactgaaagtgcctcaatgatcagaatgttttcttcttgagaaagttatatagtacttttaaaagtacaggtcagagtatgtctttgcactcaattttgatttttatataaaatcctagatgtttctaccacagctggatctctaaggaagtagttaagaaaagaaaaatgtaagcgcagataacatatagttctttttagtcccataggaagccatagtgtcatgttactgaataaaatattttraggttcacacaattcacatataaatctgtcttaaatataattaatatatttaatatttttcaaaataaacatgacggtattaggtttgccattaagtaatggcaaaacagcaattacttttgcaccaacctaatactttctgatgataaattcagacaataaaaaaggtaaaagattatttaaaatccatttg

SEQ ID NO: 729748 - DNA, 626 bp, Homo sapiens
gaacagcaagaggatcccatctggctgctgcactgaggatctacagatcacagggaaatcagggttgaagcaggggggacagtggggagccctggctggggtccaggtgagagaggtgggtctgggaccagcgagcacagtgggcctcatattgtttaatcctatttatataaaatgccccaaacaggcacatttataggctggggaatattgagagaaatggggcaggtggcagagggggtggataatatttgctaaagaggattctttttggagtgatgaaaatgttctaaaattaactgtgctgataactgcacagtttattaaattcacaattctgtgaataaaaaccattgaattgtacactttacacgggtgaatgatatggtatataagttatatgttcataaaattgttaccaagagaaaaaaaagatagmtggctgtttaaagctaaagtattaacaatgtactacatggtttatgatatacagaagacgtatgaaaaaatagtagagaggttgggaagggaaaatggaagtatacttctgtaaatctcactatatgaaactggcataatattatttgatgatattaaaaatatataacataaatcctaaagtaaca

SEQ ID NO: 729749 - DNA, 630 bp, Homo sapiens
gcagtagtgacagcacatcctagcaagatacacatacatctgtggcatacattgacagatgtaggaaactgacaccccccagcacagcctggagccatttgtgtatgccacatccgcaacagaaaagatgtatgacaaacctgaaacacacacacaggtatgtgcaaaacacgcaaggatcctgtgagacgggatggagatactgacacaccatagcagtctccacagagacttgtgggacggacatatgctagggatacccaaaaatctgatatgtggggccaggcgcggggctcacgcctgtagtcccagcacactgggaggccgaggcggacagatcacaaggtcaggagtttgagaccagcctggccaacatggtgaaaccccgtctctactaaaaatagaaaaattagccragtgtggtggtgcgcacctgtaatcccagctactcaggaagctgaggcaggagaatcacttgaacctgggaggcggaggctacaatgatccgagatcacgccactgcaccccagcctgggcaacagagcaaggctccgtctcaaaaaaaaaaaaaatctgatgtgtgggccacaaacacaattgcactatctttgtggggcaattgtgatgagg

SEQ ID NO: 729750 - DNA, 515 bp, Homo sapiens
tcaggctggtctcaaactcctgacctcatgatccacctgcctcggcctcccaaagtgctgggattacaggcgcgagccaccacacccagcctgtctttatattttcatttaatgtggaccttgttacattttaccgcagattttgtatttttktgtgtgtttgtttgtttgttggtttttgagacagtctacctctgtcgcccaggctgcagtgcagtggcacaatttcagctcactgcaacctccgcctctgtggttcaaacaattcttctgctcagcctcctgaatagctgggactacaggcacgcgccactacgcctggctaatttttgcatttttagtagagatggggtttcaccatattggccaggctggtctcgaactcttgacctcgtgatccgcccacctcggcctccaaaagtgctgggattacaggcatggttttttttttgttcgttttgttttgttttttttttagagacttggtctccttccatttcccaggccagagttca

SEQ ID NO: 729751 - DNA, 619 bp, Homo sapiens
ccatttgtttgaggggagcactgttaactgattgtgagatattacatattaagaataataagtcatactcattacagaaaaagaattatatattagtaagatttaggttattggcttttgggttttttctctttctccctctccactgacttaacacatgaacacttcctatgttkgtttagattatcaagtcttttttttttttttgagacataatctcactctgttgccaggctggagtgcagtggcacaatcttggttcactgcaacctccgcctcccaggttcaagcgattttcctgcctcagccccccaagtagctgggactacaggcacacaccaccgtgcccagctaatttttgtatttttagtaaagacagagtttcaccatgtttaccaggatggtctcaatctcttaacctcatgatccacccaccttggcctcccaaggtgctgagattacaggcgtgagccaccgtgcctggccagattatcaagtcttgagtgacttaacattacaatttcataagtaattggcttgcatttgctcagtccttattaaaatgttagattctatttaatgtaccctgtactgatgaaagaagaatatttcacaggtt

SEQ ID NO: 729752 - DNA, 619 bp, Homo sapiens
ccatttgtttgaggggagcactgttaactgattgtgagatattacatattaagaataataagtcatactcattacagaaaaagaattatatattagtaagatttaggttattggcttttgggttttttctctttctccctctccactgacttaacacatgaacacttcctatgtttgtttagattatcaagtcttttttttttttttgagacataatctcactctgttgccaggctggagtgcagtggcacaatcttggttcactgcaacctccgcctcccaggttcaagcgattttcctgcctcagccccccaagtagctgggactacaggcacacaccacygtgcccagctaatttttgtatttttagtaaagacagagtttcaccatgtttaccaggatggtctcaatctcttaacctcatgatccacccaccttggcctcccaaggtgctgagattacaggcgtgagccaccgtgcctggccagattatcaagtcttgagtgacttaacattacaatttcataagtaattggcttgcatttgctcagtccttattaaaatgttagattctatttaatgtaccctgtactgatgaaagaagaatatttcacaggtt

SEQ ID NO: 729753 - DNA, 506 bp, Homo sapiens
aggatcccccacgcctgaggaagactcagaaacagagcctcatcaggaagaggaagaggaggaagaagaagaagaagaagaggaagaggaagaggaagaggaggaggaggaggaggaagaaaagaagaagaagaagaaacagtttctccactggaggtgggagctgccattatgatgattccgcagttaatggagaagtttaacttggatctatcaacagttacacaggccttcctaaaaaatagtggcgagctggagctagagagctgatggataaatttggtcccaacaagatgacataggtttgtaaaaagatgatggggataacagagaggcattggtcaaaaaatttggtgctcagwatatagctcagaggattagaggattgagtttcgaaagaaataattggcaagataatgagaaaagaaaaaagtcatggcagatgaggtggttaaaaaaaattgtgaccatttaactttagagagttcttgcattggaactggcac

SEQ ID NO: 729754 - DNA, 555 bp, Homo sapiens
agtatgaactactctgatgtaacccgagatcttgaaacccatttataaataagcggtgatatgagtgggtatgagacagtcatatccaccccagctcataacaacattgtttagggcacagccctgggctcttcccttggcatttgtctttttagcagacattcagaagctratttaggggcagctgtcaagagctttgagcttcacagaccatgtgagtgaacttcctctgggtaaccaaaacggagagaaatctggccaaatgtactggccagagagaacttccttaaaggatccttttaaaatacactacatacaattcagaggagcgggtacctcctgggtaccttccactggggtggatattctttccagctcccccttgctgaattcacaccatagccaactggctaatgagccacttgagccacgtccacatgtcagctgtcccagaagcagttaaccttgaaacaattgtgccccgcccccgccacaaaggcaagcatacagtaatgctcacttctagaatccctcttctgggtgaccgagggcctg

SEQ ID NO: 729755 - DNA, 528 bp, Homo sapiens
ccgtcatattgggggttagaatttaaaaatgtaaactttaggccggccacggtggctcatacctgtaatcccagcactttgttggggctgaggcaggcagaatacttgaggttaggagtttgagaccagcctggccaatatggtgaaaccttatctctagaaaaatacaaaatttagccgggcacagtggwgtgtacctgtaatcccagctactcgggaggctgaggcaggaggatcccttgaacctgggaggtggaggttgcagtgagccgagatcatgccactgcactccagtctgggcaacagagggagaccctgtctcaaacaaacaaacaaacaaacaatgtacataaatataaattttgagtagacacaaacatttaattcaatacaaagtccaatatacacataattaaaattggtatatgaacaaataaatttaactagaccttgactttctcatctgcatctctagaagtttacatattcaacttgggtttttagaaaagcatttaaccatctcactaa

SEQ ID NO: 729756 - DNA, 554 bp, Homo sapiens
cagcacaattgggatttatttatgttgctgtattgaaccctagttcatttattttttattgaaaattttattgggataattatagattcacatgtagttgtgagaaataatagagtttccatgtatactttacccagtggtaacattttgcaaaactagggtataatatcataaccaggatattgacattgattgaatctaatcttcttccaaattcccttgttttacttgtactcattggtatctatgtgcatagtgaacygtatacaattttatcatgcatgtaaatgcgtgtcacgatactgaaaagttccatcactccaaggatccctcatgttgtccttttaaaaccacgcccatctccccttcttcaccgcccccatctctaaagtctggctcccctacttttaaaatttttgtcatttcaaaaatgttctataaatggaatcatatagcatggagcctttagtgatcagcttttcttagttggcataattccccggatatttatttgagttattgcatgcatcaaaagtgtagccctttctcttgtt

SEQ ID NO: 729757 - DNA, 654 bp, Homo sapiens
ttcatcttaattaagcaacatgtattctcccaagatgtaaagatattccactttagttccttctaaaagctgtaaggctttgcttttgttacatttagatctttgatccacctggagtttagaatatgatgtgacctaaggatgtactawgaaggcttttctgatttgataatcaataatcctattcatttaatactttttcccactgattttacttttttcctgctgatcttaaatgccgtctttgtcatacaaccagtttccctctctctctctctctctctccccctctttctctctctctctctctctgtgtgtgtatgtgtgtgtgcgcctgtatgtgtgtgagagagaatgtgtgtgtgttatggggttctagactctgttctgttcacttcattagtttattgtctatgcctgtgccaataccacagtttgttaatggatatatgttttgaagaggttttgatatcaagtagaaagagccccagctctgttctatttctaaattatcttcccttctctttgcccattattcctctgtatggttttcagaattggtttaccaaacaccaccacaatcattgtttggattttgatggataaaatttattattgcggggggggagtaaatttgcataacaataatattga

SEQ ID NO: 729758 - DNA, 670 bp, Homo sapiens
aaattaagtaactcgtcaaaggtcacacgacttgaaagtgacagctgagattcatgctcaagctaattccaaggtctacacttttaaccactatgtaattttgcctcttcacatagaccatgagaaaaatgttagtggaaacagaattccatatccagaaatagactatgagaaaaatgttagtgaaaacagaattccatgtccagaaatatactttgaatccaaatgrcagggcaaggtagtagggtaatacggggagaaaaaggaaaaattttaacttttcatccctatgaaatgcgactgagggtcaggtcaataggctgggctctatctctgatatctcaatgctctaaatattgcttttaccaaatcatcccagatgaagtgcaacatgagaaaaagtgatgctgaatccaagttaaaacagtcatgatgggagagggtatggattcgccagaactagagtcaaatcctagtctaagacttaatacccacttgaagattgggggacaagaagtgtatgcccaatttcatttgaggaaataaatgtctgttcctaaaatcaagctagtaaattacaaatggattctatgggtttttttgttttgttttttgtttttgcagttgcaagatttaatagagtgaaaacagagctcccatacaaaggcac

SEQ ID NO: 729759 - DNA, 519 bp, Homo sapiens
attttgatgtctgatcatttgcatggaagagacaatagtgccacgtctgaattgttctcttgtgcttggttaatatgtacttctctagattgttcaaaaagtttcaaatgacattccttactctttggttttcagaggcattcaagcaaaatatcacagtggtcttttgttttctgaccaatctaacaatacctgtgattaaatttaatttgttagtgtaaataaatttcttgccaatgagtattattgttgttagacaacgaatgcaataaaaagaaatactgaggtctgttgaagcaattttttttccctcttccattttcaccttcaactaaaacaagccttgactgggtaaacctgtatcaattgtcaaagcatatatctgtcaatcargagcaaagtgcacatttttcatggaaatgaaactaagtcttaactgtggtaaagtgtaaattggcagctagaaattacatttgaaagcacaattatggaactgggcataaagttaaaagagcaaag

SEQ ID NO: 729760 - DNA, 636 bp, Homo sapiens
tgctcccccatcaccttctgccatgattaaaggtttcctgaggcctccccagcagccaagcagatgccagcatcatgcttcctggaaagcctgcataacgagtttggctcctctttgccatctggtctcccaattatctcctgaggtttctaggacagacttccactgctctagtgcatacttgtagaatgatagaatgttgawtgtggactggcccaggaaatcttctcttctcttctccagttttcaagaggggaatccaagacatcaagaaggaactggttcaaagttattgagatggttctcagtggagacctgactcaccttgaaactcctatagcccctacaccagaacccaacatttaaaactaggtgatatagtctatcttgagatattcctgtccttgtgcagagaagtcaacttgaggagtttaatttatatccctactcaacttccaaggcatttctttgctgatacaaggtctcttttagattttgtatacttccatccccactgacactacaaagaagagtcctttggggtcatcctcatagctgtcacattggcatctgctgaccttaggtttttctttcacaatactctgaattacttcatttacattctttcaatcttaa

SEQ ID NO: 729761 - DNA, 624 bp, Homo sapiens
atagttgctgcccctttaacctggatacaggccctgaaacacagtcatctacccaagcccagccaagaattatgggtgaaaatacctcatatgatgatccatgcaaaggtaccatttgccgttcccaccgtgctcttatraggaaagcagctccctgttttatctgcatgaagttgttgtgacttacgccatatacataaactataacaaaccctgccattttgatcacagcagattggaacagatgttgtagtatattataaaggcagacaatgtaagttgatcattaggaagaactaatccttcaagaaacttggagtaaaactgcccaagagggatgctctgtatcagatgctaacatcaacacaatccattcttcttgttaaggatgaagtcatatgtacacagaagtgagtcaccacagcacgataagcaattgcacgataagcaattgctccatttctccatgtaacttgctcacatgcctatcttggaagtgctgaatattctctttgggtctgacctatgaatgtcaacaaatctctactttctccacatgtcacttgactactgtttagccttttattcttcaacaacagtaactaatctttaaaaacatttacc

SEQ ID NO: 729762 - DNA, 624 bp, Homo sapiens
atagttgctgcccctttaacctggatacaggccctgaaacacagtcatctacccaagcccagccaagaattatgggtgaaaatacctcatatgatgatccatgcaaaggtaccatttgccgttcccaccgtgctcttatgaggaaagcagctccctgttttatctgcatgaagttgttgtgacttacgccatatacataaactataacmaaccctgccattttgatcacagcagattggaacagatgttgtagtatattataaaggcagacaatgtaagttgatcattaggaagaactaatccttcaagaaacttggagtaaaactgcccaagagggatgctctgtatcagatgctaacatcaacacaatccattcttcttgttaaggatgaagtcatatgtacacagaagtgagtcaccacagcacgataagcaattgcacgataagcaattgctccatttctccatgtaacttgctcacatgcctatcttggaagtgctgaatattctctttgggtctgacctatgaatgtcaacaaatctctactttctccacatgtcacttgactactgtttagccttttattcttcaacaacagtaactaatctttaaaaacatttacc

SEQ ID NO: 729763 - DNA, 624 bp, Homo sapiens
atagttgctgcccctttaacctggatacaggccctgaaacacagtcatctacccaagcccagccaagaattatgggtgaaaatacctcatatgatgatccatgcaaaggtaccatttgccgttcccaccgtgctcttatgaggaaagcagctccctgttttatctgcatgaagttgttgtgacttacgccatatacataaactataacaaaccctgccattttgatcacagcagattggaacagatgttgtagtatattataaaggcagacaatgtaagttgatcattaggaagaactaatccttcaagaaacttggagtaaaactgcccaagagggatgctctgtatcagatgctaacatcaacacaatccattcttcttgttaaggatgaagtcatatgtacacagaagtgagtcaccacagcacgataagcaattgcacgataagcarttgctccatttctccatgtaacttgctcacatgcctatcttggaagtgctgaatattctctttgggtctgacctatgaatgtcaacaaatctctactttctccacatgtcacttgactactgtttagccttttattcttcaacaacagtaactaatctttaaaaacatttacc

SEQ ID NO: 729764 - DNA, 573 bp, Homo sapiens
aacaattgaactcatggacatgagagtagaaggatggttaccaaaggctagggaaggtagtgagaaggaggggggaaatgggggtggttaatgagtacaaaaatatagttagaaaaattgaataagacctagtatttgatagcacaacagggggactatagtcaataataactgaattgtacattttaaagtgactaaaagagtatrtaattggattgtttataacacaaaggataaatgtttgaggggatagatacccaaatttccatgatgtgattattacacattgcacgtctgtacaaaactatctcatgtacctcataaatatatatacccactatgtacctacaaaaattaaaaatgaaaaaattttaattttctaagcagtatttcattgcatgaatataccacaatttttatgcatccttctgttgaagacatttgtgttttcagctttgagcttctatggataaagctacataactattcttatccaagtctctttatgaagatatatctaaagttctgtccactgagaggacctcagaatagccacattccaatagtaacggc

SEQ ID NO: 729765 - DNA, 618 bp, Homo sapiens
gtgtgcctgtagttccagctactctggaggctgcagtggtaggatcacttgagcccagcaggttgaggctgcagtgagcagtcgttgtgccactgctgggtaacagagcgagacactgtctcaaaaaaaaaaaaaaagaaacttatcaaattgtatactttaaatgtttgcyattatacctcaattaagctgtttaaaaaataaacaaatagagtaacatcacagaaagtgatggagtacagaactccaaaaatctatccttccactaacgcaacaattaagctggataaaaaccagtcaaaaccaactttttttgagctctagaatctaatcaaaaatttacaaaacccaggggaatgcttagtgaaggaaggcatggtaaattttggtaagagagtgttatggcattttaatttacctgccttaccacccccaactccctaattcgatgacaactttggggacagcagtctgcattcctgttgcaggttgttagtgccacagggatcaatatggaccttattctcaaataattgcagctacgtgttttggtgtgtctggtccttccctgcaggatcaacataggggcttgcttttatttcatccacttggaatttt

SEQ ID NO: 729766 - DNA, 458 bp, Homo sapiens
aaaccttattttctaatgagatacaaacggacagctattgagggtggttctgggaaaggttttctttctgaacacaaggggagactgtgtcagctgtcatggtccctggcctttttttgtcttgaatgtagacttgacatatgaagctgcgctagccatcttacagtcatgaagacaaaagccagtacactaaaaatcatggatcaaaagaagagaaataactgagtcttttgatcatattaccaacccaasattgtctgcctttgaattgctcatcatgtgagaaaaataaattcctatttgttccagcaactgtaagttgagtttcatgttatttactgttgaatatattcccaattgacatcacctccatggtataaacctcaccccaaaccccataatgttttgctataatagcctgataatcccaaggaaaaaatagtgtacctgtcagaaaa

SEQ ID NO: 729767 - DNA, 624 bp, Homo sapiens
ggcttatcactgttctgacctctattatcctgaagagttctgcctgtttttgaacttcatataagtagtaccatatagtaggtatttgtgtctggcttcttaccttcaacattataagattcatccatgctgttctatgtatcagaggtttattcttttccattgctgcatagtattctatggcatgaatctactacactttatttgcccattctgctgttcgtggacatttaggctgttttcaatttttgtattatggtaaatgaagttgctgtgagtattttgtgcatgtcttgtggtggacgtgagcactcattttagttgggtgtggattgcctgggtcatagggtaaatgtctgtttactctataagaaactatcaagaagttctccacagtggtcataccaattgacattctcacatcccmcctgcagtgtaagagagttccagtagctacacattcttgccaacatttggtattgcccccaccccacctgtcttttaatttttgctatttggttggtgtgtagttgactgtgaactattaagaatatcgatgtttgagccctaccccagccaattgcctcataatttctgaaggtgggtccagacatacgtatcatt

SEQ ID NO: 729768 - DNA, 513 bp, Homo sapiens
ttttttggagtcttttttcaggcttcagagtcttctggtgaaatctttaaagtattctaggtagacaattctatcatcagtaaagataacttgactttgttttctgtttggattccttttatttctctggctaggacttygtaacttcaataggactgtttagaatggatattcttgtcttatttttattcttatggagaatgctttcagtttctgcttttttagtatgatgttggctaaggatttgtcatagatgactcattattttggggtatgtttcatcaatgtctagtgtattgacaatatttttatgagtcaatattggattttcttgaatgccttttctgccccattgtgttaaatattttttattttatatttacatggtgatcatacttattgacttgcatatgatgaaacatctttgcatttatggaataaagttcacatcattgtagcaaaataactttctgatttgcttttgaattcagtttgctagtatttcatggagga

SEQ ID NO: 729769 - DNA, 620 bp, Homo sapiens
tttttggagtcttttttcaggcttcagagtcttctggtgaaatctttaaagtattctaggtagacaattctatcatcagtaaagataacttgactttgttttctgtttggattccttttatttctctggctaggacttcgtaacttcaataggactgtttagaatggatattcttgtcttatttttattcttatggagaatgctttcagtttctgcttttttagtatgatgttggctaaggatttgtcatagatgactcattattttggggtatgtttcatcaatgtctagtgtrttgacaatatttttatgagtcaatattggattttcttgaatgccttttctgccccattgtgttaaatattttttattttatatttacatggtgatcatacttattgacttgcatatgatgaaacatctttgcatttatggaataaagttcacatcattgtagcaaaataactttctgatttgcttttgaattcagtttgctagtatttcatggaggattattgttccaatattcacccagaatattgaactgtagtttctgtttttgttgtgtcttcactagattttagtttcatgtatttcactgatttcatataattagttag

SEQ ID NO: 729770 - DNA, 601 bp, Homo sapiens
gcaacacagtgagatcccatctctacaaaaaataaaaaattgccgggcatagtggtgcacggctatagtccccagctacttgggaagctgaggtgggaggatcaattgagccctggagtttgaggctgcagtgcagtgaaccatgatcacastactgcactccagcctgggtgagagtaagactttatctcaaaaaaaaaaaaaaaagaaaaaaaaaatctacttctcttggttaccagtgcagtgtactttgaataataaaacaaactatcacaagttataatcttttttctaagttttgttaaaaaaggaaaactttctccataatttatagggtgaatcaaatgaatctttatataatatttgtgtttcaaatgtacatctttaaaacttggtaaatatgttaatgtactgagaatttttataacataaaaaactctctgatgtatctaatttacatgttttaatgtatatatttttgtgaataaaggatatactgttttaattcaggtatttgcctagtgtttcttgagaacttctatgagaaagcacaaaacatatgaaatagaacataagttttgctagccatttcatgcagtca

SEQ ID NO: 729771 - DNA, 485 bp, Homo sapiens
tgaaaaggtatagatatagtgtgagaataaaaaaataacttgtagattttccctctatccagcattagttggaaatgcaacatgagtgcctttacagttcctaagcaatatgagtgatatatttgaagcaactcagaatatgtggaaggcaacaataaattgccagaataattaaggcagtgtggaattcaagtgtgtcaatgcctacaaacttgctatacaatagaccagcacagccagtgaagcaggttggtgtatgatggagaatgacacttgactatggaagattaaaagaacagtgttytcagtagctttagtagtccttgatatggtgctatttcactaacacaaggtaaaggtaactagtattctgtagttgaatttggcagatgggttattcttaatatgtcagcaaagagagccaacaacattttcaatcatgttaaacagttatcaatatgcatttattgtactaacaacctcaa

SEQ ID NO: 729772 - DNA, 505 bp, Homo sapiens
tagtatttaaacaggtctcaaagatagtttgctggctgttctttcaccactcaaaaaaaaccccactgagaatatttatagaagtggtagcaatttacaccaaaatcttcaaaaccctcagtaatttttaggacctcttaccatcacagatagaaccttctaacattgaaacacattgcacgggacgaatgctaggattcagtaagtagaaactgccctatggagtggaaaacgcattgaaaaaggagtcaggagaaatggtcctagttttgcgtrtttcaccttaagtaggaaccactcagcaagtcataacctctttctctgtatcagtttcattataaaatagacgtgcaggactacatgatttctatctccctgggtctagaatcatttgattcaaccatggtaggtaatcagttacctaaaaataatctaagcttaaaactgtaaattaaagagaattttaaacacaaatctagaggcaacgggaaggaatgctaaggag

SEQ ID NO: 729773 - DNA, 484 bp, Homo sapiens
ctgctgcagctgtcattacaccagcttgtacgtgaagcccagagtctcccagaccagcacattactgtagcttgccaaaggcccatggctgctattgtgtgactgccaccaatgtttattcaaggccagaggccattttaaccagcacctagtggtgagtcctgctaracttggtccatcctaccagggaagtagatttctttctggctcacaatgggtctagaagcaatgacctagtaataatgacctggaactaggggctttgggattctccctggtgctttattttaacgtggttgggctgatattcagttggaggacaaagtcctctgtattcttcactctttcatccaaattgaaggagtctctgtctacagtgcactgtctggcattgggggaggggtggcataggctctcccatggccactgcagctagtgtcatgctgggttgtaccctgagcccacagcctctgagagcagtgtg

SEQ ID NO: 729774 - DNA, 484 bp, Homo sapiens
ctgctgcagctgtcattacaccagcttgtacgtgaagcccagagtctcccagaccagcacattactgtagcttgccaaaggcccatggctgctattgtgtgactgccaccaatgtttattcaaggccagaggccattttaaccagcacctagtggtgagtcctgctaaacttggtccatcctaccagggaagtagatttctttctggctcacaatgggtctagaagcaatgacctagtaataatgacctggaactaggggctttgggattctccmtggtgctttattttaacgtggttgggctgatattcagttggaggacaaagtcctctgtattcttcactctttcatccaaattgaaggagtctctgtctacagtgcactgtctggcattgggggaggggtggcataggctctcccatggccactgcagctagtgtcatgctgggttgtaccctgagcccacagcctctgagagcagtgtg

SEQ ID NO: 729775 - DNA, 584 bp, Homo sapiens
tgacatgtggatttttgttgcacagaaaggccttttctcagttgttgtttatggatgaaccaagtgaatctcttggggagacttaagtaattctgccttggagtgctcacctattaaggcagaaagagtatgtgttccatgttcttccttgattgagtgtaaagtatggttgtagtatgctttagtgtagcacggaatcacagaggatgaagtgagaattagttagcaagaatccattttccactacagtggtttgcttagaaacttgattatagcagattgataaaaaggagtaatttactgttttagtaaatgaatactgatcatgtcatcatcatttataattttaatattatattactgtaccacttattacaattgtaattatttgtttratgcttaagtttctccattatactgtcacctttataatgggatgatatatttctgctttagttgaaaatgtatttcgtgggcctacttcaggtctgtggaacctactactaggttcacagtaaatatatgatgttgtaagttttcatttctgaagcaagtgtactatgttggctaacataaaattaaat

SEQ ID NO: 729776 - DNA, 600 bp, Homo sapiens
accaatctgtcccttactttggagaaccaatgtctcagtgcccatgaccactggacccctttaaagaagaggcagttccctgaatcttcaaaactttcattttccagtctctgtagcatgtgtgtttcatcacatcttccagggttctagccaacagttgctcaccatacccaatcattttatgttgaaataatcagtgtgatattacatgggatgttcagatggcccagctctcttgagattagattatgatgaaatgtaggagagttagcctagtcctgaaccaaaacagtatgtgtgtattgttrtctgttgcatgtgaatttggttcctggtcctcttttctgactggataggaaagaacaaaatttgcaaaatcaatgcctacatttcaaatacctgaatcaaaattaatccgttctagtggaacttcacacctggcaagacagctatgataaggatgctatttgaactcgagatagcctacagacattctcgaggatccgtctagctattgtgggggctgtattggtgaattaaatggtatattgtatgaaccaccacttatacatttgataaacttttaaaagtggcactagt

SEQ ID NO: 729777 - DNA, 619 bp, Homo sapiens
tcacgagaacagcatgggaaagacctgctcccataattcaatcatctcccaccgggtcctttccacaacacgtgggaattatgggagctacaagatgagatttgggtggggacacagagccaaaccatatcaataactactcaaggggtcctaaatccctgagctgtttaatcccttcatttagcatccaccacagcaactcaggcacttcaatctcactcacccggggtcatgactttttccaggcttctaatagamatccaagcaacaaatttgtattaatatcatctccttttttgtgtgaggatgttcaatcctatatttagtgagggtgtctccaagtcaataaattcctccttattcagtttacagtcacacctctttgagtacattcaggatccagtttcacaagcacttcctgggctcctctgtatttgtctgctgcatgccttatctcctttgtgggtatagtttatgtcctccttcattagccccccacacttcttagatgcattaaccttggctatgggtctgatggccaggtgaggagactggggaagctcctgagaaaatatgttgttttgtgtggaaggatgggagaaatttctgtatagtcttt

SEQ ID NO: 729778 - DNA, 624 bp, Homo sapiens
gttttaatgtatgcatagatttttgttacccttatctcacctggatacagaacaattgcaacatgccaaagaactccctcatgtggacgcttttaagcagaccctttcccctactcttaactactggcaacaactgatttattctctgttccagtctttttgtttgtttgtttgtttgtgttcttctggaatatcgtattatggaatcatatggtatgtaaccttttgggacttacttcttttatgcaggaaaatgcctttgaggttcaggctgtgttctagaattcattcatttttattattgagtagaatgcctttacatagatgtacccatttactcattaaccaactaaagcatatttggggtatttccagttrggggcaattataaatagtgctgatttaaacattcatctacatgtagaaattaaaaacatgttctgaatttctaaacagaaattaactgttctggaaagaacagttaaaagaatgcaaagataagttgcagactaggaaaaatacttgcaaatcatcatgtatccagaatatagaaagttgattcttgaattatagtagaaagtgtttgcctgaaacaaaaaagagaatgttagggaaaccgaatgg

SEQ ID NO: 729779 - DNA, 518 bp, Homo sapiens
ccacccgggaggggccggtaacccctgggctatcttctagacggggcgaaccaggggtcattgacctgccccctgcacagggcagggaccgagtgagccactccttgtcccgagctcccgcccccactgggccctccttcctcctggtgctaatttggggaccccaggggccgcccccggcctcttytccatcctgcttggaccagggtcctgggtcttcccaaccataccccgagatcaggccccacctgccagctctactgggcttggagcacgtccgggcagtggagggagggacacagcctgggacaggaagcctcttgggttggagcaggagaccctcatttgccacccagaccaatgtgagcctgcccccagccccctctcattggaagtggcaaggggcttccctcctgggggcagctacactcgtccccagaggcacattcgtgcacattctcacagacaccgtctcacacgttggctttggacaaccaggccccaacttggtccctgcc

SEQ ID NO: 729780 - DNA, 518 bp, Homo sapiens
ccacccgggaggggccggtaacccctgggctatcttctagacggggcgaaccaggggtcattgacctgccccctgcacagggcagggaccgagtgagccactccttgtcccgagctcccgcccccactgggccctccttcctcctggtgctaatttggggaccccaggggccgcccccggcctcttctccatcctgcttggaccagggtcctgggtcttcccaaccataccccgagatcaggccccacctgccagctytactgggcttggagcacgtccgggcagtggagggagggacacagcctgggacaggaagcctcttgggttggagcaggagaccctcatttgccacccagaccaatgtgagcctgcccccagccccctctcattggaagtggcaaggggcttccctcctgggggcagctacactcgtccccagaggcacattcgtgcacattctcacagacaccgtctcacacgttggctttggacaaccaggccccaacttggtccctgcc

SEQ ID NO: 729781 - DNA, 593 bp, Homo sapiens
aaagtcattgaaacatagtatttagttccaaaatataaggattatttaggtgaatagctaaatcataaaataatatatcatcatttgctttaataccttactgacagcagctgctaacctttcccatagatgcagttgtattcattaaccaaaaatcttaccctcattgtagcaagattaaagaggaatgagtcagggcctgtaattaactcactttctcatgctgtgtctttaaaagaagataytctgtgctggttatatactccctgtgtgagccacgaggcccataaaatatccacatatgactgactgcatgttatttagctttcttggaatataacagttttagctgtggcagatcctagaacattgaagcctatgaaacactgtatgatagctttggtcttgaggtactcattaagaaagaataaataacgtaaattccaaagagaactatttacaagttaatctctgttcccagatccagtcattctccctagcaatcatttattatagaatgcttctcccctctcccttaacctggtttaccaggatccaagcccccattctttctgtaacctcaagatggtaga

SEQ ID NO: 729782 - DNA, 549 bp, Homo sapiens
acagtagtccagttgcctgaaactacggatctgtaagcaattccccctttccacagccactcttcaaatgaaccccttatgacatgtcctgaaggtaactgagtgttgccaagtggacagtatgctgggatggttttccttcagataaatgattgtttcattttagaggttttagtgacatgatgtttgattctcccagttgtgtatttccaattttgtccagttacatagacaaatatgggcagatgtcattggccatacctgatagttttttggtccctcacatgtccagagttccttcaatacatgggacccaggcactgttgtagacactttatcacccttggcatcaaaacaaccaaagctttaactcmtagtgcacgggctgcttctatatttaggttctgtctagagcactgatgtacattccacaattggggaaatacgcagaaagcattctggaaaatggcagcagcagtggcaggaaacttgccaaacttcagagaattgcacgccaggccgttgccgcactgtgtgcacttggaggct

SEQ ID NO: 729783 - DNA, 600 bp, Homo sapiens
ccaaagcagacctatttggttcatcataagttctgctgaggctgttccaaaggccagcctgtgtgcccttggcatgagggctgtgtctgatccccagtgaatgccaggtgatgagtctgccctcagcactatccaggactcaggggccctttctgtcttcccctggcatctcagcctccagcctgccscctcgatctcccagcaactaagatgggaacaagaagtgaggcaggcaggggacacccctcaaagctcacttgcagatagcaatctaggctcagtcagcatcctgggtagctgccctccagctcacaactgtggggtcccacccagccagggtatgtgtgcactacatcgctactggtccatatgagcgcctggggtccacagcccatcccaagaacttagatgccctgaaatatacctggaaagcatcaaatgtggtggcagaagctttgccctgatgatctaacaagtttctctacaggctgtgccctaaggtaccctgcgggggtgggccagagtagtcagacaggtcaggctctgggaacccctggatccaagcagccccatttgatatatttcgtagacctgggcctc

SEQ ID NO: 729784 - DNA, 561 bp, Homo sapiens
ctggcccttcacgattattccacggagagtccattttatggctttggaaactgaggcccccaagatgctcagagatgttcgactccatcactccatatttactgagctctttttctggagatcagtgaggttgagrcacaacagagtgtttattttctttctttctttctttctttttttttgagacggagtttcgctcttgtcgcccaagctggagtgcaatggctcgatctctgctcattgcaacctccagctcctgggttcaagcaattctcctgcctcagcctcccaagtagctgggattacaagcgtccgccaccacgcccagctaagttttgtatttttagtacagatggggtttcaccacgttggccaggctggtctccaactctcgatctcaggtgatctgcccccctggtcctcccaaagtgctggaattacgggcatgagccatcgcggccggccgagtccttattttcaaggtcgtacagggaagggcatcaggatagtccaggctgccttagcctccagccaggataaaggggagtttggggatgaaca

SEQ ID NO: 729785 - DNA, 647 bp, Homo sapiens
catttcccctctctgggcctcagtttgcccatctgtaaaatggagcagtaatagtaactgcccccatcccccaaaaatatatgccatcgataacacacaggagaaagtgtctgcacactgtagagagctgtgcccaccagaggagccagctccaccccctctcctaatccacagggcagggactgaagaggctattcccagggcccagcccagatggggcttaaactccagtcagacaggagccaatttccctggctcattatcccaaaccaaattaggggcagcccaggctgtgccactcgtggcttaattgggactcacagacaccccgccccgtgccttctttctttcccacacccctgtccccagccaggccgtgccttaggggagccagaggctgcctgggccttgccacctgggccctcgcagaygccccagtgtaatcaattagacccaggccaggccggctcgggatgggggcgccgctgggcagctgggcccagcatcgatcccggcccctctcgacccccagggaggggaggcagccaagagagccgtgcagatggcggtctccacggccctctgcccccaccccccaccccagagctgcctgtgggtgtactcagcccggacagagaacggtgcac

SEQ ID NO: 729786 - DNA, 577 bp, Homo sapiens
ggtgaaaacttgagagatatcccacttcagggttcctgcaagaaaagtccccagggcaagggttcttctctgggaaagcccagaattaagaactggaagggtgagttgtcatcaaagaaaatgggggtaggggaagtgttaaragggctgggagggtgattgaagagtttatgggtgttgagtgactggatacttcataactcagctttattttgcttccgggagaattgagttctttatttttttcgatattgctgtttgtgtgtttttctgttgccgctctaacaaattaccacaagtttagcatcttaaaacaacacacctttagccaggtgtggtggctcacgcctgtaatcccagcactttgggagactgaggcaggcggatcacgaggtcaagagactgagacccatcctggccaacacggtgaaaccctatctctactaaaaatccaaaaattagctgggtgtgatggcgcacacctgtagtcccagctactcaagagtctgaggcaggagaattgcttgaacccgggaggcggaggttgcagtgagccgagatcgcaccactgctatcc

SEQ ID NO: 729787 - DNA, 577 bp, Homo sapiens
ggtgaaaacttgagagatatcccacttcagggttcctgcaagaaaagtccccagggcaagggttcttctctgggaaagcccagaattaagaactggaagggtgagttgtcatcaaagaaaatgggggtaggggaagtgttaagagggctgggagggtgattgaaragtttatgggtgttgagtgactggatacttcataactcagctttattttgcttccgggagaattgagttctttatttttttcgatattgctgtttgtgtgtttttctgttgccgctctaacaaattaccacaagtttagcatcttaaaacaacacacctttagccaggtgtggtggctcacgcctgtaatcccagcactttgggagactgaggcaggcggatcacgaggtcaagagactgagacccatcctggccaacacggtgaaaccctatctctactaaaaatccaaaaattagctgggtgtgatggcgcacacctgtagtcccagctactcaagagtctgaggcaggagaattgcttgaacccgggaggcggaggttgcagtgagccgagatcgcaccactgctatcc

SEQ ID NO: 729788 - DNA, 662 bp, Homo sapiens
agactagaagcagtgtgggtggcgtgggggtagaccaagagtgtccaggatccaccgtacggcccgtcagcagatgccaagcactctctgtggctgccaatgccacccctggccaccatcctcttcctctagagagctgagtgggtttctacctccgacagccagtccccactacccagaggaccagctgcaggagctcggagcccgcagatggagcctcctgcccctggggagtttatggccccggctgtcagaccaccatgcacaacacacaacaccccacgggcagcctccagccagcgtgtggggcacaggtcctgggagaccaggcagacccagcccagcaccctccacacgcacctgggctgtcccactgcgccaggttggggaagtgctcccgctgccgcaggcctccaggscgcccaggtccggtgggtggcagtgcctgcgcatgaccatgacccgccggccctgggtgatggcgcggctgcggcagcccatgcgggcctggtcccggcaggtccaatacaccttctccccggccgccttctcccgccggtagaggaaggactcgtacaccaggaagctgccccccaggggcgtcttcaggaactcggggcctcctgttgagaaatgggaggggaggagcagcggacaccagc

SEQ ID NO: 729789 - DNA, 567 bp, Homo sapiens
ttcaaatgttgaaatttaatcaataagccttgattgtgagtcgatttggtttcacttacctttaatgctataaagtgactcaaatcttttggctatagtggaacaatccacataattggctgctgatatggaaattagaaggtgaattagccaggtatagccatacaaactggattagagaataaaatgattgaaagattggcttgagaacacagcaatrcagccaaagttatcattcatatgcaacagattggatctgtaatctggaactacaagttggtggtttggctgctagaagaagctcacaagatgtaagaatgctcatttaacccttcctttcacaactcaggaagctagtatttacagtctaggcaaaaaaaataagaatatgatgaacagatagcctgaactctgattccatgtgaacaaccccagctgaactggaagctctgcagccatatctaccgaaaagttaaaagccatcctcttgaatgacattaggtagaccttttaatattttattttatcctagaaattaataaaaataaaattcatatgtattagggt

SEQ ID NO: 729790 - DNA, 567 bp, Homo sapiens
ttcaaatgttgaaatttaatcaataagccttgattgtgagtcgatttggtttcacttacctttaatgctataaagtgactcaaatcttttggctatagtggaacaatccacataattggctgctgatatggaaattagaaggtgaattagccaggtatagccatacaaactggattagagaataaaatgattgaaagattggcttgagaacacagcaatacagccaaagttatcattcatatgcarcagattggatctgtaatctggaactacaagttggtggtttggctgctagaagaagctcacaagatgtaagaatgctcatttaacccttcctttcacaactcaggaagctagtatttacagtctaggcaaaaaaaataagaatatgatgaacagatagcctgaactctgattccatgtgaacaaccccagctgaactggaagctctgcagccatatctaccgaaaagttaaaagccatcctcttgaatgacattaggtagaccttttaatattttattttatcctagaaattaataaaaataaaattcatatgtattagggt

SEQ ID NO: 729791 - DNA, 567 bp, Homo sapiens
ttcaaatgttgaaatttaatcaataagccttgattgtgagtcgatttggtttcacttacctttaatgctataaagtgactcaaatcttttggctatagtggaacaatccacataattggctgctgatatggaaattagaaggtgaattagccaggtatagccatacaaactggattagagaataaaatgattgaaagattggcttgagaacacagcaatacagccaaagttatcattcatatgcaacagattggatctgtaatctggaactacaagttggtggtttggctgctagaagaagctcacaagatgtaagaatgctcatttaacccttcctttcacaactcaggaagctagtatttayagtctaggcaaaaaaaataagaatatgatgaacagatagcctgaactctgattccatgtgaacaaccccagctgaactggaagctctgcagccatatctaccgaaaagttaaaagccatcctcttgaatgacattaggtagaccttttaatattttattttatcctagaaattaataaaaataaaattcatatgtattagggt

SEQ ID NO: 729792 - DNA, 395 bp, Homo sapiens
tgggtccttactctcatagggctcacagcctagccaggaatttgaacaaggaaaaacacaacaggacatcgaatgaggttttgcctactgtttaggaattttggttgatgccagagaaaaataggagataattatcctgagagtctaaagaaaattgcttgggttttacacatgtaagtaagcacataatatatggtataygaaatcctgtacttcaaagtcaactaatagactcaaatgtctcagaatggcctaaatttttcagaatgtttatacagcttggctttcaaggaataaaatttttatcaagatatttctatctaaataagtcaaatattcaaactagctatacatgtctaggtacagcattatcggtttagctaagtttctgccaa

SEQ ID NO: 729793 - DNA, 641 bp, Homo sapiens
gccctttaggatataagcaggtgttctgtaagataaattggagaacttccctttctagtgacttgttttttggcccaagtatttaagatgctccatatgctggacaaaaatcgtcttccaaaagaaaaaaaaaaaccataaaagttactttttggacattcaaggaggtgaaagaaaaatccagactgctttgaaggagscttcctgcactgcctgcagtgcagaagggtataaacacaaccccagatgccagatgttttagcatagcaatgtgaagaaatactctcctttctttatttacactttacagcaaatattttacaaagagaaagcaaagaatgttgatgttccaccagtaaagcttcaagcataacaaggtcccaaaggccaaaatattagccttccctaaagtgtcctttagtgtgtagtgataaacatcaggcattctattttctagtattcagaaacgatgattattaggaagaaagaaaagcttgcaacactgatcaatttctctttttttcaatgttgccaggatgtaattacagttgtcatcattgttttgtgtgtgtgttttattttaaccaggggaaagaatttgtaagtttacatacacacaaacacacacacacacacacaca

SEQ ID NO: 729794 - DNA, 641 bp, Homo sapiens
gccctttaggatataagcaggtgttctgtaagataaattggagaacttccctttctagtgacttgttttttggcccaagtatttaagatgctccatatgctggacaaaaatcgtcttccaaaagaaaaaaaaaaaccataaaagttactttttggacattcaaggaggtgaaagaaaaatccagactgctttgaaggaggcttcctgcactgcctgcagtgcagaagggtataaacacaaccccagatgccagatgttttagcatagcaatgtgaagaaatactctcctttctttatttacactttacagcaaatattttacaaagagaaagcaaagaatgttgatgttccaccagtaaagcttcaagcataacaaggtcccaaaggccaaaatattagccttccctaaagtgtcctttagtgtgtagtgataaacatcaggcattctattttctastattcagaaacgatgattattaggaagaaagaaaagcttgcaacactgatcaatttctctttttttcaatgttgccaggatgtaattacagttgtcatcattgttttgtgtgtgtgttttattttaaccaggggaaagaatttgtaagtttacatacacacaaacacacacacacacacacaca

SEQ ID NO: 729795 - DNA, 455 bp, Homo sapiens
gcttcaaaggagtcagaaacgcggcagtcaactaggagaaaggaatacaggtcgcacaatgcagcccagtctccacgggcctcgttcattgatgcttgctgtcccagccattcctgtggtccgagtcgggtgaatctcacctccctcctcttctgtcagtcctgcaggccagcacccaggagagtgctttccaacccccacaggcttagtcatggaaaaaggtgagacttctctgagggaggggcacttaagcagagttagggatgagccggctttagccaggagcaggggctgcagggtggggtgagtgcrggcaagggacagcaggtggaaggccccgaggtcactgaagagagggctcccaggaggggagcacgggccgaggggacccagccagagcattgcaggcgcccgtgacagaggcagctggcgcgaatcgggtgggatggtggcag

SEQ ID NO: 729796 - DNA, 601 bp, Homo sapiens
acctatcctaaaatttatatggaatcttataggatctgaataatcaaaataatcttgaaaaggaagaagaaagtatgagttatcccactttctgctatcaaaacttatttacaaagctctagtattcaaaacagagtggcataaagatagataaataaaccaagagggtagaagagagggaccagaaataatctctcatatatgttatcaagggtgccaagagcattcaatcsggtaaacgacagtgtttttcaacaaatggtcgtagtggtgggggtactggatatccacgtacaaaagaataaaatttgattcttgccttataccatatgcaaaaattaaataaaaatggatccaagttctaaatgtaagacctagaactaaaaatcttttaaaagaaaacaggagaaaagcattatgacattggatttggcaatgatttcttgaataggacacccaaagcacagacaacaaaagaaaaaaaatagataaaaaaactacatcaaaattaaaaactgtgcatcaaaggaacattcaacagggtgcaaaggtgcaaaagcaacacacagaatgggtgaaaatatttgcaaatcacatatcc

SEQ ID NO: 729797 - DNA, 614 bp, Homo sapiens
gaaagccaagaatgtgaccctaatatcctagttcccaagcctcagttcttttacacgatactctccatggcaagttggaaaagtaatgcttctagaagaaattttgatataaaataatatattcgtggctactaaagaccaaaaccagatatttaaaaaatttcttctgtaattggtacataacagtactttttacattcattcacattactaagtacaactatttttcaaacgtttcttcaaccaggacataacagaaatgccaacaagacwtgtaatccagtcgactctgtaaggatgcccataagcttgagagtagtgcctgacacataagaggatgcttaataagtgataataaataaatgaagatttttaaagcatacattgaaatttgtataatctgccaaaatatcagaaaagtttgaatattttacttttttggtcattattatggtttttacacttgtgcaagagaaattttgttttcatggaggaatctaaatttttaataagtattactgcagaaaattaatatatgatttaattcgtattgtgcctttgacatgagcaaaatgatgatgaagcctgttatccataacttcttagtgttgata

SEQ ID NO: 729798 - DNA, 579 bp, Homo sapiens
agtaatatgtgcccctagtaaaaaagttataaaaggatattaggtgaaaagtaaaagatagtcttccatttctcatctctaaccttccagagtatattttacctgcaactttttttaactgcatatatacaatacatatgtatatacaaacattcacttgtatgtatgtgcatatttacctttacaagcttaatcagaacaggattatgagaggaagagtctgggttaagtaaatcaatataaaaggagtaaatgaccaatatgaatcggggtcagattatagaaagctaatggatttcagacttagttcaatagacagaagagtggaagactatgttatattttaggatgagttgtcctgataactctgtgtgggtcccgtggtaattaccaagatattagaacagatttmctttttttttcttctttcccccttgccccactccacgttttattttcttgaggagcatcttggttggagagatgacaagcacatgtaatggtaaggcagagaaaaaaacaagacctgtaggagctctgaggataaagaaagagaatttctatctgaggtagccagag

SEQ ID NO: 729799 - DNA, 611 bp, Homo sapiens
gactctttctcactctaacgtgtttctgaaagtattagcaactcagaattatatttttagaaccatgatcagtagacattaaaatatataacaaatgccctatattaataatttctgcatacttaaataattatgactatatgatggtgttgtatgcatttgaatatgtcctggtcatattaaaatgtaaaatatatagttttattagtctaaatagaataaaactaccagctagaactgtagaaacacattgatatgagtttaatgtataatgcattacacttccaaaacatttttttccagttacataattaagttatatcctttataaaactcctcagtaatcatataarcttcatctactttttgaaaattttatcttaatatgtggtggtttgttgcctagaaaacaaacaaaaaactctttggagaagggaactcatgtaaataccacaaaacaaagcctaactttgtggaccaaaattgttttaataattattttttaattgatgaattaaaaagtatatatatttattgtgtacaatatgatgttttgaagtatgtatacattgcagaatggacaatggaccaaatttttataccttgtcttg

SEQ ID NO: 729800 - DNA, 552 bp, Homo sapiens
atgcccatcaatgatagactggataaagaacatgcggtacatatacatcatggaataaaaaagaaatgagatcatgccctttggagggacatagatggagctggaagccattatccttactaacgcaggaacagaaaaccaaataccgtgtgttctcactttcaagggggagctaaatgataagaacacgtggacacatagagagaaacaatgcacactggggcctaccgragggtgaagtgtgggagaagggagaggatcaggaaaaataactaatggatactaggcttaatacctgggtgataaaataatctgtacaataaacacccatgacacacatctacctatgtaacaaaactgcacatgtacctctgaacttaaaagttaaaaaaagaaaaatgttgtttaaaaagtcacattaatcaatcttttaaactgcaactgggtttccccatactcacattataagtaaaatcagatacattttcttccaagacttacatgttttcagctttttactattagagctctgttcatttgaagtgtttggtg

SEQ ID NO: 729801 - DNA, 611 bp, Homo sapiens
aggttcccctggccacatgtgagccatcgtcctgctttgctttcctcagttctccatgggtggagttgtttccttgattagtaccagtgtgagtacctggatgtttctgttgaaagtgctgtagttactcacccctttgcttcctctccatgagaaccatgcacctaagctgcttctagtcagccatcttggcccttccccactttgtaagaatgccagataacacatatgaataattttagaggcttcagatggtgttggcttcacccaatgtttattcactttatcttctgaaggacaggaggcttgattaagtatattgagtcacaaagttatcagacaaaaggctagtttgaagttttcaacagggatagccttcctgtgtttgacctcactcctatgaccctccaggacttccaatgtaaatggtcaggtacattctaaggtccctaatatttgcaagatcctgaayctcaatttttgtttcctcaataccaggaagtggttttaagtgccatttttaaaagattctttctgtgtgccttcttaatttcttactttgaggagtttaagaatttggcacatacttggagagaaaaattctctgaatc

SEQ ID NO: 729802 - DNA, 627 bp, Homo sapiens
taccacagaggtatccaatagcgtctgctgagatgatgctgaatgaaggtacttgctaaacaactctaagtttttgaatgaaagtgcagtgatttttattagaaatcacttttcttattttatttttaggattctgaatagaatattcaaaaagagaatgtttaataactgtgcctatatttgagtcattttctctagaagacttactggctaaatttccctaattttctaactgtcacagttcttaagatctcaggataatattctcttacaccctctaactttctaactttgataacacacatttcccaaaaagagaaatgttaaataaaatcagggtcattgtctgtgcttgatcagatctgacaacccctttaacttccagcaccatggaagaagcttccmaatcattcttgaatatggtttactatttaatttttgaaaatttcattttgaatctatatttttaaagttattgcattttttttcagatgaatgctacagtgcaaagaatacagtttgagaaattttaaaacctgggttctactccagaatctattgggttaccttgacctctcttccctcaggtctctcttttgtgaaatgagaagattagactaagtttct

SEQ ID NO: 729803 - DNA, 400 bp, Homo sapiens
gatgcatccttaccatagaccttagcaactttggcatatgaattttttccttctttattaagttgagaattttcaccttctcacttaaaggaagcactttacagcttctctttggcacatccaaattgccagcatcactactcctgtcctttgcggccattgttaagtaaaatacgggtgacttgaacacaagcactgcattacctgacagacagttgatctgatcatggagaggkctgctaagtgactaatgggtgatcatcgtagatagcatggatccgctggacaaaggaatggttcatgtcccaggcaggatgagatttcatcacgctactcagaacggcacgcaatttaaaacttatgaattgtttattcctggaattttccatttaatattttt

SEQ ID NO: 729804 - DNA, 611 bp, Homo sapiens
cccaaaatgaataccatagattctgtatcagcgggtatgtgttttaaagcaggttgtccatagcatggccaagtttttgctcttgttctatcaggttatttaaaaacaagactttactatctattcaaaatgacacctgatctargttacctttatcaagtgtaaatgggaacctgcagtacaggatgcttttaatatgatacattgactccttgtgttagtatcagctttgtctcttccttgctttttggccatgaccaagttaatcactaatggccttaattttctcatccataacatgaggataacaacgtccattttccttaagttttttttgataattaaatgagttaatatattaagacccttatagcaatgcttgataaaaacaaacagtagccattattaagtgctatgtatatcctactgtagcagaccaggctggcactgatccttggtcacttgctgctgaactttgggagagcggaagtagcactacagaatcatagaatcgaaagggactttaaagactttagcaaaaatctccagctttagaaaggaggaaactgaggtctatcagggaaaggtgacttgcacaagttcacacgtag

SEQ ID NO: 729805 - DNA, 607 bp, Homo sapiens
ttttacttctttgaaataaaagcacattttatacttcttcgcttttattattaaagattataaagctataaattttcatctaaacatagttttggtggcattaagtctggaaatgtattggaaaatgacaataagatggtttctgagtgctattggaacttccaagtgttgggctgggtgcagtgactcaaacttgtaagcccagcattttgggaggctgaggcaagagaattgctwgaggtcaggactttgagacagcctgggcaacagtagtgagactccatctctacaaaaaaaattttaaaaataaaaatgagccaggcatggtggcatatgcctgtagtcctagctacttgagaggctgaagtgggaggatcatttgagccaggagttagaggccacagtgagctacaatcatgccactccattccagcctaggcaacagagtaagactgtgtttttagaaagaaaaggaaaggaaaggaaagaaagaaatttccaagtggctcaataaaaaaatttaattttaaattaataatttagagcttttatgagttgtggtcaaataattttttccttttgaggatttgtgaagcatctcttaagc

SEQ ID NO: 729806 - DNA, 607 bp, Homo sapiens
ttttacttctttgaaataaaagcacattttatacttcttcgcttttattattaaagattataaagctataaattttcatctaaacatagttttggtggcattaagtctggaaatgtattggaaaatgacaataagatggtttctgagtgctattggaacttccaagtgttgggctgggtgcagtgactcaaacttgtaagcccagcattttgggaggctgaggcaagagaattgcttgaggtcaggactttgagacagcctgggcaacagtagtgagactccatctctacaaaaaaawttttaaaaataaaaatgagccaggcatggtggcatatgcctgtagtcctagctacttgagaggctgaagtgggaggatcatttgagccaggagttagaggccacagtgagctacaatcatgccactccattccagcctaggcaacagagtaagactgtgtttttagaaagaaaaggaaaggaaaggaaagaaagaaatttccaagtggctcaataaaaaaatttaattttaaattaataatttagagcttttatgagttgtggtcaaataattttttccttttgaggatttgtgaagcatctcttaagc

SEQ ID NO: 729807 - DNA, 603 bp, Homo sapiens
gtgttgtaaagccaaatccagtaaaagtgaagagtggtcagtgagtctaacatgaaccctgtcatcttgaaatatttacatatccttggtgggccaaagaagcagatttgatttcaccattcctcacagcattttaattttgaaatgctactttctaaaagttaggtagcttaaaaaagtaaatgcacccttgtttcatcagtgtgacttgctgtctaagctactgaagtctggcatattccttccctgagccccacctagggtcctgttgactttcttatatcctcaagattaaggctgttcaggaagcatcaagtcaaagtcattgacatgcttatttctcaactcatttattggaaattaattgaactggtacttctatgccagatagaagagagcctggggagtagcacaggaactcagattgcagctcargattcaggctttgattctggggataacatagggagaaccgttttcctttttgatagcgttgctttttacccacattctctcggaagattgtcaaggaagaaagcttgctaatttatatatatatatatattttctcaaataaaaaatatatttgttaggcattaaagc

SEQ ID NO: 729808 - DNA, 603 bp, Homo sapiens
gtgttgtaaagccaaatccagtaaaagtgaagagtggtcagtgagtctaacatgaaccctgtcatcttgaaatatttacatatccttggtgggccaaagaagcagatttgatttcaccattcctcacagcattttaattttgaaatgctactttctaaaagttaggtagcttaaaaaagtaaatgcacccttgtttcatcagtgtgacttgctgtctaagctactgaagtctggcatattccttccctgagccccacctagggtcctgttgactttcttatatcctcaagattaaggctgttcaggaagcatcaagtcaaagtcattgacatgcttatttctcaactcatttattggaaattaattgaactggtacttctatgccagatagaagagagcctggggagtagcacaggaactcagattgcagctcaggattcaggctttgrttctggggataacatagggagaaccgttttcctttttgatagcgttgctttttacccacattctctcggaagattgtcaaggaagaaagcttgctaatttatatatatatatatattttctcaaataaaaaatatatttgttaggcattaaagc

SEQ ID NO: 729809 - DNA, 599 bp, Homo sapiens
ccattttatcacttgctgaaagaatgcaatgattgagcatttgattttaaatctgatatttttgattattgaatatgatgaggacataaaataaagtcatgttcagaaagaaagccttcactgccaccatttgccatgatgtattcaaccttatatattttgagaggtgtcaggccatctcttgtcctgtccaaattggtcatgcagtaatctgattgatctgttaggatgagaagcagtacagcaattcattattgttattggctaaatatagatgaaaggttaaatgggaaggcacacaagtaacctgttgaagtctattggagaacagggttcaaataccctgsgtgtgctgttcctaacacttaatcaaaagatgacacttagacatagaccagacactggacatctgtgtcagtattgctagaccagagaatgcttttgctctgcatcttcaaaagcaccctccaccctcattccccgaactgacttgcagacatgtgtttatgtagccagctctggctttgtaaatgtgaaagaactcaacacagagactgtcaggacaaggcctgttctctcagggcatctgtcagctggtg

SEQ ID NO: 729810 - DNA, 641 bp, Homo sapiens
caatgatacttttaatataaaaatatttatagagatactagaagaaaataaactcaattttttactttttggggggcaaaagcagagaagatgtcttatttattaaattcctatgatttattagaaaataagaccagcctgggcaacatgacaaaaccccatctctacaaaaagtacaaaaattagccaggcatggtgtcacgcacctgtagtcccagctacctgggaggctgaggtgggagggtcacctgagccaggggaggctgaggctgcattgagccattttagcaccactgcactcaaacctgggtagcagagtgagaccctgtctcaaaaaataaatgaacgaatgaataaatggataaataaaaaatttcagcatttgtacaggttggttggtgtggactggcaatttagaagaaaaaaaatttgtgatgtgttattcagaacaaatgaagcaaatataatcatgtggacaactctcaattttgcatattggccatttrttattgtttgtgtttttctgcatttaacacatttcctaaaatatacgtacacatgttcatatctaatctcctacacaattctgtagaatttcaagtgagtagttgctttttttttttgaaatccaaatatttcat

SEQ ID NO: 729811 - DNA, 408 bp, Homo sapiens
catggtcacaaggcctctgcctcagggcccttgtatttgctcttcccttgcccagaacactcctcacccaggtattcttttttaattatatatatgtatatataattatatattataattacatatattttatatgtaatatatattatgttatatatwttatatatatatatatatatatatatatatatatatatatttctttttaagtaaaatagaaacagagtctcactgtgttgtccaggctggtctgaaactactgggctcaaggatcctcctgcctcagtctcccaaagtgctgggattacaggtgtgagccactgcatctggcccatccagatttttttttttttttgagatggagtttagctctattgcccaggctggagtgcagtggcacaatcttgg

SEQ ID NO: 729812 - DNA, 408 bp, Homo sapiens
catggtcacaaggcctctgcctcagggcccttgtatttgctcttcccttgcccagaacactcctcacccaggtattcttttttaattatatatatgtatatataattatatattataattacatatattttatatgtaatatatattatgttatatatawtatatatatatatatatatatatatatatatatatatatttctttttaagtaaaatagaaacagagtctcactgtgttgtccaggctggtctgaaactactgggctcaaggatcctcctgcctcagtctcccaaagtgctgggattacaggtgtgagccactgcatctggcccatccagatttttttttttttttgagatggagtttagctctattgcccaggctggagtgcagtggcacaatcttgg

SEQ ID NO: 729813 - DNA, 591 bp, Homo sapiens
attaatttaagagcaatgcacttcaaaggaatgcagatccattcctctcagttgtgacaaaacaagggagagcagagctctctctttaacaggaagatgtggctgaaaggtcttctggtgtagtgggaagcacaagtgctttagagtcagtcaaatggagtttcaaattccatatcagtcaatatttgcagtatggcttgggcaccttaagcaaccattctgaacttcaggttccttatctgcgtaataggagtaataatatcaattatttaattctctctgctgctgtaagcacttacccttctagatgacagaaaatgtattttaaagtmtctgatgtggtgtcaatgctcaatggtctattttagcaataattttcaactgggtaattgtccaagacctgtgctatgagtagatagtcagaagcatcattatagggtgaggaagctgatcctatcagctggtgctaaaaatcattcaagactgttataaacagtccatacagttagttaccttttaaatttgctttgctccaggtttgggactagcagttagcaagtgttcccctcttctcccttacttctgtgactg

SEQ ID NO: 729814 - DNA, 655 bp, Homo sapiens
aaaattccattgtgaggatgttccacagtttatgtgtctattcatctattaaaggaaatcttggctgctttcaagttttggtaattacaaataaaagtgctataagcatgcaagttttcgggtgaaagttttcagctcatttgagtaaataccaaggaacacaatggctggattattggtaaaagtttagttttgtcaacacctgaaaactgtcctccaaagtggctgtaccattttggattctcaccagcaatgaatgagacttcctgttgctgtacatcctcattagcatttggttttgtcagtgtttgaattttcaccactctaatgatatgtagtagtatctcttggttactttaatctgcactaccctaatgacagatgatattgagcatcttttcatatgcttatttgctatctatatattttctttggtaaggtgtctgtttggattctttttccatttttaaagcaggttgtttgtttcataytgttgagttttaagagttctttgtatattttaaatgagaatcctttatcagatattatttctgcaaatatttctttccagtctgtggcttgtcttctttttctcctaacaatggcttatcagagtggaaggttttaatttcaatgaagttcagcttgtccatta

SEQ ID NO: 729815 - DNA, 633 bp, Homo sapiens
gaagatatttaagacacatataattgacacaggactagtgttcacaattctatgaagaaagacagacaataatggaaaattgggccaaatgtattagtaaatatttacagaaaaaagtttaaatacttagtgaacataggaaaaggtgatcactcaatctcattagaaattcagaaagtgctaattaaagcccacaagtagaatttattttacaactattaaaattgcatataaacagtatctaacattaacaagtattaaggagcatagagcaataagaatatttcaaaattgatttgaaattccagaagaattgcttattattgtataataaatatgaaaatctgcaattctctatgtctaggcaattttctcatagatatgactcagaaaaatatttgcccctgttcacctggatacatacacaatattatgcacattaacatattttataatagaaraaaagaaagtgtaaaaaccctcagccatcaacatagaatagctaaatcaatcacagtgtagagaatgctatgcaacaaaaatgactaagttgtgattaaataccatgacatggaggaatcttaccaacaaatttgagggaaaacagaaggttacaaaagaaaacaaatgaat

SEQ ID NO: 729816 - DNA, 609 bp, Homo sapiens
aaatcaatcacagtgtagagaatgctatgcaacaaaaatgactaagttgtgattaaataccatgacatggaggaatcttaccaacaaatttgagggaaaacagaaggttacaaaagaaaacaaatgaatgattatattaagttaaaatataaatacagttataagtaactataaaataattattacaaatatcaagatggcagttacctttagggggatgggaggaaggcaaagggatgctagccattttatttcttgatataggtgtttattaaataaataagccaaaatacatcaagttttcaccatgctccttctatgaaagtattccaagaactaggaaaggattaaaggtaaggagaacttggttggtgataggttcctgaaatagggttttgtggctgcaacattttctatctgatgaaatttctaggcatgttyagcaatcttaggatggaaatgatctattagccatttccaggcaagatcccaaaaaagcaaaatctctatcagcttctcatgtttaacatggtagaaaaataaataaattattgagtaaaaataggcctaggaaagtcttgaagcatttcttatgaccttagcatgaga

SEQ ID NO: 729817 - DNA, 657 bp, Homo sapiens
ctaaatcttaaggacagcataggaaaaatgaaacctaatactgttatacttttaagatcattctgctcttttgctctatgtgtcacttgacagttcaacgacaattagacactcgataactgaaaaacttgtttatgttgaaaaaaagtagagttctattcttggacagcacatttatgcacacacttttttgagacatggcatattgagggaatttatgtgctcctattctataatacaggtggtgaggtcaatttcactgtaaggtacaacctctcaacatagcttttgggggcttgttgacatttcttaagcagggagttattcatataccccatcagtccttattcccagcagtcaggactgccacattcagcagtttacaagagatttagagtagatgatctaataaattaaccctggttttgcacacaggcacatcagggaatatcttaagatcttcaggttctgcatcttgccacccttcagaacttgcttactacawgagcagtatgaacaaactatgagttgacaatttgttgaaactttttcacaacttcttcagcctgggatgctgtcttctgggtgccacgtttatatcttcttggcctgcccctctcttctctgacccccacccaaaactccaatattcctcac

SEQ ID NO: 729818 - DNA, 673 bp, Homo sapiens
ttgacccatttgtcaatcaggaacatatggtttaatttccatttgtttaggtcatctccaaaattcctttcattatttatttctagctttatttcattgtggttagagaagatccttgctgttatttaaatattttgaatgttttaagacttgttttatgacctaatatatgatctatccttgagaatsatccatgtgttgaggaaaagaatgtgtattctttactcatcagatgaaatgttctaaatacctattagatccatttggtttatagtgcagatttagtactctgtttctttgttgattttctgcctagaagatctgtttaatgctgcaagtaaggtgttgaagtctctagctattattatattggagtctctctctttagctctaataatatttgctttatatatctggatgttccagtgttgggtgcatatatacttaaaattgttacatcctcttgccaaattgacccatttatcattatatactgtctgggagctaggacctagaacagggttctcatggctctgactagtgtcctatcctgcagtaggtgagctggtctccaaggtgcaatgcaaagtcctttccactcttctctctccactcctcaggaagaagaatggggtctcttttgaagctgtgaactgtgcagtctggtgttagg

SEQ ID NO: 729819 - DNA, 600 bp, Homo sapiens
taaattagattgaaaactagaattggtgaataaagaagaaacatgagacagtgaggaagtcactgatgttataatgatattagtaatttctcattttgcctctacttccatttttaaatgaaaatagtactcaggacctttccaggaaaaatacaaacaaaaactaaggttatgggaacatttctgatggcactctgaggatcattcctgcatgcttagaggaatctcccatttcgtaagaacactggtataaccttaaggtgggttatcttctctcccaggagacagggcaggaaactcaggtgtactttgttgccacttgcatttctctcttctgactgggtgacagtgtgaatttgagttaggtctgggaaggtggtgggtgacaattgcaaactaggcctttcaatctttcaaccacatctctgacctttcaaatttggaaatgtgctttcttcctaccygccaaatggcctctttttgactgatttatgttggatttacttccattcaaattgaatttttatttttcattgagcacatgacctaaagtagattcctcagaaaaggctggaggaattaaatgtcagctgaatgaat

SEQ ID NO: 729820 - DNA, 507 bp, Homo sapiens
tgttttggggggtatttttgaaaatttaacttatattcctaatgtaaaaagagccccttgattatctctcctgttaaataaattcaaaaccttagaatattttaactttaattgctattccaactgactttacattattgtctaatatcttggttctctcttgctttcttggtaattttaatgtcacatattggaaattattactttgaatataatatttgtctatatttattacacaccaaaatctttgcatgttattattttttacttcagattttttmggatcattgtcctttttattatatacatactttagaagaagttcttttaataagagtaagtttataataaactctctctggtattactgaaaaaaatatactgttattgtccacattctctaaatatttctcctagatttaaacttattggtggggtgagattcttagagatttcttgtattttccagtgagttgatcaatgcatttaaaagtatgatcatttaga

SEQ ID NO: 729821 - DNA, 619 bp, Homo sapiens
tcatttagtcattcattcaaagcaagattaagtatttattatgtatcagacactcttctgggtacagttaagtatgtatagatgataaaattacattctctatcctgaaagagctaatgctgtataggggagatgaacaaaatagcaaacaatgacaatataatatattgtcaatacaagtttatggagcaaacgtaatacataagagacaaaactatttcagatgaaggtagaagatgttttgtaagtagttcagtgtggccaaagtgtgagttacaagaagaatggaagaatggcaataaaactgagatataggaggaagagctggtttatgaacaacctactaggctaggctaaggtgtttgtttgtttgtttgtttgtttgttttaatatagstaaggcaatgaaaagtcatagtgaactttaaggagaggtgggcaatggcaattgttaaatttatatttccgaaaggatagttcaatatggttacgaaaactaaattggattatattcaagtttggagacaaaggaaacattagagtactactgaagaagtttggacaagaaataagaaggattttttagggaaaataaagagaaaaatagcaggacttgatg

SEQ ID NO: 729822 - DNA, 681 bp, Homo sapiens
gcattttgactacaaagcgacagcacaagaaaatttttgcggtgatggaactcttctgtaagaaaatgtggtgatagatgtctgagtctatatctttgccaaaaactcataaaagtgtacaccaaaaagagtgagatttaccatacataaatttaagaaatgaaccaaaatgttggagaaactcaagaaggaatgcaaactataaggatgaatctaactgtattaaacgtaaattacataaccacactgaaggaagtcaggaagaaagtagttgatttccgtaaccttggacaaaatacttttattaatactataaggctgaagaagaaagatctgtacagaaactaaactatagttgataaatgtacctttcataggtgtatcatttagcatttataaaattacatgtatattaggcttgaacaaaactaagtaaatatattataggtcatgagaactagattgctcactgtcaaagaaagaagttagaaagaaagaaggttagtttgaatacttggtggctagagtcaaagttatcaatataatctcatggattttattttagatagattagatagagcratattatagagatgatagatgtcagagatttgtgttcatgcctgggtatgtatacatatatatatttcctagctctattcactgaaaggaattcaacac

SEQ ID NO: 729823 - DNA, 624 bp, Homo sapiens
ttaaagtcagctttaacgtgtttctaaaagttatattccggtattgctgagatattcctatcacaaagctatttccaaagccatgtttgtggtctaagcatgtatctgtaacttactaagagatcgtcctgaaaaattgaggacaagtccagtttttatttttgctcattgaataatgacgtttcctaaagatctttgtcttgtaggccttccttttttgacacttttttttctttttctgagtaatctcataccttaagtgattataaagtttgactgtgttctgacggttcttaagtttttatctaatacagctttatctccagacctatgtatttatttacttgttggatattttgacctaactattctgtaagttttaaaaatwtgtacagagacagtgaattgataatctttattatctttgttctttcctccttcatacacaagttctttctgcttagttttctatttcatttaatgtattactacttaagggtcactcattgcagaaaacattgaatcaaccatacttctttctctcttatactccctgttctcaaggtcattatgcagtctctacttcaatctcagttttatttcttcctgtttatctcaattcgt

SEQ ID NO: 729824 - DNA, 570 bp, Homo sapiens
gatcctagaccagaagaaaaaactgtccacaaagggaattattggaataattgttaaaatttgaatggagtcaatgtgataaatggtattctagatggtggaattgtttttgatgttcatttgctgatttagatgatttattgcagtatggcagagtatccttttaacttaggaaattcacacaaatttttaggggtggtacgaacttatctgcaacttacattcaactgattcattaagaaatattagaygcacagacacctacacatgcacacacatgaagacatatacacaaaagaaaaagcagagagacagaagaagaaaagttgggtgagagagagggaaggaaaggaaaaatgttaaacatacatggctaagatattcacaagtagggaacctgggtgcagcatgaagggagttggttgtattattttcacaacttcgctataagtttattttttaaaaatatcttctaactaatctatatttgatggtcctgtgaatcatgagtatatttgtataaacctgaatcatatatgcaaataattgaatgacttaactgctggggta

SEQ ID NO: 729825 - DNA, 562 bp, Homo sapiens
cttttttgggtttcttaaggctaccctattgagtctctcaaattgcaactcctgtattatggacaatacctgtccaccttaaactggggtccccttgccccaaggggctgccctcttggtcacgatttctaaaacatccacagctgccaatcctccctgtgatttcacacatggttccaggaacacctttgatcctccmatgcaggggagtgcaactctctgttcctctgttcaggtactatgagctgctccagctttctcaggctcatgccagtcaacaaacctctatgtcccccaatttcagggcacacatagcaagctctccatgtagtcctactggagtgcctcacactctatattgagtttagaagcagcctccccatctgcaacaaccaccttgggtagaggaaagaaggaaaaaaggagatatattttgtagcttcttccaaatgtttccttataaaagtcttctctatttgcactctctagattctttcatatctttgcagttttaacatatggtctagtatcccttttggaataaaacatatgccctatcatg

SEQ ID NO: 729826 - DNA, 618 bp, Homo sapiens
tccattctccacaaattggccaaaattatatttttaaaatgtaaatcagatcatattattccctactgaaaatacactaaattagtggttctcaatctctggcaatttgcctccccagggacattagacaatgtctacagacacatttaactgtaacaactcaggaatgaatgcyactggtttctagtggacagaggccagaaatgctggtaaacatcctacaatgcacaggacagccccacaacaacaaatctggtctaaatctttatagcgctgctgtgaagaaaccctgcactaaatccaaatcccttaacctaatttgcaaggtcatgtagtctgacttctgcctctctctttaatcttgcctctggccacattctctcctgctcattatgctctagccatgctggttatactttgtattccttgaaccacccaagccagtgtgtctcaggaccctttaacctgctaatctctgattccttttcctgtaatgtccttctacctggaatggtcttctaccaaaactttgcatggctgcctccttctcaatatttagatctctgttcaaatgtcacttgctcagagagagtttctgtaaccatttcatctaaggca

SEQ ID NO: 729827 - DNA, 631 bp, Homo sapiens
gagctgatgacaaatgacatttatgaaaaaaatgaataaaaatatttcagactaagacatgacaggagaaccaaagctttggtcaggcctagaagaatctgcaaaccataatgttaaatctctttaattgtgagtttgctggggcataagaggataaatattgaatctatacttaattaactacttctctttgacaacccacttaacctttctgagccctggttagcaaaagccacctaataacatactgtggtgaaattagatcaaatgagatagaagacgtgaaactgcattgagtaaagcgctctacaaaggcaaattttaaggctagtgtttattgagtgctttctaaagccaagcacttttcaaagtgctttacawatgtgtttcatttagtcttcttagaatgtaccaatacaaacctacattttcacagatgaaatattgagagagaaagagattaaaaagttaaacatattggtcaatctcaaacagtaactggtaaaccccagattatagccccagtagggtatgggttaagagcccagacttttaatgctattagtgttgtttcctggcagtagtgacactacatttacttggaaataacaaagttgcattttgaaaagat

SEQ ID NO: 729828 - DNA, 631 bp, Homo sapiens
gagctgatgacaaatgacatttatgaaaaaaatgaataaaaatatttcagactaagacatgacaggagaaccaaagctttggtcaggcctagaagaatctgcaaaccataatgttaaatctctttaattgtgagtttgctggggcataagaggataaatattgaatctatacttaattaactacttctctttgacaacccacttaacctttctgagccctggttagcaaaagccacctaataacatactgtggtgaaattagatcaaatgagatagaagacgtgaaactgcattgagtaaagcgctctacaaaggcaaattttaaggctagtgtttattgagtgctttctaaagccaagcacttttcaaagtgctttacaaatgtgtttcatttagtcttcttagaatgtaycaatacaaacctacattttcacagatgaaatattgagagagaaagagattaaaaagttaaacatattggtcaatctcaaacagtaactggtaaaccccagattatagccccagtagggtatgggttaagagcccagacttttaatgctattagtgttgtttcctggcagtagtgacactacatttacttggaaataacaaagttgcattttgaaaagat

SEQ ID NO: 729829 - DNA, 655 bp, Homo sapiens
atcgcctcactgacatcacatctgttggattgacaggctctatcgttctgcttataaatctcttgctttaatgaatatggaatctaatctgatttctttctcattcaaaggcatctttttcaagagaaaaaaaattctttgaggacaagaaagagttgaaataaaatgatagagaaaaacccttaactagaggaataatgaaaaaaaaaagggagacagggagaaatatcagcatgtcttttatacatttgaacagttattgagcatatttcaacaagtacaagactgtcttttattttacaaaaagacagaaataaatcatgcatgagaggaacctgaacatgactatcaacaacttttcaatgaatttggaagagcttacatttgttaacaagaattttaaaacttttaactaatmcagttcaaaatcaaataaaattttagactcaactgtgccaggctgtattagaagaatgttgaagaaaaagcaaggagttgcaaggtagaaggattggagtagattaattatatgagaccataaaaccttcccatgagggactaaaggacactccctttattgaggtgaaaaggaatatattcagcatcatttagaagctcagggaggctattttctgtgggccagaaatgatggcag

SEQ ID NO: 729830 - DNA, 635 bp, Homo sapiens
aaacttttaactaatccagttcaaaatcaaataaaattttagactcaactgtgccaggctgtattagaagaatgttgaagaaaaakcaaggagttgcaaggtagaaggattggagtagattaattatatgagaccataaaaccttcccatgagggactaaaggacactccctttattgaggtgaaaaggaatatattcagcatcatttagaagctcagggaggctattttctgtgggccagaaatgatggcaggaggttctttaacagaaacaaacttcctagtgtcaatatggattatatgacttcagaatggcaaaggtcaaatgacagaatttaataattagaggcaatgtagatataattactgtaatcaccagcgacaactgggagccctagacctatgaaaatctacgtcaacagctaataagtcattctgttcctggaagcaagagagacagaaagccaatgagagtgttgctcaatttatataacaattaaagagatcaggtgtgcagaagttcagtgtctatgtcttattagaaaatcatgattccttacccaactcctgttctaagctagttttcagaacttccaaatcaactgccaaaacaggaatatataatatacattagat

SEQ ID NO: 729831 - DNA, 635 bp, Homo sapiens
aaacttttaactaatccagttcaaaatcaaataaaattttagactcaactgtgccaggctgtattagaagaatgttgaagaaaaagcaaggagttgcaaggtagaaggattggagtagattaattatatgagaccataaaaccttcccatgagggactaaaggacactccctttattgaggtgaaaaggaatatattcagcatcatttagaagctcagggaggctattttctgtgggccagaaatgatggcaggaggttctttaacagaaacaaacttcctagtgtcaatatggattatatgacttcagaayggcaaaggtcaaatgacagaatttaataattagaggcaatgtagatataattactgtaatcaccagcgacaactgggagccctagacctatgaaaatctacgtcaacagctaataagtcattctgttcctggaagcaagagagacagaaagccaatgagagtgttgctcaatttatataacaattaaagagatcaggtgtgcagaagttcagtgtctatgtcttattagaaaatcatgattccttacccaactcctgttctaagctagttttcagaacttccaaatcaactgccaaaacaggaatatataatatacattagat

SEQ ID NO: 729832 - DNA, 599 bp, Homo sapiens
acttctcaaaagaagacattcatggggccaacattcatatgaaaaaaagctgaacatcactgatcattagagaaatgcaaatcaaaaccacaatgaaataccatctcacattagtcacaatggctattataaaaagtcaaaaaataacaggtgctggcaagattttggaggaaaaggagcatttataccctgttgatgggascgtaaattagttctgccattgtggaaaatagtgtggcaattcctcaaagaacaaaaaacagaaataccatttgactcggcaatcccattactgtgtatatacccaaaggaatatgaatcattatattataaagatgcatggctgcatatgttcattgcaacactattcacaatagcaaacatggaatcaacctaaatgcccatcagtaacatactggacaaagacaacttggtatatgcaccatggaatactatgcagccataacaaagaatgagatcatgtcctttgcagaaacatggatggagctggaggccattatccttagcaaactaatgcaggaacagaaaaccaagtactacatgttttcacttctaagtgggggctaaatgatgagaac

SEQ ID NO: 729833 - DNA, 599 bp, Homo sapiens
acttctcaaaagaagacattcatggggccaacattcatatgaaaaaaagctgaacatcactgatcattagagaaatgcaaatcaaaaccacaatgaaataccatctcacattagtcacaatggctattataaaaagtcaaaaaataacaggtgctggcaagattttggaggaaaaggagcatttataccctgttgatgggaccgtaaattagttctgccattgtggaaaayagtgtggcaattcctcaaagaacaaaaaacagaaataccatttgactcggcaatcccattactgtgtatatacccaaaggaatatgaatcattatattataaagatgcatggctgcatatgttcattgcaacactattcacaatagcaaacatggaatcaacctaaatgcccatcagtaacatactggacaaagacaacttggtatatgcaccatggaatactatgcagccataacaaagaatgagatcatgtcctttgcagaaacatggatggagctggaggccattatccttagcaaactaatgcaggaacagaaaaccaagtactacatgttttcacttctaagtgggggctaaatgatgagaac

SEQ ID NO: 729834 - DNA, 668 bp, Homo sapiens
ttaccaaacacattatgatgataaaatctaatattgccctaacaattcaatccatgacccaaaatctcttttcttattagagtataaacgattctgcatagtctcataccaaactgaatgtatacatttaaaattacttgttcttttccatagagaagtttcccacatsggtttatttttaaacaatgagttaaccgtaggaaaacaggtgctattgtctacaaaggattatgttaatctcatcctctgtgaatcgaagggggaaagataaaattttataaactaggtttacagatttttcagactgatgtcccataagtccttaaatgaaacaattcactctgcagagtttaatggagggggttttaattttaattctgcaggttaagaatcttggtgttctagccaacctctgaaatgtacgagagggaaaagaagctttaagtgggtgaggtgtggtggttcacgcctataatcccagcactttgggaggctgaggcaggaggatcgctagagcccaggaaggcaacatagcaagacctcatttatactaaaaaaattttttttaattagctgggcatggtggcgcacgcctgtagtctcagctactcaggcagctgagttgggagggtcacttgagcccaggaggtggaggtttcggtgagccg

SEQ ID NO: 729835 - DNA, 668 bp, Homo sapiens
ttaccaaacacattatgatgataaaatctaatattgccctaacaattcaatccatgacccaaaatctcttttcttattagagtataaacgattctgcatagtctcataccaaactgaatgtatacatttaaaattacttgttcttttccatagagaagtttcccacatgggtttatttttaaacaatgagttaaccgtargaaaacaggtgctattgtctacaaaggattatgttaatctcatcctctgtgaatcgaagggggaaagataaaattttataaactaggtttacagatttttcagactgatgtcccataagtccttaaatgaaacaattcactctgcagagtttaatggagggggttttaattttaattctgcaggttaagaatcttggtgttctagccaacctctgaaatgtacgagagggaaaagaagctttaagtgggtgaggtgtggtggttcacgcctataatcccagcactttgggaggctgaggcaggaggatcgctagagcccaggaaggcaacatagcaagacctcatttatactaaaaaaattttttttaattagctgggcatggtggcgcacgcctgtagtctcagctactcaggcagctgagttgggagggtcacttgagcccaggaggtggaggtttcggtgagccg

SEQ ID NO: 729836 - DNA, 668 bp, Homo sapiens
ttaccaaacacattatgatgataaaatctaatattgccctaacaattcaatccatgacccaaaatctcttttcttattagagtataaacgattctgcatagtctcataccaaactgaatgtatacatttaaaattacttgttcttttccatagagaagtttcccacatgggtttatttttaaacaatgagttaaccgtaggaaaacaggtgctattgtctacaaaggattatgtyaatctcatcctctgtgaatcgaagggggaaagataaaattttataaactaggtttacagatttttcagactgatgtcccataagtccttaaatgaaacaattcactctgcagagtttaatggagggggttttaattttaattctgcaggttaagaatcttggtgttctagccaacctctgaaatgtacgagagggaaaagaagctttaagtgggtgaggtgtggtggttcacgcctataatcccagcactttgggaggctgaggcaggaggatcgctagagcccaggaaggcaacatagcaagacctcatttatactaaaaaaattttttttaattagctgggcatggtggcgcacgcctgtagtctcagctactcaggcagctgagttgggagggtcacttgagcccaggaggtggaggtttcggtgagccg

SEQ ID NO: 729837 - DNA, 668 bp, Homo sapiens
ttaccaaacacattatgatgataaaatctaatattgccctaacaattcaatccatgacccaaaatctcttttcttattagagtataaacgattctgcatagtctcataccaaactgaatgtatacatttaaaattacttgttcttttccatagagaagtttcccacatgggtttatttttaaacaatgagttaaccgtaggaaaacaggtgctattgtctacaaaggattatgttaatctcatcctctgtgaatcgaagggggaaagataaaattttataaactaggtttacagatttttcagactgatgtcccataagtccttaaatgaaacaattcactctgcagagtttaatggagggggttttaattttaattctgcargttaagaatcttggtgttctagccaacctctgaaatgtacgagagggaaaagaagctttaagtgggtgaggtgtggtggttcacgcctataatcccagcactttgggaggctgaggcaggaggatcgctagagcccaggaaggcaacatagcaagacctcatttatactaaaaaaattttttttaattagctgggcatggtggcgcacgcctgtagtctcagctactcaggcagctgagttgggagggtcacttgagcccaggaggtggaggtttcggtgagccg

SEQ ID NO: 729838 - DNA, 583 bp, Homo sapiens
ccaacaaacatatgaaaaaaagcttattatcactggtcattaaagaaatgcaaatcaaaaccacaatgagataccatctcacaccagttagaatggctatcactaaaaagtcaggaaacaacagatgctggagaggatttggagaaataggagcacttttacagtattggtgggagtgtaaattagctcaaccattgtggaagacagagtggcaattcctcaaggatctagaaccagatctagaaccaaaccatttgacccagyaatcccattactgggtatacacccaaaggattataaatcattctactataaagacacatgcacatgtgtgttcattgcagcactattcacaatagcaaagacttggaaccaacccaaatgcctatcaatgatagacgggataaagaaaatgtggcacatatacaccatggaatactatgcagccataaaaaaggatgagttcatgtcctttgcagggacatggacgaagctggaaaccatcattcccagcaaattaacacaggaacagacaaccaaacactgcatctcactcataagtgggagctgaacaatgagaata

SEQ ID NO: 729839 - DNA, 583 bp, Homo sapiens
ccaacaaacatatgaaaaaaagcttattatcactggtcattaaagaaatgcaaatcaaaaccacaatgagataccatctcacaccagttagaatggctatcactaaaaagtcaggaaacaacagatgctggagaggatttggagaaataggagcacttttacagtattggtgggagtgtaaattagctcaaccattgtggaagacagagtggcaattcctcaaggatctagaaccagatctagaaccaaaccatttgacccagcaatcccattactgrgtatacacccaaaggattataaatcattctactataaagacacatgcacatgtgtgttcattgcagcactattcacaatagcaaagacttggaaccaacccaaatgcctatcaatgatagacgggataaagaaaatgtggcacatatacaccatggaatactatgcagccataaaaaaggatgagttcatgtcctttgcagggacatggacgaagctggaaaccatcattcccagcaaattaacacaggaacagacaaccaaacactgcatctcactcataagtgggagctgaacaatgagaata

SEQ ID NO: 729840 - DNA, 583 bp, Homo sapiens
ccaacaaacatatgaaaaaaagcttattatcactggtcattaaagaaatgcaaatcaaaaccacaatgagataccatctcacaccagttagaatggctatcactaaaaagtcaggaaacaacagatgctggagaggatttggagaaataggagcacttttacagtattggtgggagtgtaaattagctcaaccattgtggaagacagagtggcaattcctcaaggatctagaaccagatctagaaccaaaccatttgacccagcaatcccattactgggtatacacccaaaggattataaatsattctactataaagacacatgcacatgtgtgttcattgcagcactattcacaatagcaaagacttggaaccaacccaaatgcctatcaatgatagacgggataaagaaaatgtggcacatatacaccatggaatactatgcagccataaaaaaggatgagttcatgtcctttgcagggacatggacgaagctggaaaccatcattcccagcaaattaacacaggaacagacaaccaaacactgcatctcactcataagtgggagctgaacaatgagaata

SEQ ID NO: 729841 - DNA, 583 bp, Homo sapiens
ccaacaaacatatgaaaaaaagcttattatcactggtcattaaagaaatgcaaatcaaaaccacaatgagataccatctcacaccagttagaatggctatcactaaaaagtcaggaaacaacagatgctggagaggatttggagaaataggagcacttttacagtattggtgggagtgtaaattagctcaaccattgtggaagacagagtggcaattcctcaaggatctagaaccagatctagaaccaaaccatttgacccagcaatcccattactgggtatacacccaaaggattataaatcattctactataaagacacatgcacatgtgtgttcattgcagcactattcacaatagcaaagacttggaaccaacccaaatgccyatcaatgatagacgggataaagaaaatgtggcacatatacaccatggaatactatgcagccataaaaaaggatgagttcatgtcctttgcagggacatggacgaagctggaaaccatcattcccagcaaattaacacaggaacagacaaccaaacactgcatctcactcataagtgggagctgaacaatgagaata

SEQ ID NO: 729842 - DNA, 568 bp, Homo sapiens
ttgcttcccagtttaactcactgagttgacttgattaaattactggaaggatctagctgtatctatctaaatatgtaaacctactggaaaaaaattatagctttcaatttctcaagcgaaaataaatcagtcaaacagcaggttattttatgataaatagttgaaataatttaatctgtccttaacaatgagttatttagctgagatgagaatcaaagaaatatttttgaagtacctactatgtaccaggcgctgtgttagatgctagggattgaatgtagaagaaataaacatgattcatcccctcaaagattttataatctttgaagtttaaaaaaaaaaaaaaaaaaaacctttagctacaagatagaccaggaacagaagtgggaaaagtagacccagggagatccwtgtagaggcagtagtctaagcaataggtgtttgtttgtttgttttacaaacttgttttactatttacatttagaatagagattgcaatatagtgtttgataaaggttcctgctgataagtcaggtggaaaacagagccagcccagggaatagcaagt

SEQ ID NO: 729843 - DNA, 585 bp, Homo sapiens
attgacctttagggagcactgcttcacaaggctacagtatttttgtttgttcacaatagaaaatgctatagggaagggatttcagttgtagcttagaatgggaggtagagctgaaaagaaaaaaaataaacaaaagataacatctgaaatttgatatttaaattagaaggaataaggaattaagaggtagctatatatgtattaatgatactaaatgtagttgcaaaagagaagtaaaaaagtagaattgatgaaatctttgtgtaaaattaactaattaattaatattttaaaggaaagactctgttgccagtggtgcttttaaggaagaggcttcagagggtwtccaaaaagataaaaggttgtaataatgggttatatcaatacagaaaaatttggcagagacacatgaaaatgaataaatttccattaaaagtagaaattttaatttgaataataaacattaaggggttttactttaagacagaaatgggaaactctttcattattaaatacgaattacaaaaaatttacaggaacatcaacacaatttccagtaaagtatacgatagtcagagtgcactg

SEQ ID NO: 729844 - DNA, 695 bp, Homo sapiens
atgattaaaggactgatgatgaaagtttcaaggaattgggattacttagcctgaagaagagaaatttgaggggtgatttaatggcaatcttcaagtacagtatgaggagggttattataagtatggtagccagctgttccccagctgcaccgaaggttagaaaggggaaatcgagctagaatttcagcagagaggtttaagttggaccagtgatagtggttctcaaagtagctcaagggatagaaaaccatcgtggaagaccatgacatattcttttaaatttaaatatactttttcctaatcagataccaacttataacatgtactagtaaggtaaaaattatgaaatacarctcaggacttagaaaatgttgactggggagatgggtgggggtgttaagacataccttctccactgggaccccacaatgtggaagcccagtttgaataccaatgagctatgaagagaggcggtacctgtggactttcaatgagcacgacaaccagatggtgggagcccatgaggatctgtgttcaggaaaggactcactcccatctgaatcctggcaaccctcttttttcctttgaccctgtttcataccacctggaaaaggagggagaggcccaagccatacaagtacttttgaggactgcatgtctaggagacagggcaaggtgcccatttacagccggtt

SEQ ID NO: 729845 - DNA, 614 bp, Homo sapiens
attcccctctataaaataaaagtctttgccctatcaagactacataagtgagatgctcaaattctacagtaataaaacaattggcactataagtgaggtatttcctgctgataaaattagtatgacttaaacatgayatacctacactgaatagaatacgtgatagatgctggggtacgataacatgaaaaaagatttttttacccagttttaagtagtctgtggcaaaacagtcacctgaatacactgtttataagaagtgtaaaataatacagtcctttggaaagcaatgtgacaatatgtatgaagaaatttaaaatagccggggcagtggctcatgcctgtaatcccagcactttgggaggcagaagcagacagatcagctgaggtcaggcattcaagaccagcctggccaacatggtgaaaccctgtctctactaaaaatacaaaaaattagccatgtgtgggggtgcatgcctgtaatcccaactgcttgagaggctgaggcagaagaatcgcttgaacccaggaggcagaggttgcagtgagccaagatcatgccaccgcactccagcctgggcgacagagtgagattccgtctcaaaaaaaaaaaa

SEQ ID NO: 729846 - DNA, 614 bp, Homo sapiens
attcccctctataaaataaaagtctttgccctatcaagactacataagtgagatgctcaaattctacagtaataaaacaattggcactataagtgaggtatttcctgctgataaaattagtatgacttaaacatgacatacctacactgaatagaataygtgatagatgctggggtacgataacatgaaaaaagatttttttacccagttttaagtagtctgtggcaaaacagtcacctgaatacactgtttataagaagtgtaaaataatacagtcctttggaaagcaatgtgacaatatgtatgaagaaatttaaaatagccggggcagtggctcatgcctgtaatcccagcactttgggaggcagaagcagacagatcagctgaggtcaggcattcaagaccagcctggccaacatggtgaaaccctgtctctactaaaaatacaaaaaattagccatgtgtgggggtgcatgcctgtaatcccaactgcttgagaggctgaggcagaagaatcgcttgaacccaggaggcagaggttgcagtgagccaagatcatgccaccgcactccagcctgggcgacagagtgagattccgtctcaaaaaaaaaaaa

SEQ ID NO: 729847 - DNA, 623 bp, Homo sapiens
tttcatcactatgaaactatgtctaacatagaccttcagaaaagctcttcccatctcttttaaaataacataacatgtacgtaacaaaaatacgggataattaaaactctgaagacagaggatagtgcttattttttgttaatcaccttcaacttcaactaaagggaaagcctgtttctaagtcttctggttccagttaccactgaagaaaaggaatgtgcattgctgccactggygatatttgtgacttctagataaacagtgccttctagtctcctgtgtattattcttttcagcattaataaatttatttaaaataaagttatttgagttaatcaaattcttgtgcttggaagtgaaataatcagattttaacttacatttaaattttagagaggtctgaattgattatttaaatctcagtaatttattgaaacatcactgtgtgccccataaatgtgtacagttagtatttgtcaaatgaaaataaaataaaacttcgaataactttgcagttgttaacacagcctcttccagttttctgctaaaagaccagtgaaggcccagggggaatacaacaacaaaaaagactgacaattgctagaaattttgatgcatttctt

SEQ ID NO: 729848 - DNA, 623 bp, Homo sapiens
tttcatcactatgaaactatgtctaacatagaccttcagaaaagctcttcccatctcttttaaaataacataacatgtacgtaacaaaaatacgggataattaaaactctgaagacagaggatagtgcttattttttgttaatcaccttcaacttcaactaaagggaaagcctgtttctaagtcttctggttccagttaccactgaagaaaaggaatgtgcattgctgccactggtgatatttgtgacttcyagataaacagtgccttctagtctcctgtgtattattcttttcagcattaataaatttatttaaaataaagttatttgagttaatcaaattcttgtgcttggaagtgaaataatcagattttaacttacatttaaattttagagaggtctgaattgattatttaaatctcagtaatttattgaaacatcactgtgtgccccataaatgtgtacagttagtatttgtcaaatgaaaataaaataaaacttcgaataactttgcagttgttaacacagcctcttccagttttctgctaaaagaccagtgaaggcccagggggaatacaacaacaaaaaagactgacaattgctagaaattttgatgcatttctt

SEQ ID NO: 729849 - DNA, 623 bp, Homo sapiens
tttcatcactatgaaactatgtctaacatagaccttcagaaaagctcttcccatctcttttaaaataacataacatgtacgtaacaaaaatacgggataattaaaactctgaagacagaggatagtgcttattttttgttaatcaccttcaacttcaactaaagggaaagcctgtttctaagtcttctggttccagttaccactgaagaaaaggaatgtgcattgctgccactggtgatatttgtgacttctagataaacagtgccttctagtctcctgtgtattattcttttcagcattaataaatttatttaaaataaagttatttgagttaatcaaattcttgtgcttggaagtgaaataatcagattttaacttacatttaaattttagagaggtctgaattgattatttaaatctcartaatttattgaaacatcactgtgtgccccataaatgtgtacagttagtatttgtcaaatgaaaataaaataaaacttcgaataactttgcagttgttaacacagcctcttccagttttctgctaaaagaccagtgaaggcccagggggaatacaacaacaaaaaagactgacaattgctagaaattttgatgcatttctt

SEQ ID NO: 729850 - DNA, 561 bp, Homo sapiens
aatttaaaatgatcactgaatagaattgttttatgcttgtatgtaactcctgaattttcctcaacaagaatttcaatagaaatgcaatgcttttgttataaaaatatatagcaagtaaaaaatatagaaaataaatttggctataaaacttagtcattagaagacataaaatggarccatccttctgatggaattcatgccataatttttttctattatagaattttggattaggcatttattttaagatgtggcaagagatattttgaccaaatttttagtgatatacatgagttagtttctcctgaactgtaaattagttcaaatagaccaaaaaatggaaagagttatcttgagtctaagaagagtgaaaatagttgttttctgttcattttgttttaatcaaagtttgaatacaactcttgttatttgtattaactccaatcaaatgaaaaatggggcaggtaggctagttgctgttgatggttgaagggtatgggtgtgtgcatgtgtatgtgtgtttaaactttgtaacttctacttcatttttaatacatcaaa

SEQ ID NO: 729851 - DNA, 555 bp, Homo sapiens
aaagccttgcatttttcaaatggatctcatggaatgctcattctaggggaagctaaacaccatgtaagaaggatgactactgtgagaccactgtgatgtgaggaagttcaggctagttatgtgacgagagacagagaaagaaagagagagagagagcccagacagcactgtgctcttccagacattccaracaaggtaccagacatgtgaaagaacttattttgtatctccagcccaaacactatctaactgcaactgcaaattcatgacagctgtccagctgagtccagtcaatttggaagtgggataatgtacacacacacacacacacacacacacacacacacacacacacacacaccgcattccctttaggaccagttgagggtggaagctgaaagtaggttaaggagactattagtaaagtctgtcttaaaaatgtcagcggatttcttttagttgtgcattttaatattcaggaaaagacatagaaaaaaagaaaaaaaatctgttcagttttcaagtaaaatctagaggaagcatttctgagacaat

SEQ ID NO: 729852 - DNA, 555 bp, Homo sapiens
aaagccttgcatttttcaaatggatctcatggaatgctcattctaggggaagctaaacaccatgtaagaaggatgactactgtgagaccactgtgatgtgaggaagttcaggctagttatgtgacgagagacagagaaagaaagagagagagagagcccagacagcactgtgctcttccagacattccagacaaggtaccagacatgtgaaaraacttattttgtatctccagcccaaacactatctaactgcaactgcaaattcatgacagctgtccagctgagtccagtcaatttggaagtgggataatgtacacacacacacacacacacacacacacacacacacacacacacacaccgcattccctttaggaccagttgagggtggaagctgaaagtaggttaaggagactattagtaaagtctgtcttaaaaatgtcagcggatttcttttagttgtgcattttaatattcaggaaaagacatagaaaaaaagaaaaaaaatctgttcagttttcaagtaaaatctagaggaagcatttctgagacaat

SEQ ID NO: 729853 - DNA, 434 bp, Homo sapiens
cacattaaaaagatcattcgtcatgaccaagtgggatttaagggatgcaaggatgattcaacatatgcaaattaatcaacaagatacatcacatcaacagcatggaggacaaaaacatatgatcatttcaactgatgctaaaaagcatttgataaatttcaatatctcttcgtaataaaaagactcaaaaactgaggatagaagggacatacctcaayacaatgaaagtcatatatgatatacctacagttagtgtcattctgaaaaactaaaagcctttcctctaagatctggaatatggcaaggatgcccaccgtcaccactgttactcaacatagtactggaagtcctaactagaccaatcagacaaaagaaagaaagaaagtgcatccaaattggaaaggaaaaagtcaaattatccttgtttgtagata

SEQ ID NO: 729854 - DNA, 460 bp, Homo sapiens
gccactattgcatatatatccaaaggaaaggaaatcagtacgtcaaaaagatatttgcactctcgtgtttattgcagcactatttacaatagccaacatatggaatcaacccaaaagtttaacaacagatgaatggataaaggaattgtgatatatatatagagagagagaggatataatgttgagtgaaataagccagagactaaatgacagatactgtataatctcactcatacatggaatcttttttaaaawgttgatataaaagcagagtaaaactgtggttactacagactgggaaggggaggaggaataatagaatggtaagaggttgatcaactagtacaaatttttaattaaatagaaaaaaatgaattgggtggttctattgtaaaataggatgactgtagttaacattaaaatattccatattacaaaacacttagaaaagaggcttttg

SEQ ID NO: 729855 - DNA, 520 bp, Homo sapiens
tcatgtccttagcccactttttgatgggattttatttttcctgctgatttgtttgacctccttgtagattctggacattagtcctttgtcagatgcatagtttgctaagattttctcccagtctgtgggttggttrtctgtttactctgctgattatttcttttgctgtgcagcagccttttagtttaattaagtcctatctatttatctttgtggttgcatttgcttttgggtacttggtaaagaagtatttgcctaagccaatgtctagaagggtttttctgatgttatcttctagaatttttatgctttcagatcttggatttaactctttgatctatcttgagttgatttttacataaggtggaagatgaggatccagttttattcttcttcatgtgacttgccaattatcccagcaccatttgttgaatagggtattctttcctcactttatgtttttgtttgctttctcaaagatcagttggctataagtgtttgggtttatttctgggttctc

SEQ ID NO: 729856 - DNA, 606 bp, Homo sapiens
atgtggattttgtcaaatgctttttctatgtctattgagatgatcatgtcatttttgtttttaattctgtttatgtgatgtatcacatttattgacttgcatatgttaaaacatccctggatccctggtgtgaaatccacttgatcatgatggactatctttttgatatgctgtgggattcatttagctagtattttgttgaggatttttgcatctatattcatattcatcagggatattggcctgtggttttatttttgttacgtgcttccctggttttggtattagagtgatactaaattcatagaatgatttaaggagtattccctctttctctgtcttttcgaatagtgtcagtaggattggtaccaattcttctttaaacrtctgatagaattcagctgtgaatccatctgatcctagatattttttttggcagttttttaattaccatttccatctgactgctttttattggtttgttcagagtttctatttcttcctggtttaatctaggaggattgtatatttccaggaatttatccatctcctctagattttctagtttgtgtgcataaagttgttcatagtagccttgaatggtct

SEQ ID NO: 729857 - DNA, 646 bp, Homo sapiens
tgctttctagttctccagagtctatttataaattacacttaaataggtttaaaattacttatctctctggtaggtttttaattccagatgaagtattccaacagaaaaaaatcatgtcagatttatttttacatgtttacaaacagccatttttaaatccactctgaaacttttaccttgatcaccccaatatgacagcacagttgtatctattgacattgaccagtattaaattgaagaactsctgtaaattacctctccattcagatctatatgtataaaatgcagtttttctcctcttacatgcaacactatttttttaacttctcaatattttgaaaccatctatttgtccatgaaaaaaaaaattcttcaaggattaattgaacaaacaatttggtgaagacttctgtgaaattatcacaagagatagatcataataggtggttgtaacaagaaaaaaactcctaagaaaaggttttcagaggactctaagggtcaaaaatctcccatgggctttgcaaacagcagccccagttgcaaatccgggacctggctttaggtacatgaagctcagctcaggttgtcgctggcacaaagggtcagctctaaatgaaattctaagtaagtgaattccatctcagtg

SEQ ID NO: 729858 - DNA, 546 bp, Homo sapiens
ggtctcctaagttcataaacttagttacagagggaatgaaagtgaccagaaagttgaaaaggcttaaatagattagtatagaggaagggatataaggtaaaacataagatcctctatgaacaaaccattttttttccctcaatttttatatcctgtttgttctccccttcaaactgcttaatcacttagagttcctcaaatacgccatacagttatacttggacaagctattttctgtgtttttccctgcttgaagggacttttcgcagtaaggtatgttcttgttttcctacatatctttacaggaacaagtacaaatatttatgaatacctactatgcactaaccactgtgttagagacataaaawcaattgtcttaatgaaccatcacataaactctgtattgtaggcataattatccccattttagaggtaaaaaactggacttggaaagatataatgacttgtccagatacacatctcgtacctggtgggttagaaatttgaatgtattactctctccaaagtttgtgttctagtctcaat

SEQ ID NO: 729859 - DNA, 568 bp, Homo sapiens
tggctttaaaaaatcaagttaacatgaattctacagccacacacacaacaatctcccataaccttagagagatggaaatggatccttctccagtccagcctccagatgagaaaacagcccagccaacatcttgacagcaccttatgagatcctaagagaggacccagctaagttgtcctcattactgactcagaaactgtcagatattaactgtttttgcaggatgtgacggctcacacctgtagctccagtgatacggtttggctctgtgtccccacccaaatctcacctcaaattgtaatccccataatccctatgtgtcragggagggaccaggtaggaggtgattgaatcatgggggtggtttctcccatgctgttctcgtgatagtgagtgagttctcacaagatctgatggttttataaggcagttttccccactcttgctcagtctctcttgcctgctgccatgtaagatgtgcctgcttctcttctaccataattgtaagtttcctgagtcctccccaaccatgtggaactgtgagtcaattaaacctactttgttttta

SEQ ID NO: 729860 - DNA, 638 bp, Homo sapiens
tcctgttacacattatctcatcatccaatggaactgtgacaaattcatcatttaaatccaattaattagcagattttagaagctactgtgtttttaagtatctttatatcgtagattatttatatacatgtactttatcatgtaatctaccagaagaaaagtaaaaattgcctcaagtagtttgaaatttccaaacttagcattagtcttccatggaaatttatctatggatagaaatggtatgtcctgttatttaagaacattctcttaatcayatgttgtagcagaaattcaaaataatagatagttttttaaaatgtcaatttctggtttcaaaataaccgcaagcacagttgaatatacatgatactttcagtaaattatcaagcagtatcaatgtttctaacataatatttgcaaagtattgaactacctggtttcctttcaagtagttttgatatacattttatatactttttaaacaaatatgcttactttgttctggtaactattcttaatgattgacatgtattaactcttaacctcacaacaaactatgtgacaggtactataattatccccattttacagatgaggaaagtgaagtccagatttaagtagcttgaccaaagtcattc

SEQ ID NO: 729861 - DNA, 587 bp, Homo sapiens
atgtagtctacttgccacctggtcaagggcactcaccgtattgttactcattgtgtaacactgggctgctgcctccatttagggtatgcctgagcacatgcttggcatttctgacaagcctcccaaaggtcttgcttggtcagggacagaccccaacactaattgacctgttgcataagtttaattcccatatgtcccaatttctggtgtagccacaaggccacatctcgtgttggtgctgactctagccattggaacttggccaaggcatttgccttatcattgttggggttgcaaaaaagcatatggcctggcacatgayaaataattacctctttctgatggcccattttccagaggtcttgccacatggcctggccccaaatgagtcggtggccaactagctacttctgtattttccaggtacttaaccacaaggttaagctttgatagactgcccagttatcagtacagattaccaaaggtgtcacctccttggtgatcaccatccatactactctaagttcagcccattggctactttgtccacacccagtttcaaaccatatggtgtcagtagtagactg

SEQ ID NO: 729862 - DNA, 586 bp, Homo sapiens
taaaattgggctggtttcagtctccccttttacttatcaatttctccatcatggcgaataaggtcatcaacttttttgcctggttcatgctagggatgggtatcatgggataattgacttagctagagtccttgtctgagttctaaatattaatttaaggccattcaaggattcacaagaccatggctatcccctggaggagtcccagaggagcaggttttacccaagcagtgaatccatggcttaacactgcctaacttgacagatgagtgggtggtcagcagcaccgagaaggggctgaccctgttgttgcagacgaccttcagcctggtggatttccaggtcttcagcaggacttgttccccgggtttcagagtgaagaggcacatccatagkgaactggagtcttttggaagcaaactcagagagactaattaatgtgtttcatagttttttttatatataatctagcttgtttcagaggaagaaaaatccttaagtgacaggtattccacgagacagagaaatgatctctcatacaacatttcaaaggggttaagagccaacccacttctgggtgatactc

SEQ ID NO: 729863 - DNA, 648 bp, Homo sapiens
ttgccttggctatgggggctcttttttagttctgtatgaattttaggattgttttttctagttctgtgaatgatggtggtattttgataggaattgcactgaatttgtagattgcttttggcagtatggttgttttcacaatattgattctacccttccaygagtatgggatatgcttccatttgtttgtgtcatctatgatttctttcagcagtgttttgtaattttccttgttgaagtctttcacctccttggttaggtgtgttcctaagtatttttttttttttgcagttattgtaaaagtggttgagttcttgatttgattctcagcttagtcactgttggtgtatagcagagctactgatttgtgtacattaattttgtatcctgaaagtttgctgcattcatttttcagttctagtagctttttggaggagtctttagagttctcagcaaacagcaacaatttgacttcctttttacctatttgtatgccctttatttgtttttcttgtctgattgctctggctaggacttccagtactatgttgaagagaagtggtgaaagtgggcatccttgtcttgttcctgttctcagagggaatgctttcaactttttccctttaaatattatgttggctgtcggtt

SEQ ID NO: 729864 - DNA, 554 bp, Homo sapiens
ttagattttctctcttcttttcttggttattcttgctaatggcctatcattttttttatcttttcaaagaaccagctttttgtttatttatcttttgtatttttttgtgtgtgtcaatttcatttcgttctactttgatttttgttatttcctttttctgctgggtttgggtttgttcttgtttctctagtttcytcaggtgggaccttagattgtgtatttgtgctctttcagactttttgatgtaggcatttaaggctatgaactttcctcttagcacaatctttgctgtatcccagaagttttgataggttatgtcactattattgttcacttcaaataattttttaatttccatctgaatttcattttttacccaatgatcattcaggagcaggttatttaatttccatgtctttgcatggttttgagggttccttttggagttgatttccagttttagtccactgttgtctgagagagtacttggtataatttcaatcttcttaaatttattgagacttgttttgtggcctatcatatggtctatcttg

SEQ ID NO: 729865 - DNA, 636 bp, Homo sapiens
tgaacatagatgtatttaatatgtctcatctacaaacacaagcccaccaaacatctgtttccacaagaaagcgttaatgtgcctcttaatatccatgatatgatagaatccattgttttcaggagtcaagggaacactaaagattggtaggcatgcaaagccacacatagtgtagctttaggctgctagtatttgctgatctttgttctctttgcaaaaggataaaagaagaagagaaatttgtccaaaggacccaggtaaacaactttttacctatgtttaaaaccttcataaatttgccaggatgattcatatgtattctactatatataaaagaaagttctktttctaaaaaaaaaaaaaaaaaaaacaaaaaactaagaaaacacccatttagaaccactacatacacatggagaaatgacattatagctgaatgtaaatttaggagaccgaataaaagttatttaggtagacaaggcagggacaagtattctgaaataaaggaatagcaagagcaaaagaatgaggcacaaaagagttttccatttttctttctctgtcctctgactccagatcctttcctgccacattctttattcctatcactaaaataaatggttccattaaacaata

SEQ ID NO: 729866 - DNA, 636 bp, Homo sapiens
tgaacatagatgtatttaatatgtctcatctacaaacacaagcccaccaaacatctgtttccacaagaaagcgttaatgtgcctcttaatatccatgatatgatagaatccattgttttcaggagtcaagggaacactaaagattggtaggcatgcaaagccacacatagtgtagctttaggctgctagtatttgctgatctttgttctctttgcaaaaggataaaagaagaagagaaatttgtccaaaggacccaggtaaacaactttttacctatgtttaaaaccttcataaatttgccaggatgattcatatgtattctactatatataaaagaaagttctttttctaaaaaaaaaaaaaaaaaaaacaaaaaactaagaaaacacccatttagaaccactacatacacatggagaaatgacrttatagctgaatgtaaatttaggagaccgaataaaagttatttaggtagacaaggcagggacaagtattctgaaataaaggaatagcaagagcaaaagaatgaggcacaaaagagttttccatttttctttctctgtcctctgactccagatcctttcctgccacattctttattcctatcactaaaataaatggttccattaaacaata

SEQ ID NO: 729867 - DNA, 636 bp, Homo sapiens
tgaacatagatgtatttaatatgtctcatctacaaacacaagcccaccaaacatctgtttccacaagaaagcgttaatgtgcctcttaatatccatgatatgatagaatccattgttttcaggagtcaagggaacactaaagattggtaggcatgcaaagccacacatagtgtagctttaggctgctagtatttgctgatctttgttctctttgcaaaaggataaaagaagaagagaaatttgtccaaaggacccaggtaaacaactttttacctatgtttaaaaccttcataaatttgccaggatgattcatatgtattctactatatataaaagaaagttctttttctaaaaaaaaaaaaaaaaaaaacaaaaaactaagaaaacacccatttagaaccactacatacacatggagaaatgacattatagctgaatgtaaatttaggagaccgaataaaagttatttaggtagacaaggcagggacaagtwttctgaaataaaggaatagcaagagcaaaagaatgaggcacaaaagagttttccatttttctttctctgtcctctgactccagatcctttcctgccacattctttattcctatcactaaaataaatggttccattaaacaata

SEQ ID NO: 729868 - DNA, 636 bp, Homo sapiens
tgaacatagatgtatttaatatgtctcatctacaaacacaagcccaccaaacatctgtttccacaagaaagcgttaatgtgcctcttaatatccatgatatgatagaatccattgttttcaggagtcaagggaacactaaagattggtaggcatgcaaagccacacatagtgtagctttaggctgctagtatttgctgatctttgttctctttgcaaaaggataaaagaagaagagaaatttgtccaaaggacccaggtaaacaactttttacctatgtttaaaaccttcataaatttgccaggatgattcatatgtattctactatatataaaagaaagttctttttctaaaaaaaaaaaaaaaaaaaacaaaaaactaagaaaacacccatttagaaccactacatacacatggagaaatgacattatagctgaatgtaaatttaggagaccgaataaaagttatttaggtagacaaggcagggacaagtattctgraataaaggaatagcaagagcaaaagaatgaggcacaaaagagttttccatttttctttctctgtcctctgactccagatcctttcctgccacattctttattcctatcactaaaataaatggttccattaaacaata

SEQ ID NO: 729869 - DNA, 498 bp, Homo sapiens
ttttaggtccttccttcaaaatatatccaaaatccaactacttctcattacctctgttgctaccaacctgagcaaaatcacccgtcttttgtctggactcctgcatgcgtcaccctgcttccatttttactcccccactcccttgaccccttctgttctcagcacaacagccagagggatcctagaaaacatacrtcactgaattaattaatgacttattcatcattctaaaaacatttacaagccagttttgtgttctatttttcaaaggaaatcgaaaagttttcttccttaaatcttccttgctgtcagggagaaaaaagttgaagaaaataacggatcatcaaatttatttccctaaatacttaactctcaataaggcctttttcctacccaagagaggatggccaaaactaagggagcaagtctccataatgccagtccctcaggtaaagcaaggacatgtgccctttatttgaccaacctctccctaccatt

SEQ ID NO: 729870 - DNA, 646 bp, Homo sapiens
cgccgccacgcctgactggtttttgtattttttggtggagatggggtttcgctgtgttggccgggctggtctccggctcctgaccttgagtgatctgcctgcctcggcctcccgaggtgcccggattgcagacagagtctcgctcactcagtgctcaatgttgcccaggctggagtgcagtggcgtgatctaggctctctacaacctccacctcccagctgcctgccttggcctcccaaagtgctgaagattgcagcctctgcccggccgccaccccgtctaggaagtgaggagtgtctctgcctggctgcccatcgtctgggaggtgaggagcgtctctacctggccgccaccctgtctgggaggtgaggagcgcctctgcccrgccaccaccccgtctgggaactgaggagcgcctctgcccggccaccaccccgtctgggaactgaggagcgcctctgtccggctgccccatctgagaagtgaggagcccctccgcccggcagctgccccgtctgggaggtggggggcgcccccgcccggcagcctccccgtctgggaggtggggggcacctctgcccggccaccacgtttgggaagtgaggagcctctctgcccggccgccaccccgtctgggaggtgtacc

SEQ ID NO: 729871 - DNA, 526 bp, Homo sapiens
attgctttcctttgtaggcaatctctttttttttcaggcattataagaattttttgtttctggggttctgtagtttcatcacattgtgtcagggacagagttaatttcatttttcctgcctgggactcatttattatgattttttaaaataraaatatggtttcaccctgttgcccaggctagtcttgaacccctgggctcaaataatcttcctgcctcagcctcccaaagtgttcggattacacgcatgagccactgcgtccagctaggactcattatacttcttaaatctaaggactcatcctgagaatccttagatttgagaagtggggcctgatttggggaatctgaacccaggtgtggtatggaggagcagcccggctaactggattaaatgaaaagcaacagatttggttcataccatttgtttattcaaaactatcatatccccctatcaaggggggaatggtaggctcctcaagatgggtttgaggtgaggtgtaaactaaaaggaagacctgagttt

SEQ ID NO: 729872 - DNA, 626 bp, Homo sapiens
aaaatgcagactggaattcagtacatctggtctgaatctgtgattctgcatttttttttttttaagacagagttttgctcttgttacccaggctggagtgcaatgatgggatcttggctcacggcaaactccacctcccgggttcaagtgattctcctgcctcagcctcgcgagtagctgggattacaggcatgtgccaccatacctggctaattttgtatttttagtggagacagggtttctccatgttggtcaggctggtcgcgaactcctgacctcaggtgattcgcccaccttggcctcccaaagtcctggaattacatgcgtgagccaccatgcccggcccgattctgcatttttaattagccccaagatgctyctggtctggggaccacatattgagaagcatgtctctagactagatatacttatgtccatttgttttagattattacctgaaaggaaatactgaaagtaaaaattctcacagaactctaggattttcagggggcctcataccccaatttagggatcccgtcctggtgtgctactgctacagcatacatagtagcaggcaagcatatagccaggaaggttcagtgagcttgccaagggctcaccctggg

SEQ ID NO: 729873 - DNA, 626 bp, Homo sapiens
aaaatgcagactggaattcagtacatctggtctgaatctgtgattctgcatttttttttttttaagacagagttttgctcttgttacccaggctggagtgcaatgatgggatcttggctcacggcaaactccacctcccgggttcaagtgattctcctgcctcagcctcgcgagtagctgggattacaggcatgtgccaccatacctggctaattttgtatttttagtggagacagggtttctccatgttggtcaggctggtcgcgaactcctgacctcaggtgattcgcccaccttggcctcccaaagtcctggaattacatgcgtgagccaccatgcccggcccgattctgcatttttaattagccccaagatgctcctggtctggggaccacatattgagaagcatgtctctagactagatatacktatgtccatttgttttagattattacctgaaaggaaatactgaaagtaaaaattctcacagaactctaggattttcagggggcctcataccccaatttagggatcccgtcctggtgtgctactgctacagcatacatagtagcaggcaagcatatagccaggaaggttcagtgagcttgccaagggctcaccctggg

SEQ ID NO: 729874 - DNA, 540 bp, Homo sapiens
cagaactgcgagtaaattaaacctctttcctttgcaaattaccctacatagcagtatgagaatgaattaatacactaaattggtacaggaaacagtgggttgttgctataaggctacccaaaaatgtggaaacaactttggaactgggtaataagcagatgttggaacagtttgtagagctcagaagaagacaggaaaatgtggaaaagtttggaacttcctagagactttttaaatggctttgaacgaaatgctgatagtgatagggacmatgaagtccaggctgaggttgtctcagataaaaatgagaaacttgctgggaactgtaaaggtcactcttgtaatgctttagcaaagagactggaagatttctgctcctgccctagagatctgtggaactttgaacttgagagagatagttcagggaatctggcagaagaaacttctaagcagcaaagcattcaagacgtgacagagtataaaagtttagaaaatttgcagccagtctatgcagtgggaaagaaagctcattttctctgg

SEQ ID NO: 729875 - DNA, 562 bp, Homo sapiens
atttataaatagtgctggcactcagaaactgatatcccaaaatatgaaactttgaatgacgaactaaagaagaagccacatggtctctgtgacctttccctcatcttgtctctcaatcttctgtctctcccaaaccagagaatgaagttattctctgacatctccttatctgcctaaaatctggacccaccaaagaagaaaacagttacctctgctcccttcctgaatcttcattcacaggaagagtaaagtctgtcaacacactgggacagacttttgtcattgtatattctccaagcccacagaattcccctaaaaatcatttactactccccctaaaattattcacactttcccaaatccctttcccctaagaagcgtacataagcmcctgtcccctgttggtttggagttaatcactctgtgattttcctccatgcacattaataaaaatttgcatgccatttcgcctattaatccgccttttgtcagtcaattttcaacaaactttcaaaggtttctcttcacctttacaatcgcaaaggtgattacttctgggaac

SEQ ID NO: 729876 - DNA, 589 bp, Homo sapiens
aagaacttgggtaccattgaaaaatgggcccaaaaccccaacagacacttcaccaaataagacctatggatggtaaataaacaataaaaagataatccacctcattcaggaaatgcaaattaaaatgacaatgagatggcactacacatcaatgagaataaccaaaaatcaaaaacactgacaacatcaaatgcttgtgagaatgtggagcaacaggaatgctcatttattgctggtgggaatgcaaaatgatacagccacttcrgaagacagtttggcagtttcttataaaagtaaataggccaggaaggtactgtggctcatgcatgtaattccagcactttgggaggccaaggtgggaggattacttgaacccaggaatttgagaccagactgggcaacatggtgagaccctgtctcaattttatttttaaaaaaactaaatatactcttatcatacatatgatccagcaattatccttggtatttgcattagttcattttcacattgctataaagaaactacctgagattgggtaatttataaacaaaagaggtttaattgattcatagttccacatggctgggg

SEQ ID NO: 729877 - DNA, 591 bp, Homo sapiens
gatgtgtgctttgtgtcctccatgtcctatttttcctcttcttccctacccagccgtttatccaatcccattcacagatccttgcttcatagtcaggtgtaagtggccaacagcataaaatattattactctcagtgggatttgcattttccaagcgactaaaatcctaaattgaaaggaggaaactctagyggggcaaatccagccctgatttagagcagagtttctcagtctcagcactgtggacattttgggctggatagttaatttgggggacttgtgcattgtaggatgtttagcaccacctctggcctcaacttactaaatgccagtagtgcaacaatgctttccccagttaagacaaaaatgtctaagcactgctaaatatcccctggggagagaaatcacgcataattatgatccattggtttagaggattctgcagggaagtggggccttccaggatatcttaaatgacacaggggttataagtgcaaatgccttcagggaccaggcagaaatggaaatgcagaaagcagaagagtataatatgataaggagtggtggggcttgtggcaaaatggagggtgt

SEQ ID NO: 729878 - DNA, 591 bp, Homo sapiens
gatgtgtgctttgtgtcctccatgtcctatttttcctcttcttccctacccagccgtttatccaatcccattcacagatccttgcttcatagtcaggtgtaagtggccaacagcataaaatattattactctcagtgggatttgcattttccaagcgactaaaatcctaaattgaaaggaggaaactctagtggggcaaatccagccctgatttagagcagagtttctcagtctcagcactgtggacattttgggctggatagttaatttgggggacttgtgcattgtaggatgtttagcacsacctctggcctcaacttactaaatgccagtagtgcaacaatgctttccccagttaagacaaaaatgtctaagcactgctaaatatcccctggggagagaaatcacgcataattatgatccattggtttagaggattctgcagggaagtggggccttccaggatatcttaaatgacacaggggttataagtgcaaatgccttcagggaccaggcagaaatggaaatgcagaaagcagaagagtataatatgataaggagtggtggggcttgtggcaaaatggagggtgt

SEQ ID NO: 729879 - DNA, 629 bp, Homo sapiens
aaaaaagtctatttaaaaaaaaatctaatatctcccacaaacattctctactatcatctctttaagggatcaagaagacatggtctgctggtaaaattaccccagtgttgccttcagtggcatcagcctaaataagcatcactgcctcaaagagtcagcacagctgtgtaactgaacattcattttgccttaagtctcaacatgccttaatcagatacttcttctgaatcacctactgtcaatgggggaagaaagttgagagtaggagttagaggtgtcacagttcttactccttgcatcagagtacttaagacacttccttatagaaatttcttctacacaaaaaggcaaatggccaaagaggtcctcgataatatccctcatggtacatataatgtgtgcattaaagagctgagrcagatcaccaaactttataactttagcatttgtgtaaccgtagtatttataagtcttgcaagcaggttcccatttatgtaaatacacagaatacatacatacaccatatgtatatatggtgtaagttacatttattgaatgttcactatgtgctagacactgtactaagtgctttatataggttaagtaatagaatccacagtaatcactga

SEQ ID NO: 729880 - DNA, 629 bp, Homo sapiens
aaaaaagtctatttaaaaaaaaatctaatatctcccacaaacattctctactatcatctctttaagggatcaagaagacatggtctgctggtaaaattaccccagtgttgccttcagtggcatcagcctaaataagcatcactgcctcaaagagtcagcacagctgtgtaactgaacattcattttgccttaagtctcaacatgccttaatcagatacttcttctgaatcacctactgtcaatgggggaagaaagttgagagtaggagttagaggtgtcacagttcttactccttgcatcagagtacttaagacacttccttatagaaatttcttctacacaaaaaggcaaatggccaaagaggtcctcgataatatccctcatggtacatataatgtgtgcattaaagagctgagacagatcaccaaactttataactttagcatttgtgtaaccgtagyatttataagtcttgcaagcaggttcccatttatgtaaatacacagaatacatacatacaccatatgtatatatggtgtaagttacatttattgaatgttcactatgtgctagacactgtactaagtgctttatataggttaagtaatagaatccacagtaatcactga

SEQ ID NO: 729881 - DNA, 625 bp, Homo sapiens
aaagtagggcttaggatgtttagaattatttgtcttttaaaataataaagacctgatcatgtggagagatataggaagaccaaatagagaaataacttaaagatgcaaacagggggaattgaaaggagagatatacttctttctcaaagacagtaaccaaaataaagacagtgaaaggaaagattcagaaatattctgaaaagtatagacaagagaaggtgaaaaaaactggtttaattatctcaatctcctaaataaacagtaattgagataatacctggcaaattgtgagtgacgtarcatgggactaagagtttcaaatgaataaaataaataaataaatcagcttctttggataatgtgttaagaaataataagagatttaattaaaaaaaaaaaatactgcccagaggtgccaagagccctgatacagttagaagtatgaatttgtagtggcccaacacaggccattttaagaaatatattttccagcagttttggaaatctgggagccaaacagcaaaatatttactttttactgattttttttcttggttttaaaatgaatgacaccttagtgagctaatgaagacctgcagtgcccagaatagtgcctggagcatat

SEQ ID NO: 729882 - DNA, 472 bp, Homo sapiens
taaatgtctatcatgcattggttctttaatgactacaggggcattatgagattaaaaattcagaaaggaagttgcttggtttttagcagatgcagggcgagaagtttccaaaatctaccaaatctaaatccctttgaacttgaaatacaaagtaaattcacttttctcaaaagtgtttctgataccagtgtcagagcagttttgaccccagtaagttatttgtaaagagttctaaattaaataaacaaataacataaggtcaataacagaaaacatttcctgaccttactgttttcataatttcataatagggtctttcaaaatgacactaaaaaytcctaatgtttaattaaatttctaaactgaattaattattggataaataatcacagataatgtcttttatgaaaaaagtgtccaattattttaagaagagataaataatacatcatattttatatcatcttggata

SEQ ID NO: 729883 - DNA, 642 bp, Homo sapiens
atgtggttgatattagaataagtgctatgtggtgctgagaagaatgtatattccattgatttggggtggagaattctgtagatgtctattaggtcccattggtccagagctgagttcaagtcctgaatatccttgttaattttctgtctcattgatctgtctaatattgacagtgggrtgttaaagtcttccactattactgtgtgggagtccaaatctctttctaggtctctaagaagatgctttatgaatctggatgctcctgtattaggtgcatatatgtttagaatagttagctcttcttgttgctttgatgcctttaccattatgtaatggccttctttgtctttttaaatctttgttggtttgcagtatgttttaacagagactacgtttgcaacctttcctttttttttttgtctcccatttgcttggtaaatatacatatacctccatccctttattttgagcctatgtgtgtctttgcatttgagatgagtctccttaaatcagcataccaatgggtcttgactatgcaatttgccagcctgtgtcttttaattggggcattgaacccacttacatttaaggttaatatttttatgtatgaatttgatcttgtcatcatgatgctagatgatt

SEQ ID NO: 729884 - DNA, 573 bp, Homo sapiens
ctaattggatattgttgtttatggattgactcatatgcattaaaaagtaaacttctatgtaagaaacttgcccagtggaagcctgataatctcttgtggacttcccaggaaatccagcagattgaggaattaaaagagatgctcatarccacccttgttctagttctaccttccctagaaaagccatttcaccttttcattaatgtaaacaacagggtagccctaggagtgctcacccaagaacatggaggccaccaacagcccgtggccttcttgtcaaaggtcttagacccagtcacttgtgggtggccccagtgtacccaatccatcgcagctacagcactattagttgaagaaagtagaaagttaacctttggaggaaagttaacagtaagcacgccccaccaagttagaactatattaaatcagaaagcagggagatggatcacttactcaagaattttaaaatatgagggtatcttactggaaaaatgtgatttaatattaactactgataattcacttaatccagcaggcattttaacaggggatccaaacttaaaacgggatcat

SEQ ID NO: 729885 - DNA, 646 bp, Homo sapiens
tttctgggctctggggagaggggaaatgcaaaaattatgagacattgaactcagtgctaccctagtataacagaaaacaaaaccagaccaaattcagctgatgtatgcccatggaacgagcatttaaaatagccctagccagagggggatcactgatcccagtggtctaaacttgacttcccacaaacgtcaccatcrtgggctaaagtgctttggggctccaaataaacttgataggcagtttaggccacaagactgaagctcctaggttaagtcctattgctgaaaagagcccagagacagtgaggtggggaacacgtgacatactaagacaccaggcagggaggctaagggattgatggcatcactctcccccaaccccaggatgcacagctcattgcttcaaaggaaacccctttcttctgcttgaggagaggagagggaagaatgaggaagaccttgtcttgcatcttggataccatctcagatagaccaggatacagcaccagtcagaggtgtgaggtcccttttccagggcctatttcccaaataacatttatggacataccctgggaaagaagaggacctgctgccttgaagggaaggaaccagtcctggcaggattcacaacctgctaactgaaggg

SEQ ID NO: 729886 - DNA, 646 bp, Homo sapiens
tttctgggctctggggagaggggaaatgcaaaaattatgagacattgaactcagtgctaccctagtataacagaaaacaaaaccagaccaaattcagctgatgtatgcccatggaacgagcatttaaaatagccctagccagagggggatcactgatcccagtggtctaaacttgacttcccacaaacgtcaccatcatgggctaaagtgctttggggctccaaataaacttgataggcagtttaggccacaagactgaagctcctaggttaagtcctattgctgaaaagagcccagagacagtgaggtggggaacacgtgacatactaagacaccaggcagggaggctaagggattgatggcatcactctcccccaaccccaggatgcacagctcattgcttcaaaggaaacccctttcttctgcttgaggagaggagagggaagaatgaggaagrccttgtcttgcatcttggataccatctcagatagaccaggatacagcaccagtcagaggtgtgaggtcccttttccagggcctatttcccaaataacatttatggacataccctgggaaagaagaggacctgctgccttgaagggaaggaaccagtcctggcaggattcacaacctgctaactgaaggg

SEQ ID NO: 729887 - DNA, 381 bp, Homo sapiens
cactcttgtttttgttttctttttttttttttgtaaacttattgcatgccctaaattttatgtatgaagttttaaataataaatccactccctactcttcttcaaaaatcaccaaggcttcagggtctttcactttttgtttctgtacctctggtgttctttcaccagttaccaccatggcttgactcctcacttcctttaggtgtttgctcgaakgtactgtataggaataaggctttccctgagcacctaatagaaaaatagcaatcctccttccacaatccatccattatattcccctactccttttttttccacagtgctaagtaccatctgatatttatgattttatttatttgtttattgactatctcccaccac

SEQ ID NO: 729888 - DNA, 588 bp, Homo sapiens
agttgcactttttcaaggccaggtgacagttctaatattctggggctagtgtgcacaggtttttgtggtcttattgtagggaactccctgcagtaagcatcaaatctaaatcagtaaacaaatactagggttatagagatcgagaagtgggttttgattttcagccttttgratctagatctctggaatcgagcagaaaattcacaaagcatttgaggaaagtgacccagtttggctattttccagcagtaaactctcccaggtctactttgcatggggtgaactttaggggtatattatgctttttcctcagaagagacattggagagtgtacttgtaaaattcagtttatttgaaagctctttcttcaaaaaagagaaacaaacaagcaaacaaacaaaaattcccagtctgtagttagtgaagaggaccttaagaacagccaggaaacaaaaactaatctcaaccctttgcacaaactattttttatctcctgggaaacaggcagattaagtgtgaaggtgcaacaaataccaaataccaaagagaccacttctttccaagtgtgctcagagttcagtgtgtaga

SEQ ID NO: 729889 - DNA, 468 bp, Homo sapiens
cccagggaagctataaaacccttcttacaatcagacgttgtgaaattatatacggaaatgtaatgaaggtgtgtgtctgtaatatctgtatctatctatctatctatccatatatatatgtatatgtatatatgagatgagagacagagagggagagagagaaaggagagatattgtgtgtgtgtgaaaggaaagagagaacaaacacccgggagagacatcaaccaaaatccagtccccagttttacagcgtgaaagcactgggatgcgggtcgtaaacattttgtgggcttggcggagamtattacgacccaaataaatgcactgtgtagcgtgttcacagggctccggggcctttcgaaaggttctctgtttgcttttgcgttttgcctctggaaccattcgacatccgtggctgatgcgcgcacccgagaggaggccgaagcgtgttccccgcctagggtctgg

SEQ ID NO: 729890 - DNA, 553 bp, Homo sapiens
tcatccagtgctccacaacgtggacttgcctcctggtgtgttttaaaggatcctccaggagctctgcttagccaatcatcatgatggatttttttttttttttttgagacggagtctcactcttgtcgcccaggctggaggttaatggcatgatctcggctcactgcaacctctgcctcccgggttcaagcgattctcctgcctgagccttccgagtagctgggatcgcaggcgcctgccaccacgcctagctaatttctgtatttttagtagagatggggtttcaccacattggccaggctggtcttgacctcctgacctcaggtgatccacctgcctccatgatagattttgccccagctggactctgcagctccacktggaatccaggtgctgcctccagtctgggaaagtcacccaaccccgcagttgtcatgtgggtaacttctgaaacccctaagcctgtcctgtgagaaggaccagcctctccagaactctgcctaggacagcaggtgcctgcttggaagttgggaggatggggagtggtaagtcc

SEQ ID NO: 729891 - DNA, 550 bp, Homo sapiens
aatatgaaacctatgtccttcttacagcactatcctatcttttttgtcccggcacctccaacaatgccctacaccccaggtctcgtgctgtctgctcatcttcctgttagagatgacagacatgaaatcagagaaagcttcatagaaggggcttcaaacagaactgtgccttgaagaacaaggcaggatttccacatgcagaaacaggaaggaaagaatgttctagaaggaggcaatgacattaatgtgaagttaaagagggcagttgctacatgctttgaatttattactgggaccaatcagggcactaggcctggattactttgtcgttggtttaccagtttccctctaacytgtagttttaattcatctttctgaccaatcagggaatttggccttgcttactttgctgttgattgaccctcagcttcctgcccttgtagcaatccactccagtgcaaaaattccaagtgcaaatttgttatccttcctgacatttccagcccagctgtcctttcccagtgcttctaatactcctctgaaccccagc

SEQ ID NO: 729892 - DNA, 620 bp, Homo sapiens
tcattatgtgaaattgctaaaacatgaaaagtgactattaattgagaagatatttcttttttattacattattggtgtctgtaccacttaactggacatagtataaagtgagtttactgtctctcagaattctaacaattctattgcaacctcagcagttgttgccagtgcaagaccattttaggcaaaagtctctttagaggcaagttttaagtaactggaaatgaatacaatgtggaagagaaaagaaggaaagaatgataccttgtaaacgaaaagtctgcgtaagaaaaaaagcagagtgaacaaaattctcgtcccattacactgtatttgcaaattttcacyaataaataccacatagcaatgatgtaggtcactggtgctagctaatgaagtctgaattggtgtctgataagatgcatatttagccatgacagtctatcacctcataatttgttacctagctcccatcacttattccaaatcgataaaaactctaagacagattttaaaaaccaggaattctggcttctagccccgtgagatggcaggcaagtcattaaatcttctgctctaaataattgtgttggtttacttagttttcaaacccagtcatt

SEQ ID NO: 729893 - DNA, 656 bp, Homo sapiens
tgttactttcaagataagaacaaaaaattttattctacctttataacacttctgtcactctacttcagcttggaagcagcttgattaaagctgataggcaacttatgaaatttcaaaaggaaaaagtaacaattacggatgtgtaaatataatttaatctatatcattcccaataaaataaaaaattgctatataaattgaaaaaatgtcatttgtsaatcttaataattataaattaacatcaaatgagaaaggaaagaaggggttctgaaatgcaatagaagagatatataagatacagaaaatttggagacaaacatgataaacatgttttggaagaagtccttggttattcagtctttgactattgtaaaaattatgattgtgcataagtctaagttggtgacttttatatatttttaagcttaaatatatttaaacacttcaacataatttaatttataataatttataaattataatttaatatacttaaatgtttaagctggacaacaagcttaaatattttagtcttatcttagaacttatttaataatccaaagaactttatgttatgtaggttatatctactgatatttatcatattcaaaataaataaaacattaaaacaaaaaatcaacaagcacatattccat

SEQ ID NO: 729894 - DNA, 641 bp, Homo sapiens
tgcaggagcacatactatgaaaaggaatagtcacatattttcatgctttttctgttgaatttacctgttcattcttcacatcccaaaataaaagggcaaatttacaaaacaattatcctgtaaaattaaaaaaatgcttctaaagaactagtatggttaataaaatytcttaaaaaattatacagataactagggtctcgcctggatatacacctgacaccataaactacatgatctgctccataccacaatgcaccaatggaaattctttttgcgccacctcagtttcccaccctagttgtttcagtgctgtagttcaaaagaatgggacaattcttttatcattgcttgttgcctacagtgagacaccatagggaagatgaccactgaacacagtcatttaataatattttccttttctattgtctatcttcctacaaattctatgagccatattaaaataatgaatgatatacaggtataacaaatcgctccttatttatctcaaaagaggttctagtagttgtgaaaattaaatatggcatttcgaatatatatgaaaaatatttgttaattgtaacattatataaactatttaaaatgcatgcaaaatttgttgaaaattattatgatctgtggat

SEQ ID NO: 729895 - DNA, 619 bp, Homo sapiens
aaaataaccaacgggtgctaggcttaatacctgggtgacaaaataatctgtacaacaaacccctgtgacacaagtttacctatataatgagcctacacatgtacccctgaacttaaaagttaaaaaaaacctaaaaaaaaaaaaaagaaaaacaagtcacatgtgggaagaatatgttggttaaacacttacctgataaatcacttgtatgcagaatatataaataactctcacaactcaataattagaaaacaaatgcactgtatcttaaaatcggcaaaagcattgaacctatacttcaccaaagaagatatacagatggtgaaaaaaaaaatcatgaaaagattcccattgttgttagtcaccagggaaatttaaattataatcacacccatctattcaaatggctaaaattttaaaaattgaatgatcctaagtgcttatagtaatgttgagcaagtggaactatcataygttgccaatgccaatgcaaatttttactaccagtttggaaaaacattttggcagttacttttaaacttatacatacatttaccttatgactccaaaatctcactcatagaaatttaatcaaaagaaatgaaaacccttgtctgta

SEQ ID NO: 729896 - DNA, 603 bp, Homo sapiens
caaggccagatcaatcattcctccacttattcagagacgtctgcataattgattcttcctttattccctttttctcttcaaacattcaccttattctgtgtacacaagaatgtaaccttgtgagactttagttagtgcccrgtaaatctataaatttataaggagacttatgttcaccttactgcctgcctgtctctctttctacatgtcttccctcatttaaggaagtgtacaaatactaaatctcctgaaaactttttcagaaaagcagccacatatgcatctgtggcttgagtttttcctagacataacctaatgctggcttaatcaacctcaattgattgatatctttgcttcaatcactcatttttattttcatctacatattgtatccattgtataccactataaactgaaatgtacttactgttgctaatgtgaacaaaaatgtatctgagacaaatctcaatcagtttagaggcttattttaccaagcttaaggacatgcctgtgacgcagcctcaggaggtcctgaagacatgtgcccaaggtggttgggctacagtatagttttatacattttagagagacataagacatcaa

SEQ ID NO: 729897 - DNA, 636 bp, Homo sapiens
catgggtgctagtcacagattaatttatgtctgcactgtggattccagaccttttctcatcctgctctgaaaatcagcacttgttattttccttgattgttctttccatctcctttaatcatcttcttctgcaaaactccatatcctgtgccaagactcacctcaaatgttatctcatttgtacaaacctttccaccttatctaggaaaactgatggtgttattttatattcccccgaatcttgtctgtatcttggttattatcatattttccaatgcttattaagaactcatgacatgccatgtaatttactgttcstcatatagactaccttattcaactctcacacatcccctgtaagatagatattgtcttattatgtcacatgaagctaaaaacttatccaaggttttacaggtaggagggagccaggacttgaacttggatgctttgactctaaggccactggaaagcaccacactccgtggggaaatcgcagatactaacttcttttatagtaattttatgtgagctgatccagtctcatggcttcaaatactatcttattgtatgttgattatgctgaaatttacaacttttctctgaaaaccagatttgtatcatcactggggtttc

SEQ ID NO: 729898 - DNA, 643 bp, Homo sapiens
actaccttttgtttatccattttctcatcaattgggcacttgggttatttttaccttttgactaatgtgattaatgcttctatgagcatatttgtacaaacatctctattagacactactttaaattattttagttatacacccagaaacagaattgctggatcatatggtaattttatttttaattttctgagaaactgccatactgttttccatagtggctatatcattttactttcccaycaacagtgcacaaaagttccaatttctccacatcctcaccaacactgttattcaaatgtaatggcaaaatagaagcatttttcgcacacaaaaagaataatacaatttattgtccacataactgaagtaaaagaactattaaagtttgtgctttagcaataagacagtgaactcaggatgaaggtgagggtctaagaatttctgagttgaactacagttttagaacatgtattggtaaatttactttaacattaatcataaaaatataaatacccctttttaaaagggaaaaactagaactatgagcaataacaagattttgtgggaagtgttcaatggatagttaaagcattctatggaaattctcaggataacaaaagagataatgagtagcaacagt

SEQ ID NO: 729899 - DNA, 516 bp, Homo sapiens
gagtaatccatggcaataaattgggatagaagttattcctggaggtggtgatgactggtatgggacacaaggaagccacctggggctgggaatgttctagttcttgatctgggagatggtcatgcagtcgtaggcctgtgtaagacttcctcgagctgtccacataagatttgtgcactttagctgaatgtggtggcttacacctggaatcctagcactttgagaggctgaggtgggcagattgctagaagccaggagttcgagaccagcctgagcaacatagtgagccccctgactctaaaaaaaaaawttttttttttaattatctgagcatgctggcatgcacctgtagtcccagctacttaggaggccgaggtggaaagattgcttgggcccaggagattgaggctgcagtgagctatgatcacaccacttcactccagcctgggcaacggagcgagaccctatctcaaaaaaataaataaaatatttgtgcagttctctgtatggaaaatg

SEQ ID NO: 729900 - DNA, 516 bp, Homo sapiens
gagtaatccatggcaataaattgggatagaagttattcctggaggtggtgatgactggtatgggacacaaggaagccacctggggctgggaatgttctagttcttgatctgggagatggtcatgcagtcgtaggcctgtgtaagacttcctcgagctgtccacataagatttgtgcactttagctgaatgtggtggcttacacctggaatcctagcactttgagaggctgaggtgggcagattgctagaagccaggagttcgagaccagcctgagcaacatagtgagccccctgactctaaaaaaaaaaattttttttttaattatctgagcatgctggcatgcacctgtagtcccagctacttaggaggcygaggtggaaagattgcttgggcccaggagattgaggctgcagtgagctatgatcacaccacttcactccagcctgggcaacggagcgagaccctatctcaaaaaaataaataaaatatttgtgcagttctctgtatggaaaatg

SEQ ID NO: 729901 - DNA, 532 bp, Homo sapiens
gcgcccggcccctcccctttatttttccccacagttctgcattcagctcagctctgtcttctgtcttttttttgagatggagtcttgctctgtcacccaggctggagtgcagcggcacaatcttggctcactgcaacctccacctcctgggttccagtgatyctcctgcctcaacctcctgattagctgggattacaactgtgtaccaccatgctcggctaatttttgtatttttagtagagacagggtttcaccatgttggccaagttggtctcgaacacctgacctcaagtgatccacccgcctcagcctgccaaagtgctaggattacaggcatgggccaccgcacccggccaggtctgtcttcttagctcacaggttgtacaggtctcctgctttctgcctctggaagtttctgaaacaagtactcagacattttccctttgaaaatttccctgcagacctcagaccagggttcaagtctccaaggtcagtgtccctgagccatagctccaactccctatgccagatt

SEQ ID NO: 729902 - DNA, 532 bp, Homo sapiens
gcgcccggcccctcccctttatttttccccacagttctgcattcagctcagctctgtcttctgtcttttttttgagatggagtcttgctctgtcacccaggctggagtgcagcggcacaatcttggctcactgcaacctccacctcctgggttccagtgattctcctgcctcaacctcctgattagytgggattacaactgtgtaccaccatgctcggctaatttttgtatttttagtagagacagggtttcaccatgttggccaagttggtctcgaacacctgacctcaagtgatccacccgcctcagcctgccaaagtgctaggattacaggcatgggccaccgcacccggccaggtctgtcttcttagctcacaggttgtacaggtctcctgctttctgcctctggaagtttctgaaacaagtactcagacattttccctttgaaaatttccctgcagacctcagaccagggttcaagtctccaaggtcagtgtccctgagccatagctccaactccctatgccagatt

SEQ ID NO: 729903 - DNA, 470 bp, Homo sapiens
agtggactggatgagaaaagagttgattgagcctctcgccccgctaccagctacatcaggcaccgcagggtgtgtctaatctgggaggtgtcagggacaggtgtgtgtgtgttgtccaggggcctgagccccaggaggccatggcccatgtctttccctgggcatccatgtgtaggtctgtgtgtgggccagtgcacagacaggtgcatcccygtgatgtgaaatttgcacgttgcacccgtttgttggaaactatttccagataactgagatgggggccaggcacgctggttcacacggataatcccagcattctagccagggcaacagagcaagaccctttctctaaaacagaaagtctgagctggcacctgtgtggttctgtgtctgtatcaatgcctaataatcaaacattatgctgtgtgtggctctgggtgcatgttctcaagtaaccttctcatctgttcctt

SEQ ID NO: 729904 - DNA, 593 bp, Homo sapiens
taaggaggcccgaaaacacgttagaatcccatttctttttatttcttcttcttcttttttttttttttttcagacacagactttcactctgtcccccagactggagtgcaatggcacgatctcagctcgctgcaatctccacctcccagggtcaagcaattctcctgcctcaacctccccagtagctgggatgaccggcactcgccaccaagcctagctaatttttttgtattttgactagagatggggtttcaccatgttagtcaagctgctcttgttttgttgttgttgttgttgttgttgttgtttgatactgagtctcgctctatcatccaggctggagtgcagyggtgcaatctcggctcactgcaatctccgtttcccaggctcaagtgattctcctgcctcagcctcccaagtactacaggcgcaagccactgcacccagctaagttttgtattttcagtaaagacggggttttaccatgttggccaggctggtcttgaactcccgacctcgtgatctgccctcctcggcctcccaaagtgctgggattacaggtgtgagccaccacgcccggcctagaattccat

SEQ ID NO: 729905 - DNA, 366 bp, Homo sapiens
aagcaaaccccagtgtaattaacaagactgaggatacctgtaatcccagcactttgggaggctgaggccggcagatcacatgagttcaggagttcgagaccagcctggcaaaccatggccaacatggcaaagcccagtctctactaaaaacacagaaattagccaggtgcggtggtgcrcatctgtaacccctactacttaggagaattggattgaacccgggaggcggaggttgcagtgaactgagatcgcaccactgcactccagcctgggtgacagagtgattctccatctcaaaaaaaaaaaaaaaaacaacaagacagaggagaggaggggcagagtcttccagaacatcttttttttttt

SEQ ID NO: 729906 - DNA, 635 bp, Homo sapiens
gcaagatcctccagcccaacagggggcgatgagccgatccttgagcgggtttgccccgccggagtaatccggaagaggcctcttattagggctctggtggcgacggtggcggacacttggggtctggacgcaacggcggcgggagcatgaacgcccctccagccttcgagtcgttcttgctcttcgagggcgagaagtaagtgacgccggctgcggagggccraggtgcgcgggcctgcggctgtcgcattctggggtgtctcctgcccatctcttgccccgggagggaaacagcttttgcttgatcgtctgctcggcctgtgtcagccaaatttaaggccgttccgcgaggtagtcgcgagtgtgttcattttgcagatgaggacactgaggcttggaggcgagcaagttgccccggacacaggaagtggcggcgcttgtattcgaacccagagtgtctggttctccatagcccttttcctctgggatctggcagcttcctctttttgtctctcgcccgccacctccatccttcatcccctccgatctgtcagcggcctgcgtaaaagccgcagtggctcctcgctgcctgcgggttgaaggagtccaggggagagagcttgggctcactctgt

SEQ ID NO: 729907 - DNA, 635 bp, Homo sapiens
gcaagatcctccagcccaacagggggcgatgagccgatccttgagcgggtttgccccgccggagtaatccggaagaggcctcttattagggctctggtggcgacggtggcggacacttggggtctggacgcaacggcggcgggagcatgaacgcccctccagccttcgagtcgttcttgctcttcgagggcgagaagtaagtgacgccggctgcggagggccgaggtgcgcgggcctgcggctgtcgcattctggggtgtctcctgcccatctcttgccccgggagggaaacagcttttgcttgatcgtctgctcggcctgtgtcagccaaatttaaggccgttccgcgaggtagtcgcgagtgtgtycattttgcagatgaggacactgaggcttggaggcgagcaagttgccccggacacaggaagtggcggcgcttgtattcgaacccagagtgtctggttctccatagcccttttcctctgggatctggcagcttcctctttttgtctctcgcccgccacctccatccttcatcccctccgatctgtcagcggcctgcgtaaaagccgcagtggctcctcgctgcctgcgggttgaaggagtccaggggagagagcttgggctcactctgt

SEQ ID NO: 729908 - DNA, 608 bp, Homo sapiens
atcacgaggtcaggagttcaagaccagcctggcctagatggtgaaaccctgtctctactaaaactacaaatattagctgggcatggtggcatgcacctgtaatctcagctactcagaagtctgatgcaggagaattgctaaaaccsaggagggagaggttgcagtgagccgagattgcaccactgcactctagcctgggcgacagagcaagactccgtctcgaaagaaagaaagaaagaaaggaaattccccagggaagtacctcggctgatttcataaacaggtaccgaaggaagcagaggcatgtggaggacttccccacctcatgcagctatttgggccgtggcgtctgaaatttattatttcagagtcacccctttgatgaccttggcagtgaactgcagtcatctgtttaggcctttccatggcccacgtcaatgccgttatttctgtttgttgcacatttgatttccttgttgttggcatttagaaggccccctgcttcccagatcacaccacgggcatggaccacagagattgcatcttgtgagtctgtagaaatggtcaaggccttgtcctctcttaggtccagagctcaggtgaatgca

SEQ ID NO: 729909 - DNA, 608 bp, Homo sapiens
atcacgaggtcaggagttcaagaccagcctggcctagatggtgaaaccctgtctctactaaaactacaaatattagctgggcatggtggcatgcacctgtaatctcagctactcagaagtctgatgcaggagaattgctaaaacccaggagggagaggttgcagtgagccgagattgcaccactgcactctagcctgggcgacagagcaagactccrtctcgaaagaaagaaagaaagaaaggaaattccccagggaagtacctcggctgatttcataaacaggtaccgaaggaagcagaggcatgtggaggacttccccacctcatgcagctatttgggccgtggcgtctgaaatttattatttcagagtcacccctttgatgaccttggcagtgaactgcagtcatctgtttaggcctttccatggcccacgtcaatgccgttatttctgtttgttgcacatttgatttccttgttgttggcatttagaaggccccctgcttcccagatcacaccacgggcatggaccacagagattgcatcttgtgagtctgtagaaatggtcaaggccttgtcctctcttaggtccagagctcaggtgaatgca

SEQ ID NO: 729910 - DNA, 608 bp, Homo sapiens
atcacgaggtcaggagttcaagaccagcctggcctagatggtgaaaccctgtctctactaaaactacaaatattagctgggcatggtggcatgcacctgtaatctcagctactcagaagtctgatgcaggagaattgctaaaacccaggagggagaggttgcagtgagccgagattgcaccactgcactctagcctgggcgacagagcaagactccgtctcgaaagaaagaaagaaagaaaggaaattccccagggaagtacctcggctgatttcataaacaggtaccraaggaagcagaggcatgtggaggacttccccacctcatgcagctatttgggccgtggcgtctgaaatttattatttcagagtcacccctttgatgaccttggcagtgaactgcagtcatctgtttaggcctttccatggcccacgtcaatgccgttatttctgtttgttgcacatttgatttccttgttgttggcatttagaaggccccctgcttcccagatcacaccacgggcatggaccacagagattgcatcttgtgagtctgtagaaatggtcaaggccttgtcctctcttaggtccagagctcaggtgaatgca

SEQ ID NO: 729911 - DNA, 461 bp, Homo sapiens
ccttggcctcccaaagtgccgagattgcagcctctgcccggccgccaccccgtctgggaagtgaggagcgtctctgcctggccacccatcgtctgggatgtgaggagcccctctgcccggctgcccagtctgggaagtgaggagcacctcttcccggccgccatcccgtctaggaagtgaggagcgtctctgcccggccacccgtcgtctgagatgtggggagcgcctctgccccgctgccccgtctgggatgtgaggagcgcctctgcccggccgcgaccccgtctgggaggtgasgagcgtctctgcctggccgccccgtctgagaagtgaggagcccctctgcccggcagccgccccgtctgagaagtgagaagcccctccgcctggcagccaccccgtctgggaagtgaggagcatctccacccggcagccaacccgtccgggagggaggtgggggt

SEQ ID NO: 729912 - DNA, 622 bp, Homo sapiens
gtgtctcacttctttctcatcctgaagctgaatttagtcataattgttatactgctatagcattcgacacttttcgaaacatgtttattcacaatattacaagcagaggagatttcactgtttttgctttttagaggagaacattggtattcaaagaaatagacaaatttttggggccgggtgcggtggctcacgcctgtaatcccagcactttgggaggccaaggcgggcggatcacgaggtcaggagatcgagaccatcgtggctaacacggtgaaaccccgtctgtactaaaaatayaaaaaattagctgggcgtggtggcaggcgcctgtaatcccagctacttgggaggctgaggcaggagaatgacctgaacccagtaggcggagcttgcagtgagctgagatcgcaccactgcactccagcctgggcaacagagcaagactctgtttcaaaaaaaaaaaaaaaaaaaaaaagaaatagacaaaattttgtttaatctatctattacagtcttggatactgataaatttatagaatccctgagtctagagaagaaaccacacatatcagctttttagttgcaagttaattttgagataagttcaatcttaaaaaat

SEQ ID NO: 729913 - DNA, 590 bp, Homo sapiens
caattcaactggaagttaaggatgctgcctggccactttgagctcctcatggctctaagtcaacagataaagggagttacaatgttggctggggtgattgatctggactaccaagggggaaattggactattacttcacaagagatgtaagaaagagtgtatctggactactgaaaatcacttgggttgtctcagtattaatatgcgctgtgattaaggtcaatgggaaackaaaacttaacctgggcaggacaactaatggcctagaagtcttcagaaatgaggtttgggttatttatcatgtaaagaaccatgatcagctgaggtgcctgctgaaggtaaaaggaatatagtatgggtattagaagatagttttaaataccagctatgaacatgtgactagttatacaaataaagactataattgtcatgagtattttccccttattttgttatgaatatgcttgcgtgtgtgtataaatatattaaacaaatgtattgttttattttattaccttaacatataacttaagctatattgacatattattatttaattactataagtgttaggtcatattatttaagcc

SEQ ID NO: 729914 - DNA, 581 bp, Homo sapiens
aacagcagatttaaactggcatgagaacaaaagcagatttgaggagtcagaagaaagaatcagataacttgaacataggtcaacagaactcaatctgaggaacagaaagaaacaagaataaaatacaatgaacagaacctaagagatttgtgggatgccattaagtacaaccatacacataataagaattccagaaggaatggagaacgataaagcggcagaaataaaatttgaaggaataatggccaaaaacttcctacatttgataaaagacataatctacatattcawgtaccttaatgaactccaaataaggcaaacgcaaaaaatccaaatttaaatatattagattcaatccaaagaaaaaggcagaagtcaaaaaaatcaaaagacccatacaaagcgaatatcttgaaagtaacaagaaaaaaataatgaactgttcctttggctagggacaatagagtttttagttatttttatcttgtactcagttgattttctaggttatctatgtgttcagctctaattctgggatatatgaggtaaaaagaaaacccagagaactcatcattttacca

SEQ ID NO: 729915 - DNA, 581 bp, Homo sapiens
aacagcagatttaaactggcatgagaacaaaagcagatttgaggagtcagaagaaagaatcagataacttgaacataggtcaacagaactcaatctgaggaacagaaagaaacaagaataaaatacaatgaacagaacctaagagatttgtgggatgccattaagtacaaccatacacataataagaattccagaaggaatggagaacgataaagcggcagaaataaaatttgaaggaataatggccaaaaacttcctacatttgataaaagacataatctacatattcaagtaccttaatgaactccaartaaggcaaacgcaaaaaatccaaatttaaatatattagattcaatccaaagaaaaaggcagaagtcaaaaaaatcaaaagacccatacaaagcgaatatcttgaaagtaacaagaaaaaaataatgaactgttcctttggctagggacaatagagtttttagttatttttatcttgtactcagttgattttctaggttatctatgtgttcagctctaattctgggatatatgaggtaaaaagaaaacccagagaactcatcattttacca

SEQ ID NO: 729916 - DNA, 581 bp, Homo sapiens
aacagcagatttaaactggcatgagaacaaaagcagatttgaggagtcagaagaaagaatcagataacttgaacataggtcaacagaactcaatctgaggaacagaaagaaacaagaataaaatacaatgaacagaacctaagagatttgtgggatgccattaagtacaaccatacacataataagaattccagaaggaatggagaacgataaagcggcagaaataaaatttgaaggaataatggccaaaaacttcctacatttgataaaagacataatctacatattcaagtaccttaatgaactccaaataaggcaaacgcaaaaaatccaaatttaaatatattagattcaatccaaagaaaaaggcagaagtcaaaaaaatcaaaagacccatacaaagcgaatatcttgaaagtracaagaaaaaaataatgaactgttcctttggctagggacaatagagtttttagttatttttatcttgtactcagttgattttctaggttatctatgtgttcagctctaattctgggatatatgaggtaaaaagaaaacccagagaactcatcattttacca

SEQ ID NO: 729917 - DNA, 642 bp, Homo sapiens
tttgctatattttgcacctgtaaatatatgtcttgatccatttggttcgttttaaagtcagggggttaattgggaaagaatgagatcctataaattgaaacgggtatttgtgggaagaccctgatgaaactgggagcattgagcctctaaattctgaagattcttcttgtccaatggaaatgacctctacaccctcagcagaagttgcctccmtactcccattggaagtggctatctctcccccagtggtagtggacctcccactcccagtaatagcagtctttccatccagagtgatattggcttttctacctccatctgaaggaattaactccgtattgccctgcattgcctgaggaaatggtaatagtctccactgaggcagttgccatgtgagaaatgcagattttcctcaagactcacccctacaatccctctttgctgctagatctataactagacccagcagaccccgaaagataagttacactccaaataatgagtcatgctacactccaaaagaactattcgagtttttggattggcacaagcaaaaatctaggaaacgtgtaaaatggatagagtatttggggcgagggggcatagtgtgggataatggcgaaaggaacataaacttgaata

SEQ ID NO: 729918 - DNA, 642 bp, Homo sapiens
tttgctatattttgcacctgtaaatatatgtcttgatccatttggttcgttttaaagtcagggggttaattgggaaagaatgagatcctataaattgaaacgggtatttgtgggaagaccctgatgaaactgggagcattgagcctctaaattctgaagattcttcttgtccaatggaaatgacctctacaccctcagcagaagttgcctccctactcccattggaagtggctatctctcccccagtggtagtggacctcccactcccagtaatagcagtctttccatccagagtgatattggcttttctacctccatctgaaggaattaactccgtattgccctgcattgcctgaggaaatggtaatagtctccactgaggcagttgccatgtgagaaatgcagattttcctcaagactcacccctacaatccctctttgctgctagatctataactagacccagcagaccccraaagataagttacactccaaataatgagtcatgctacactccaaaagaactattcgagtttttggattggcacaagcaaaaatctaggaaacgtgtaaaatggatagagtatttggggcgagggggcatagtgtgggataatggcgaaaggaacataaacttgaata

SEQ ID NO: 729919 - DNA, 642 bp, Homo sapiens
tttgctatattttgcacctgtaaatatatgtcttgatccatttggttcgttttaaagtcagggggttaattgggaaagaatgagatcctataaattgaaacgggtatttgtgggaagaccctgatgaaactgggagcattgagcctctaaattctgaagattcttcttgtccaatggaaatgacctctacaccctcagcagaagttgcctccctactcccattggaagtggctatctctcccccagtggtagtggacctcccactcccagtaatagcagtctttccatccagagtgatattggcttttctacctccatctgaaggaattaactccgtattgccctgcattgcctgaggaaatggtaatagtctccactgaggcagttgccatgtgagaaatgcagattttcctcaagactcacccctacaatccctctttgctgctagatctataactagacccagcagaccccgaaagataagttacactccaaataatgagtcaygctacactccaaaagaactattcgagtttttggattggcacaagcaaaaatctaggaaacgtgtaaaatggatagagtatttggggcgagggggcatagtgtgggataatggcgaaaggaacataaacttgaata

SEQ ID NO: 729920 - DNA, 559 bp, Homo sapiens
aaagataagttacactccaaataatgagtcatgctacactccaaaagaactattcgagtttttggattggcacaagcaaaaatctaggaaacgtgtaaaatggatagagtatttggggcgagggggcatagtgtgggataatggygaaaggaacataaacttgaataagctgcatatggtgacatggcctccatgagaagattctgcatttaatgttgcaatttgaaaagttagttaatagtttggttggttagttgactgaaacatggatcaaagatgacccatagtgagcaaattggaaatgcctaaacttccctagtttaatatataagaagagatttaaagggttagaggaattcaggtgttagagtggatttatcatttgagactcactcacccacaccacagtgggagaattcagaagacataccatttaccaatactttgaaaaataagttgttgaagggagcctagtattcttgaagaatgtcatgatagtttttctttgtaggtcaaaccttacagtgggaatcacagccactcaaatggaacacagaaa

SEQ ID NO: 729921 - DNA, 622 bp, Homo sapiens
tcgtcagagctcagatcccaaaccctgctaaaagaaaagttctgaccccatccttaaaatatttcaagagattgtgagctgattctaacttaagcttaaaaaaaaaaaaaaaaaaaaaaccagaatccagtagactacgaatatatttactcatcctccattctgtcagcctatataagaaaggacaagaggtaaatattacttacttcagtctttkctgttcttttatgcaataattacagtatgtagtcaaaaatcctaatgaacatactaataatcaagaaggcatgtaccataccgaaaagcagtgataattattagaaatatatccagatatggcctaaatattaggattatcacatcaaatttaactataacttaaaaataattttgcggaaaagatggaaagaattaatgaatgaagagatggggcttttagctgagacatgggaactatacagaagaacaaatagaaatgctagatattaaaaatcagatatatataatttatttcatgagcttcagatgggactgtataaggaagaggaatatatccttgaagagaaagtttacaaacaaaaatataaatagaaaaggaaaagagtaaacagagaatccaaga

SEQ ID NO: 729922 - DNA, 559 bp, Homo sapiens
aattacagtatgtagtcaaaaatcctaatgaacatactaataatcaagaaggcatgtaccataccgaaaagcagtgataattattagaaatatatccagatatggcctaaatattaggattatcacatcaaatttaactataacttaaaaataattttgyggaaaagatggaaagaattaatgaatgaagagatggggcttttagctgagacatgggaactatacagaagaacaaatagaaatgctagatattaaaaatcagatatatataatttatttcatgagcttcagatgggactgtataaggaagaggaatatatccttgaagagaaagtttacaaacaaaaatataaatagaaaaggaaaagagtaaacagagaatccaagatatgtaaaaacgtatcaatctaacctatgtgcaattaaatcccaaaagaagaaaagcaagacagtaaagaagaagaaatatttaaaagacaatggcaaaaaaacttaacaaaattgatgaaaatatatcaacccaaagatctaagaagtttactgaatgctccaagcagga

SEQ ID NO: 729923 - DNA, 673 bp, Homo sapiens
ccaatgtcttgacttcaaggatcccaccatactatcatgacatccagtctttctggctcattccatctagtaccccaaagccaacccagttttatctcagtgggattatcaacctattgatttagcttagttatctattactgacatatgcattatctattactttccttatgtgcttatcggccttttaatccagcatagattcccgactcattattgtcattttattgtacaccgtatgaacttcttggcccaatttttcctcagtgctactttcctagttaaaattcagcccaacttaatcccarctgaaacccagacagctggtcctatctgtagaaaatgatataatcatggtgctagttatcactgtaatttttaatgtaaaactcaagttgccttttagcactgctagtcattcacaatattttcctagccattcattctccatttatccaagaatattgcttcacagcatctctctccccgtacttagattatttcagagagtaaagagaaacaaaaagtactgctgtcttcattccatatcaacctatatctctattattacataaaaactgagatttgtattcctattaaaatggataaaatgtgcttattcctaagggcagtgattcgccttagaacaacttttattcttgcctattcaagg

SEQ ID NO: 729924 - DNA, 630 bp, Homo sapiens
tgtctctgtcgaacctgctgcacacacacacacactcacagaaagagagagaaagagagggagagagagagaatcctgtaatagttttaatcctaaagtaacacattgaaaaaagagtctcactccttgactttcttcctactgtggtcccatatatacactcctcttccaaatggaacgctatgaagtggctttctatacacactctgtactttttcagtaaccattctcacttgaactcattccaaataggttttagacccatccaggccacagaaactgttcttatcaaggtcttaaagaaattgtatcttgccaaaaccaataatcaatttcagactgcatccawcacttaactctcagaagcatttgatatagtcaaccattcctttttggaaacaatttcttcacttggcatccagaacattacattcagctggttttattattactttactaacagtgcctctttctatcaaagtcagaggttattttcttattttatgccatagtgctttcaggaaatctaatgaaatttatgaatttctttagaatatttttaaatgcgtaggtttatcaaggaaaaatttatatcaatactagtttccaaagatgtactttcaaaccttt

SEQ ID NO: 729925 - DNA, 524 bp, Homo sapiens
tacttgtttaataaaaaatactgagatcttaaaatcaaactctaagacatcaagtcagaaaacataaactactcatttttaattgtagcagtaattttaaaataattttaaaatttaaacaaatgtaaataaaatttaataaaaactctatggcattttaaaaaacaaacacttagaaatacatttcataaaactcatgtaaaacctctacacagaaaactataaaamcttgctcagaaaacaatgatttataatgaagacctttatcatgtttatgaattgggagacttggtatttcaatgtaaattgtttcctagttgttttatgaatttaacaccatgcaaattatagtcacagaaggcttatcttttaatagaaatcgacaaatttaaagtgacttatgaatatgtataataatgcaagagaccaaagagtgccaaagtaattttgaaaaagaagaccaacatgggagccttacattacttgagtttaagaatcactacaaataaacaataataaagata

SEQ ID NO: 729926 - DNA, 613 bp, Homo sapiens
aatccctggggataaattcactcatatgcttgctttctttttttcctttttgttaaatctgttaagattttttttttttaaattacccacagcagagttgtatttcacagctggcatatcaattttagtgtgaagttttaaggatatctgcactataaatggttattgtgttctattatgaagtagtgccactgcgcacagacatctctctcttactgcctctctcattcttcctcgctggattcttctctctctctttctaactcattctcaattctgttagctcagtcaatgggagaagggtttcatgtcagacatacatgtgtacaatatcatgggtgggacagagctaaaaamactgtaggccccagatgcttctgggtgggctgggaagagaaacacattcaacactgaggaaattttattagtacagacacaagaggatttttttcatttatgttaattaatttcttatttcatcatttctctggctacatctacaatcatgttccacttagttgaagatgaaagccaatttactcaccctccaaattgagaactacagtctttcaagctgatgatattacaatgtaattaaataacataattcata

SEQ ID NO: 729927 - DNA, 595 bp, Homo sapiens
tctggaattattatctccactttccataagaggagacagagctccagagaattacatatgctggtggaatggacagaatccaaatgtaagcctgactccaggtctgtttataaaaataatccttcaaatagtccctctgtcccctagcagtgtctgacagtggagatcaagccttttcagaatgtcttgacaagtccaagatattctttactgctcctagatataaacctggaggttttatggaaatatgtacttaaaattcctgtttaatttttgcccttggctgaggttactgaagttctaacattataatgagccacactagtaagatttagagcctcacaatttttaagtaatgtactcataagttatgaactgctacctcataattaaagagtgtcaactgggccacaaaccatgggcattaattaatccttaygtattgtaccagaaaagctttgaacaaatagaagtaattgtcagtacatagagagaatatataatagtctttgcttctagaaaataactgttaatgtttatgataattttctttttttgatttgggacaccaacaccttaaacccctttcccatgt

SEQ ID NO: 729928 - DNA, 573 bp, Homo sapiens
agaaagtagatagaccttgagaagaggaattagaaactggaaacccattaaatcagtcagccaacatgtctgattctcagtctctctcttatttcccttatcgtcacttcttttggtaggcttacatccttctctctcattctgtaaaccatctatctcaactttgatatctatgaaatacgatatggctgtctcacaattttaggtattattgttaccattccagcaactcttagagatttacttatagctacagtcccaattttaaatrtctgagagagacacctacttggtctagtttgctgtctactcattatcagtcaccctgaaggatagagatgggagtggagtctcacagtataagtatcattcctggagacctcatcatacataaaggtggcgtgtggggggtggtgctggtccaagagaaggaagcaacagtgcgttggctggcaggcacctccctcaacacaaggtgtccattcaatgggatttttagtggcaacattttttaaatgattgacttattgtgtatagttctgtgaattttaatagatatatagatttgtgtaa

SEQ ID NO: 729929 - DNA, 573 bp, Homo sapiens
agaaagtagatagaccttgagaagaggaattagaaactggaaacccattaaatcagtcagccaacatgtctgattctcagtctctctcttatttcccttatcgtcacttcttttggtaggcttacatccttctctctcattctgtaaaccatctatctcaactttgatatctatgaaatacgatatggctgtctcacaattttaggtattattgttaccattccagcaactcttagagatttacttatagctacagtcccaattttaaatatctgagagagacacctacttggtctagtttgctgtctactcattatcagtcaccctgaaggatagagatgggagtggagtctcacagtataagtatcattcctggagacctcatcatacataaaggtggygtgtggggggtggtgctggtccaagagaaggaagcaacagtgcgttggctggcaggcacctccctcaacacaaggtgtccattcaatgggatttttagtggcaacattttttaaatgattgacttattgtgtatagttctgtgaattttaatagatatatagatttgtgtaa

SEQ ID NO: 729930 - DNA, 573 bp, Homo sapiens
agaaagtagatagaccttgagaagaggaattagaaactggaaacccattaaatcagtcagccaacatgtctgattctcagtctctctcttatttcccttatcgtcacttcttttggtaggcttacatccttctctctcattctgtaaaccatctatctcaactttgatatctatgaaatacgatatggctgtctcacaattttaggtattattgttaccattccagcaactcttagagatttacttatagctacagtcccaattttaaatatctgagagagacacctacttggtctagtttgctgtctactcattatcagtcaccctgaaggatagagatgggagtggagtctcacagtataagtatcattcctggagacctcatcatacataaaggtggcgtgtgkggggtggtgctggtccaagagaaggaagcaacagtgcgttggctggcaggcacctccctcaacacaaggtgtccattcaatgggatttttagtggcaacattttttaaatgattgacttattgtgtatagttctgtgaattttaatagatatatagatttgtgtaa

SEQ ID NO: 729931 - DNA, 681 bp, Homo sapiens
tagctctacgagatgggttaacaacagtcactcccagacaacaagccttgctaaaaactctaacaagaggacatttatcaaagaatcattttacttcttaaactttcagcatactttgggcacttctcagcattggggccttgtttgtcctttgcatactcaacaatgctaagtaaatgcacttgcagaacgacgagtagataatctgcatttatctcaaaacacactggcacagaactcttccaccgtcacttcctgtctctcccacctcctttactacccaatgagcaaagaatatgtagctcaaagagataaaagtttaacagttccattctaaagacagtcattcctgttaattgacataaacttacttaaagtgtgttattttgtgaagactacatgtttcaaacgtctactgtataatgatagcattgattaaattgtgtgcatataacaaaggctataatctgaaagtatcttckaaatatgaatattatagccaagtacacttcaccttctcacttccttcttatcattatcagcccaaaggacaatatcagcgttccaaaagttgttttcagaagatagtcttacctatgaagttttcgggcatacaagaaaagtatataatatgttttagttcatcatctcttcttttgtcaaacattagcaacctcttta

SEQ ID NO: 729932 - DNA, 579 bp, Homo sapiens
acaagtaaagagtggcatgagaaagcagtgagcatagaactgaaactggatagcatgaaattctggaggtatcagtcagtagcacagtggtataattttctccagctgtgctatggagaaattatacacattgtggccaatgtgtagtgaataaagccatattgtattcagggactatggggtggttataacagaaatttacaaagaataaatagttaaaagtccttcaaagaaagcatggcttactagggaaggcagtatggttaagaggaagttgataaacttggagaaaatgtagaagtcaagaagttggagatcagaagggctggtgctttgtaggaactcagaaaatcttcattttcttctttctggatgtcctctccctatgaatgtttcaccaccacmacctgcctcagctacagtttatacatatgaatagtttcaaatcatgatggtaacagttggctcagagggcaagattaggagccagacttcaacgtgctgctaatccagcgtgtccctgtaacttagatgctggtagtgcttggtggtattggcctctaggagaagctcaaggct

SEQ ID NO: 729933 - DNA, 543 bp, Homo sapiens
aaaggaattaagagagagtaagagagagagagagagagagagaataccgtttaaaggtctggtgcgtgtatttaaagttccagaaaggcaagagaaagaggatgaatcaaaatcaggatttgaagagaaaatggtttagaactttctaaaactgatggaaaacattagtccataaattgcagaaatgatatgaaccctgagcaggagaaataccaaagaactctacatatataggcattattgttaaattgctgaaaaccaaaaatgagaaaaatcttaaaaggagctagagagcaaaggaaaattaccttcaaataagcaacaactagctagtagctgtcttctcaatagaaatgatggaaacaaaaagtcaaycaaaggccatttttaaagagctgaaagaaaataactgtcaacttagaattttatatccagtaaatggatgaatgatcatagaaatatataatggaatacaaggcagtaatgaaaataaatagcctacagctatatacagttgtgaatctcacaaataaattattgagc

SEQ ID NO: 729934 - DNA, 583 bp, Homo sapiens
attaatatcctgctgtatagaagtactttggcaaagttaaggttgtagttccaattcctcatttccaattttttctccagatggaaagatgaacagtttttggtattgaatttttttttaggaagcaagttatttatcattagatatctattcagtaaatgcaatgatacagaaaaatgaagtttttttccctcagatttgaaattaggttttaaaatatggagggagaacaatttgtaagtaatgttcaggaacaaaaataaaacctaatgaaactttagaaactttgatggacatctgtcatcctacatacaattgcattaaagaatagaatttattattattttatctggtttattatgctgtaaaatgaatttttytctttttgtatgtagttttatgaaatttcatacatgtatagattcatggaaccactgtaaaaatcaggatgtagaacatttgcatcacccccaaaaactccttcatgcagtcccttactggtcaccctttctttttagtaaccctggtaactaccaatgtgttctccatccctgtagttttatcttttcaagaatgtcatata

SEQ ID NO: 729935 - DNA, 583 bp, Homo sapiens
attaatatcctgctgtatagaagtactttggcaaagttaaggttgtagttccaattcctcatttccaattttttctccagatggaaagatgaacagtttttggtattgaatttttttttaggaagcaagttatttatcattagatatctattcagtaaatgcaatgatacagaaaaatgaagtttttttccctcagatttgaaattaggttttaaaatatggagggagaacaatttgtaagtaatgttcaggaacaaaaataaaacctaatgaaactttagaaactttgatggacatctgtcatcctacatacaattgcattaaagaatagaatttattattattttatctggtttattatgctgtaaaatgaatttttctytttttgtatgtagttttatgaaatttcatacatgtatagattcatggaaccactgtaaaaatcaggatgtagaacatttgcatcacccccaaaaactccttcatgcagtcccttactggtcaccctttctttttagtaaccctggtaactaccaatgtgttctccatccctgtagttttatcttttcaagaatgtcatata

SEQ ID NO: 729936 - DNA, 596 bp, Homo sapiens
tgattcctgtactatatccacaagtatataaagaatgatgaatgtgtataaaaactatatgttccttgctcagctatggaattaaaagacatgtgaatgtagccacaagtctcttgatttatcatctaattcacaacttgaaagatagtttggccaaatgcggtagcttacacctgtaaatcccagcactttgggaggctgaggcaggcrgattgcttgagctcaggagtttgagaccagcctgggcaacatggcaaaacgctgtttcttcaacaacaacaacaaaaaaaacccgaaaccaaaaattaacttgagtgtgatggcacatgcctgtagacccagctgcttgagaggctgaggcaagaggatcacttgagcctgggggttcgaggctgcagtgagccaagatcacaccactgcactccagcctgagtgacagagtaagaccctgtttccaaaaaaaaaaaaaaaaagaatgaattgactttatttatttatttcagagacaggctcttgctctgtttcccaggcagtcttgaactcctggtctcaagtgatttttccacctaaatctcctgagtagctgggattatagg

SEQ ID NO: 729937 - DNA, 596 bp, Homo sapiens
tgattcctgtactatatccacaagtatataaagaatgatgaatgtgtataaaaactatatgttccttgctcagctatggaattaaaagacatgtgaatgtagccacaagtctcttgatttatcatctaattcacaacttgaaagatagtttggccaaatgcggtagcttacacctgtaaatcccagcactttgggaggctgaggcaggcggattgcttgagctcaggagtttgagaccagcctgggcaacatggcaaaacgctgtttcttcaacaacaacaamaaaaaaaacccgaaaccaaaaattaacttgagtgtgatggcacatgcctgtagacccagctgcttgagaggctgaggcaagaggatcacttgagcctgggggttcgaggctgcagtgagccaagatcacaccactgcactccagcctgagtgacagagtaagaccctgtttccaaaaaaaaaaaaaaaaagaatgaattgactttatttatttatttcagagacaggctcttgctctgtttcccaggcagtcttgaactcctggtctcaagtgatttttccacctaaatctcctgagtagctgggattatagg

SEQ ID NO: 729938 - DNA, 525 bp, Homo sapiens
aaacaagctttcctttaccagaatgctttaaacctttccagtaaagttttggctatttaatccctataaatacctttgtatagattatctttggtactacaaaagttgtgagacaaaggaaagagaggtgctgctttagatttaggattctgccgaggctctttaaaaaaagggaatcttgggccgggtgcagtggctcacacctgtaatcccagcactttgggaggccaaggcaggtgggtcacttcagtccaggagttcgagaccagcctgaccaacatggtgaaaccctacctctactaaaaataaaaaaactagccaggcgttgtgrtgcacacgtttaatcccaactactcgggaggctgaggcacaagaatcgcttgaacctgagaagcagttgttgtagtgagccaagatggtgccactgtactccagcctgggtggcagagggagattctgtttcaaaaaaaaaaaaaaggaattttatattttaggtgtgtcacccttttcaaatttaatgataca

SEQ ID NO: 729939 - DNA, 630 bp, Homo sapiens
attaaaaatccattacagggtcaaaccccttttgtttcattcatctaacatatatgcacagctctggtgaatcctagaagtccaagagctaaagagccgtttgtggcagatttcagagaattgcttaccttgtcaccctaccaccattcctcttttggggaaagcacatgtggtatgtagatgacataataatagcaactatcatctattgagcacttaccatgtgctactctactragtgctttatgtaaataaaattaattttttgtaaacctaaagtaacttctacatgaaaatagatatttcctattagaatggctgccttgaaaagttctatacttattccaacaacataatcattatttaaaacatttttgtaaattgtctccagagcatgtttataaacctaaggaaaagatttctacatcatatatagtcatgttaattttgattttaaaaattattttttatttttatttttttttatttatttattttttgagacggagacttgccctgtcacccaggctggagtgcagtgatgcgatcacagctcactgcagcctccacctcccaggttcaagcgattcttctgcctcagctccccgagtagctgggactggactatag

SEQ ID NO: 729940 - DNA, 630 bp, Homo sapiens
attaaaaatccattacagggtcaaaccccttttgtttcattcatctaacatatatgcacagctctggtgaatcctagaagtccaagagctaaagagccgtttgtggcagatttcagagaattgcttaccttgtcaccctaccaccattcctcttttggggaaagcacatgtggtatgtagatgacataataatagcaactatcatctattgagcacttaccatgtgctactctactgagtgctttatgtaaataaaattaattttttgtaaacctaaagtaacttytacatgaaaatagatatttcctattagaatggctgccttgaaaagttctatacttattccaacaacataatcattatttaaaacatttttgtaaattgtctccagagcatgtttataaacctaaggaaaagatttctacatcatatatagtcatgttaattttgattttaaaaattattttttatttttatttttttttatttatttattttttgagacggagacttgccctgtcacccaggctggagtgcagtgatgcgatcacagctcactgcagcctccacctcccaggttcaagcgattcttctgcctcagctccccgagtagctgggactggactatag

SEQ ID NO: 729941 - DNA, 588 bp, Homo sapiens
gaaaattcccatcagcaaccaagtcagagagagtccgtgacatttgctcctcccatctgaggaccaggcagacctgggctccacttgggagcaagaaccagtctggaagggccttccaagatgatctgggcccagcacctcatttctaaacaagagaacagagggccagagaggagattcaccaagggtcactgagtctcaagggtgagtctgaagccctggaacaatggcgaaggttccagacattgacccaaataccaaggtggatccactctacttctttccagcagcgttgccatgggcaagtcactttattcccctgaatctcagcttttcccttctgtcaaatgggaacaataaaaccttacacatgttaataaccccatctattytacagatgcgggggggaaaaggatgatgaatgtgaaagttattggtgaattttaggtagatttccaaggtgagaagctaggtcctcttcctctggggcccactatcatgctctcttttctctctcctctgccttcccctcctcttcttccttctcatcttcctctcacccctgctgcctccaagaaaggactgaag

SEQ ID NO: 729942 - DNA, 525 bp, Homo sapiens
attttcatcctgagtaacactaattgcccttctgccaagagcatgtggaaggcattgattgatgacactgcagtattttccacttcagcagcagcagccatgtgtgtcttggctgatgcagactttcctcaggtgagcatcttccaggatcagtgactgcaggaaaagtgagccctcatcagcaaactartagttgggttaatagaatgaactacaaaagattaaccccatcctaatgactgatccttccctttgaaacatcacagtgaactatcataatgaggccaaatatttgctcccctgtaagagtgcctccatttatccaaagctgtctttgcttgggtttccccaaatgcagaatctgagagaaggatacaagtacaggtagtttatttgggaggtgcagataacactggtaggagagtggggaaatgtcacaaaacagagaaggcagccaataaaggatgcattatcaagccagcttccactgtgggaaactggagcttaatcctacagggcaactct

SEQ ID NO: 729943 - DNA, 525 bp, Homo sapiens
attttcatcctgagtaacactaattgcccttctgccaagagcatgtggaaggcattgattgatgacactgcagtattttccacttcagcagcagcagccatgtgtgtcttggctgatgcagactttcctcaggtgagcatcttccaggatcagtgactgcaggaaaagtgagccctcatcagcaaactaatagttgggttaatagaatgaactacaraagattaaccccatcctaatgactgatccttccctttgaaacatcacagtgaactatcataatgaggccaaatatttgctcccctgtaagagtgcctccatttatccaaagctgtctttgcttgggtttccccaaatgcagaatctgagagaaggatacaagtacaggtagtttatttgggaggtgcagataacactggtaggagagtggggaaatgtcacaaaacagagaaggcagccaataaaggatgcattatcaagccagcttccactgtgggaaactggagcttaatcctacagggcaactct

SEQ ID NO: 729944 - DNA, 552 bp, Homo sapiens
ccacactttttaaaattaaaatttttttaccctacttgcaagctaaaatatcacactctacaccataaatatgtacaattatgatatctaaattaaacataataaaagcaaaaaactctatagaatactattgtttggatacactaatcacctattcaaagacatctaggttgttcccagtatctagctcttacacttcttcagtgaataaccctgcatmtacatcattttgtgcaagtccaaacatttctttaggataaattcccagaagaggaattgctgtgtcaaaaaatatatgcattcataattttgatagatattgtcaaattacactgcataggaacactcctaccagtaatgtctgagaatacacagttccccacagccttgccagcaaaaagtattattaacctttccaatttttgcccacctgatggggaaaatactatttcagtgtagttttactttgcatttctcttatttgagtgagactgagcatcttttcaaatgcgtacgagccatgtgtgttttcttttctatgaactctctatt

SEQ ID NO: 729945 - DNA, 572 bp, Homo sapiens
ttatggaaagagaacattaaaccttatccagctgccagtgtcctggatatagatgagagcactagattgagagtctggagaactgggttcacccgctggagcttcctttccctggtttgtgactctctcaagacaccaagtttcttagcctcacatcctcattataataggtccacttcttactttgaaaggtttgsgttggtgagaatgaaaatcctttgttggcagccttaaaaaggaacgagatcatgtcctttgcacatggatgaagctggaagccattatcctcagcaaactaatgcaggaacagaaaaccaaacaccacatgttctcacttaacaagtgggagctgaacaacgagaacacatggacacagggaggggaacaacacacactggagcaggtcggggggtgaggtagggggcggagagcagtaggaaaaatagcagtaggaaaaatagtaggaaaaataggaaaaattgcatgctgggcttaatatctaggtgatgggatgatctgtgcagcaaaccagcatggcacatgtttacctatgtaacaaacctgcccagcct

SEQ ID NO: 729946 - DNA, 610 bp, Homo sapiens
gcatcttgtggggtggcacatgattttgatctgtctcattactgatggtattcaatttgatcacttgattaaggtagtatctgccaggcttctacaagtaaagttatccttttcctttttataattggtatctattttgtgggagatactttgaggctatgtaaaaatcccattcctcatctaactttatctttctgtcaatcaatctatctatccatcagttgatcactgtatggactcattgttgtggatttcatttaatggggttctaactatcattgtccctggtttggccagtaggagctctttcacgctgactcctaggtctgtttgatctgtctgcatcattcttcrggtgcccctttgctttctggtacaggatactccagtttcatcttgcacttttcttgctccagccctgctatcagtcatttctccaaaaagccctgtctctttttagtggtgaatggtttttagaagctaggatctgggtatgaggtgtgctcatcaatattggggtattgctttttccaggtcctctaagagacagaagtagggaagatatggatatgaatatataagcacacatacatatgtaaatatatacata

SEQ ID NO: 729947 - DNA, 559 bp, Homo sapiens
taggcataagccaccatgcctgacatgtatttgtatatatataacctactgcatatagcctattgtattgtcttgcacatttctttatttaaataataaagtatacttatccttctgcaactagcttttttcactcaacatcaaggtcgagactcattcatgttgatctgtgtccctctagttcaatgttattttcaaaaaccaagtagctgaaaggatttgtagtaaaatcaacagtgtgtagaaaagagagcatatttcttttttacaatctttttcccgaccatcaagccaagcttgkttcagtccatatttttggaaaatatttgtattgagagagattacacaagatttgcaggaaaaaaaaaagcagcctaacaataaacaatggagctgtgtggctgttttgagactcatgcttttgccagagtaagataatttcttggtacaaagtcagaaaagagtcccaccagctggcagtgtctggcatatggtggatgttcaataaatatttgttccttgaataaattaaaggggagaggcacccaatttgaaagga

SEQ ID NO: 729948 - DNA, 643 bp, Homo sapiens
gagactcatgcttttgccagagtaagataatttcttggtacaaagtcagaaaagagtcccaccagctggcagtgtctggcatatggtggatgttcaataaatatttgttccttgaataaattaaaggggagaggcacccaatttgaaaggactcaagggatggtgtaagtgaggtctgagctaaaatcagttttgttctttgtttcgaattagttattgttacaggaggggaaggaggcttggatgagaaatgagagaattgaattcatgagaccaggcagctggcttcagtggctgagacgtgggttcagattctgacatttattakgcgaccatggccaagttgcctaatctcacggtgtgcctcagtttccccacctgtaaaatgggtgtaataggagggtaccccctcatgggataacatgaggcctataggtggttggtacatgaagtgtgtggcacatgttctggtctctaataagtgctcagaaaatgtcgttaagattctgtcccaatgtgtctatcccgtgggttcagaaggctggagagggcacgagcagcctcctagatattgcagacccctgggaacagccatcctttaggagggtgcctgtatctggaaggtggatcatctagtcacagc

SEQ ID NO: 729949 - DNA, 625 bp, Homo sapiens
gggcttatcactgttctgacctctattatcctgaagagttctgcctgtttttgaacttcatataagtagtaccatatagtaggtatttgtgtctggcttcttaccttcaacattataagattcatccatgctgttctatgtatcagaggtttattcttttccattgctgcatagtattctatggcatgaatctactacactttatttgcccattctgctgttcgtggacatttaggctgttttcaatttttgtattatggtaaatgaagttgctgtgagtattttgtgcatgtcttgtggtggacgtgagcactcattttagttgggtgtggattgcctgggtcatagggtaaatgtctgtttactctataagaaactatcaagaagttctccacagtggtcataccaattgacattctcacatcccmcctgcagtgtaagagagttccagtagctacacattcttgccaacatttggtattgcccccaccccacctgtcttttaatttttgctatttggttggtgtgtagttgactgtgaactattaagaatatcgatgtttgagccctaccccagccaattgcctcataatttctgaaggtgggtccagacatacgtatcatt

SEQ ID NO: 729950 - DNA, 624 bp, Homo sapiens
caagggagagggcagagaagaaaaacttgaaaggaaatgtaattgtgtaagtattgatttttcaagtggaaatggtatttcagaaaaataaataacatgcagtagcaagaggtgttaggagttatggtaggttcaagggatgatatggtttcttgtcgctagaatcagagggggatttgtaggagataaagcatcaaacgtaatttagwgtcaagttttaataggccacgaaggcaatgtcaccaagttttaattttatcccatagacgtcgtggtgccattgaaagcttttaagctgggaagttacagaattcaatctatatttcagaaacatcagtctgccagcagtgttgataatgcattaaagggatatgagattatgttttggtggtcacttgagaagatactgacacagacttgttaaaggaaaggttgcttttaaaaggtttagaagttgggttttataaaaattggtagagaaaattcctacaataaaatatgttatatgttcttatgcatactacattttcagacattttaatatttcccaaatgaatacaactttgaaagtaggcattgcactttaataatctgtttattctgcacattataagggcattggca

SEQ ID NO: 729951 - DNA, 631 bp, Homo sapiens
agaatgttgaaccaggttactgtgacaatgtccaaaattggtaaaaggaaaaggaaagaaaacagtatcatcagtaatgatgcaggagttagagtatttaggaagatagtgaggctaagtcactccttggtaaggtttcccttttaatgaaaagcartccccaaagcattttcttttctaataaagagcagcctgtaaaatcgagctgcagacatagacaagtgagctggaagcttgcacgaatgaatgccagcagttgtgccaataggaaaacgctacctgggactaggcgtaacccaaatggtggctccatcttcccttctctttgccagccacaggtacagtaaggaacagacaagatggtgctggacaagtggaaagcccgtttgcataacaagattagggtggggtgaccagccttccccatgcactgtggaaaggtcacacctggtcgaaccaatctgtgggtcccatggaaatcagacactgcctcctcaagcctgcctataaaatctgctgtggtcctccacatgccagcttttcccttttggacacccctctctctcacaagagagaaagagctgctgtcctttctctttcttttgcccactgaacctctgctcctgaactt

SEQ ID NO: 729952 - DNA, 620 bp, Homo sapiens
tacccctgaacccaatataaaagcttagaataaataaataaaaatctgtgcattttattgtatgcaaataataccttgatgaagttgatttttttaaaaaaataacatggaacattgcctatttctagaatagtttagaaaaattcaactgatattcattatattgtctcatatattcttattttatgtttttattctttaatttcttattttttatttacagtttacctyatagtagtttgaaattttcaccttacatttttgttctgctagtgaacatccttaaacttgccgaaatcagaaattgttttcctgtccaaataaaaataaagcagtgtctacaacaatctcgcttaaacaaaatacaggttgtatcattggtattttataacttccctttgtttcttccttactacctctttcatattgttaaaaattatcttgaattttggttccagattgttaattttttactttgtgcctcttctgttttatgactacctacttaacaattccattaaatttcactgccatattttcaaccattacttagtattaactataagttttactgatatcattgctcattttattggtatgttatgtatttctgtttttca

SEQ ID NO: 729953 - DNA, 569 bp, Homo sapiens
gaaagccagaagctttatctcttcttggtggccaccagcctctcttttagggtcctattttacctccctatgagaaaggaatttgggccatatctctcagaagacttgttctctacttctagtgggaagtgaactattagaaaatatctgacgtcaaatacaggccaggtaatttccacttcctttgtatcaagagaacaagtgacttttagatattcactgccagtattaaaaacagaggtaaaaatcgggcaatagttccctccagaaccagacaacactaattaatcaaaattacagtaattcacatcttcaagtatttatcttctgcaatagaaataaattcatsaacagtatgtcattatatggaaaaaccataatgccaaatggtaaatattatataatcctgttactgtaaggatatatcaaatacataagtaaaaaatgtaaagccgggaagaacagtagattatttctggcagtgaagttatagatacattttgatattttttctttaaactttttgttatttccaaattttcaaccaaaaagtgttaaatcttattttc

SEQ ID NO: 729954 - DNA, 569 bp, Homo sapiens
gaaagccagaagctttatctcttcttggtggccaccagcctctcttttagggtcctattttacctccctatgagaaaggaatttgggccatatctctcagaagacttgttctctacttctagtgggaagtgaactattagaaaatatctgacgtcaaatacaggccaggtaatttccacttcctttgtatcaagagaacaagtgacttttagatattcactgccagtattaaaaacagaggtaaaaatcgggcaatagttccctccagaaccagacaacactaattaatcaaaattacagtaattcacatcttcaagtatttatcttctgcaatagaaataaattcatgaacagtatgtcattatrtggaaaaaccataatgccaaatggtaaatattatataatcctgttactgtaaggatatatcaaatacataagtaaaaaatgtaaagccgggaagaacagtagattatttctggcagtgaagttatagatacattttgatattttttctttaaactttttgttatttccaaattttcaaccaaaaagtgttaaatcttattttc

SEQ ID NO: 729955 - DNA, 536 bp, Homo sapiens
gagattcccagagcctagaatagtagtaccagacacatgagaggccaaataatgactacgctggcatggcatggcttaaaaggcatgtacctggaatgtttggtttgaaactctagctctgcacctcattcactatgtgttcctgggcaaattaagcttcctaggccacattttactcataaatagaacggcatttaatagccacctcacagggtgctatgaagcaagaaccaaatacaaggcatggcttatggatggtcatcagtcattgttagcttacttccaatccccaagttggtctagtctttctcaggctttgacagcttgaaatggatttatacrcagctacatttactcttttcttcatgtcactgatggacaatgagggcacattaatgggtctttattactacaaagtcaagtttctggcactgaaggatttccacaatttagctccattttacctcttcaaatttatctcatactcctccccataaaaatttttctatctaagccggagtagacttttactcgat

SEQ ID NO: 729956 - DNA, 650 bp, Homo sapiens
aaagtagaattcaatttgttagaaataaaaaataaaaaaatacacttgaggtcaatttagattctacctcaaaaggtttttttaaggtgattaaatgaatgagttactgtctataaagaaatagtactaggcatgagtaggtgctctagtacctactcaaatcccttttatcctttrccatcagtggaaaagttccactcttttggcgctatgtctggcaagcctagtcacagcgttagcaaaactttatggagtgatgagtaggaatgatttattttggcccaattcttttgttccccttgggccgtttcttcctctcttcttgccctgtcttctttctatccaatcttcccattgtgccatgcaaaagcagacaatgtcacaaagagagaggtaggaacattaatggatatgttttcaagcagctaaactatggttaggatcaggcccacctgacctgctacaagcatggatagctttgttgttcaatatccttttggaaaaacaaaaccaaaattcactcaattatggactctttttcccccaaataaaggtattcatctagctaaaaacaaagaactatgagtgccattatgatttagagggagaaagaaaatccattattcatcaacttaatgagaggttttgaa

SEQ ID NO: 729957 - DNA, 664 bp, Homo sapiens
tccctaatatcctttttctgatccaggatcccatattatgtttagtcatcatatctccttgggtacctctagactgtgaagggatttcaaactttccttgtttttgatggttttgacaattttgagaagtgctagctagttattctgtggaatatccctcaatttgccttgggctgttttgctcatgattacatgaaggatcatgggtttgggggaagaagtccaccaaggtaaaatgtccttctcaacacatcaaatcaaggacatgctrtcaacatgactcaccactgatgacgttagccttgatcgcctgtctgaagtcgtgtttgccaggtctcgcccctgtagagttacttttttttccccctttccctattgtattctttggaaggtagtcattatgcacagcccacacttaaggagtaggaaattaggcttcacttccttgagggggctgtgtttacataaattatttgggattcttctgtactggaaatgtgcctattctcccccataggcttatttatttattcatttatttacatcagtatggactcagacatttattttatactttgggttataatctaatactgcattgtttattttattgctcaaattgttccaccttcggcactgggaatgctttcagctgcctcctgtg

SEQ ID NO: 729958 - DNA, 531 bp, Homo sapiens
ggatcccatattatgtttagtcatcatatctccttgggtacctctagactgtgaagggatttcaaactttccttgtttttgatggttttgacaattttgagaagtgctagctagttattctgtggaatatccctcaatttgccttgggctgttttgctcatgattacatgaaggatcatgggtttgggggaagaagtccaccaaggtaaaatgtccttctcaacacatcaaatcaaggacatgctatcaacatgactcaccactgatgacgttagccttgatcgcctgtctgaagtcgtgtttgccaggtctcgcccctgtagagttacttttttttccccctttccctattgtattctttggaaggtagtcattatgcacagcccacacttaaggagtaggaaattaggcttcacttccttgagggggctgtgtttacataaattatttgggattcttctgtacyggaaatgtgcctattctcccccataggcttatttatttattcatttatttacatcagtatggact

SEQ ID NO: 729959 - DNA, 611 bp, Homo sapiens
cggtgtatgggaactgtctgtactatcttctcagttctgtaaatctagaacagttctaagacataaaagtggctggaaacaacaagaatggcctgtggtctgccatgattacagtgccaggtcttgcttgtgttagatccttataccgcctgaccatcctctgaggaagggactgtcaccagccccacgtcctggcactaattcctgcaagtgattagcctagggcccagcagcgtttgagctcagcaaacattaggaaactgagctcagcaaacattagaaaatgcagctattataattagcagctgctggaaggggagagcaagaggcttgatagctaagagcccggttctggtgaggttgcrgagaaaaaggaatgcttatacgctcttggtgggggtgtaaattggtttgaccactgtgggagtgtggtgattcctcaaagagctgaaaacagaactatcatttgatgcagaaatcgcattactgggtatatatccaaaggaatataaattgttctatcataaagacactgaacctgcgtgcatatgttcagtgcagcatgattcacaatagccaagacatggaatcaaatgcccatcaatggtaga

SEQ ID NO: 729960 - DNA, 577 bp, Homo sapiens
actataaagcgatcagtccccaaggttgtacccactgcaggtgaagacagagccatggagaattgcaccagaccatgggtaagaaaggttccagaatggggccggacacagtggctcaggcctgtaatcccaggactttgggaggytgaggcaggcagatcacctgatgtcaggagtttgagaccagccaggctaacatggtgaaaccccttctctactaaaaatacaaaaattagccgggtgcggtggcgcacgcctgcagtcccagctacttgggaggctgaggcaagagagtcgcttcaacccgggaggcggaggttgcagtgagccaagatagggccactgcactccagcctgtgcaacagagcgagactcagtctcaaaaaaaaaaaaaaaaaaaaaagtaaaggtctcagaatgggtcaccacaagggactggggtcctttgaggtctgcacagggaagccaattttagagattcattctgttcagcaaatatatgttgggacccctctcatgtgtcaggccctctgcttgcctttggaggtgagaagataaaacaggaataagtctctgt

SEQ ID NO: 729961 - DNA, 626 bp, Homo sapiens
agtcccggagcccggcgtgtggcgcctcggagcacggtgacggcgccatgtccctaatctgctccagtgagtgttggctgcggccaagcgcgggtctcaggaggccagagagcggcgcgggagcgtgtgcggtccgctgcggcgcccgggccggggtggaggcgggaatggggcgctccggaggccgagcggcggcctgtcagcaccggagccccccccgtcggagcggggtgcatttgcgcagtgccccgcagtttacatagtgcctgaggtttattgtcgcagacattactgaggccggtcgcctcattctacagagtggaaacaggtctggacagagagagctggtgcaagggaagcagccttaatgtaggagtcagaaaactcgaggtcttgtccagggtccgcctcccattggctttatgaattggctcaaggctctgggcctcggtttccycatctgcaaaatcgagagcattgcagtggatgttttgcgaggcctcgctcggatagtcggagcttttgcaatttgcaaaggtcacatgatgagttagaggtagaggcaaggctggcagccaggtatctggctcccagccttacactgtatgactaataaaaacagcgca

SEQ ID NO: 729962 - DNA, 614 bp, Homo sapiens
tgggaaaccacgttcgcaagttaaaagccttgaaagatctactatactgtgaggagtgaactattttaagtcaaattgctgtaggttaaggcccatcttacagtaaaagatggcatcactgatctatgaggtcttttaaaccagaactatgttattccaacattcgactttgcttytttaaagagactttattgaacagtcctctcaggtgtctttcacaaatgtactttctttttaaaattatttcctgttactatgaaaagtagtttgcatcaaataccaggagagatgtgtgtgtgtttttaaaaacatggtctattcaattagtgcagctatgatattagattgaaaaaaatttccttccaagatctttatcattatggtagagtatttgttctttgaatttcttgccttgtttttgggatcaccttattatgcaacatctgctctgaatttcaaatgtgataaacagagtatgagtgtcggtggcagatggctaatgaccagcagcgacagggcattcaagcctgccttgttttctgggaagcgatattttcatgttaatttgctctgtgtcctgcaaagatgagacaaatcacctgctcgtaattcag

SEQ ID NO: 729963 - DNA, 593 bp, Homo sapiens
actctttaacatctagaaagactagatgttgtaaattaggtattgtttatcctttatatacacagataagtacaataaaatgcatagaagtaaggaacagtggttaatcttgcctcactgtggacatcagcatagagctctttgcacttccttttcctgtctcctcccctgaaacagtgcacaaacacaatgtgtactactcaaggggtggtttggccattctcccccaaacatttcttatggaattttaacaaaaagacatttacaaaatgtatcattttacaacctctacttttacttttaacawatgtatcaggcactgaatacctacaaagcctagatatttcaaaaaagtacttagcattgtcaatgatatatacagtagtgaggaataaaatgcacacaacaatagttatactgagagacaggactagctggatttcctaggtcgactaaaaatccccaagcttagctgggaaggtgaccccttccacctttaaacatggggcttgcaacttagctcacacccgaccaatcagatagtaaagagagctcactaaaatgctaattaggcgaaaacaggaggtaaagaa

SEQ ID NO: 729964 - DNA, 593 bp, Homo sapiens
actctttaacatctagaaagactagatgttgtaaattaggtattgtttatcctttatatacacagataagtacaataaaatgcatagaagtaaggaacagtggttaatcttgcctcactgtggacatcagcatagagctctttgcacttccttttcctgtctcctcccctgaaacagtgcacaaacacaatgtgtactactcaaggggtggtttggccattctcccccaaacatttcttatggaattttaacaaaaagacatttacaaaatgtatcattttacaacctctacttttacttttaacaaatgtatcaggcactgaatacctacaaagcctagatatttcaaaaaagtacttagcattgtcaatgatatatacagtagtgaggaataaaatgcacacaacaatagttatactgagagacaggactagctggatttcctaggtcgamtaaaaatccccaagcttagctgggaaggtgaccccttccacctttaaacatggggcttgcaacttagctcacacccgaccaatcagatagtaaagagagctcactaaaatgctaattaggcgaaaacaggaggtaaagaa

SEQ ID NO: 729965 - DNA, 582 bp, Homo sapiens
taagtctggcagcaaacttatcagtggaactttacaggccgggagggagtggcattacatatttaaagtgctgagggaaaaaacttttatcctagaatagtacatccagtgaaaatatccttcagatgtgagggagaaataaagactttcccaggcaaacagaagctgagggatttcatcaacaccagacctgtcctacaagaaatgctaaagggagttcctcagtctgaaagaaaaggacattcgtaagcaataagaaaccacctgaaggtacaaaactcactactaayagtaagtacacagaaaaacacacaatattataatactgtaattgtgtgtaaactgttcatatcttgagtagaaagacttagagattaacctaacttatcaaaaataatagctataacaacttttcaagacatagtataataatatataaatagaaacaagaaaaagttttaaaagtggggagagtgaagttaaagtgcagagtttttcttagttttctctttgatttttgtttatgcaatcaatgttatgttgtcatcagtttaaaacaatgggttataaaatattatttgc

SEQ ID NO: 729966 - DNA, 686 bp, Homo sapiens
gttggcacttcgccctgttagccctatgctagttgcattgtgctcagaggcaaccagacacttgcaacgattgcttctgaagcaccacagaactacctgcagtaatttggttgttttcaaccattctccaaataaaaatatccctttaacgcaaaggctcagrgtttatgagttgtttttttttttaagaaactaacgtacacattcccatgcatttttatcaccttaggctaaaaatataacaagcaaagactgagaaggagctggaagaaattaagaagaatgctttccaacgtttggaaattccttgaacgatgcacatataatgtatatgcaataactcttcagtaaaggaaaagacataaagaaatgagagactgcataaaagcctgggcaattctatattttaaataataaggtgaaacggcaaaatgttttgttctacgtggtatctgttcaactgtaattctgtactccacatgatgtgaaaatctaagtttgagcaaagttggccttctttttttctttaatccacactgacattgtgcccagagatggggctccagctgttgagggactagaagaacctcagggagtgagtgatcagctcaataccgaatcctccgtgtgccaagaggatccctttgaccctgaagccattgcaaattgttgctttttcttgtaag

SEQ ID NO: 729967 - DNA, 568 bp, Homo sapiens
ctcatataaaccaatggttttggttcatggaaagctctatgtaaatagcaaagtcctcattgctaacatcagttgtttggctttgaggactcctggctcaatgtccatagagacattgtgtttcagccggggccaaggagsttgctcgcccattgtcctgataacatttctgactctgcccaccaagaggagagaatgagcaacaatcaagcaccattcaggtggcttgtttagtcctggtttttgctgcttagcctctaagcattaattcaactcatgtttattaagagataggacagtgggaaacccctcctccaccgccaccttccacacgcacaatcctccccctcccaactacttggggcaggaacatttgctaccagatcccagggagttttctcatctatctgatcctggtttatggaatccttgttcttccttttcaagaaagccaagtcccttgggctgggcgtggtggctcatgcctgtaatcccagcaccttgggaggctgaggcaggaggatcacgaggtcagaagttcaagaccagcctggccagcatggtgaaa

SEQ ID NO: 729968 - DNA, 568 bp, Homo sapiens
ctcatataaaccaatggttttggttcatggaaagctctatgtaaatagcaaagtcctcattgctaacatcagttgtttggctttgaggactcctggctcaatgtccatagagacattgtgtttcagccggggccaaggagcttgctcgcccattgtcctgrtaacatttctgactctgcccaccaagaggagagaatgagcaacaatcaagcaccattcaggtggcttgtttagtcctggtttttgctgcttagcctctaagcattaattcaactcatgtttattaagagataggacagtgggaaacccctcctccaccgccaccttccacacgcacaatcctccccctcccaactacttggggcaggaacatttgctaccagatcccagggagttttctcatctatctgatcctggtttatggaatccttgttcttccttttcaagaaagccaagtcccttgggctgggcgtggtggctcatgcctgtaatcccagcaccttgggaggctgaggcaggaggatcacgaggtcagaagttcaagaccagcctggccagcatggtgaaa

SEQ ID NO: 729969 - DNA, 665 bp, Homo sapiens
ttgagttgttttttccagcagtcaggatgagttggcatcaagcatttcttctctctgttcagtcccctttttggccaaaagcaaaagtctgcaaagacaggtgacccgggtgaaaaacagtcagtggaccagggcacaggtcagagccacacgcaagggccaaacccatagcttgggccttatagccactctggaatttttccacaaattgtgactgttggaattctgccaacgtcagccccacagtccataatgatccagtgcccaacagtttctgcatcgctaaatgtttgtggggctcagaaatcaatatttaatcacacttagccagagcccaatattctgtgaactcagcagtgtatgtttttggttgctgggtatataaaagctaacatgagaagcagaacattcgttggaatgaactgcatkaaaaatattaccactgtggtacaaatcactgttaatgacattgatcaagtgctcattttgcaagggtcccaccctaccaagagtttcaagatggtagaaaggaaatggaagacagttttttttttaacctcagaagataatgtttctccttttccccaccccccgcctcagctcttcactaggaacataacagctggattactttccaaaatctttgtcagctttaaaatcctgtt

SEQ ID NO: 729970 - DNA, 627 bp, Homo sapiens
ccatataacacaccaatcttaagtttacagcttgaggagttttgacaaatgtatacatccacataaccccaccactatatcttaacatatctgtcaatatagaaggctgtttatgccccttccagtcaaccaattccatcctgtgatgcttaattttatgtgtcaacttgactgggccacagcacccagatatgtgtgtggtcaagcattattttggatgttttagtgagggtgttttttggatgaratttacgtttgaattgtggactttgagtaaatcagagtgccctccatgctgtgagtaggcctcatctaataagttgaaggcctgaggagaacaaaaagctgagcttgcagagcaacagggaattttccagcgactacctttggacttcatttgcctcggctgttcttatttcgccagcagactgcctttggactcaaactgcaactctcctgggtttccgcctgtcagctgcctccatcaaaatttggacttgccaagactcgagaatcacatagctaattccctaaaatagatctctttctctggaaatacacatcttgtttgttctgtttctctgaaaatacacatttgtttgttctgtttctctgaagaaccgtaac

SEQ ID NO: 729971 - DNA, 635 bp, Homo sapiens
aattataagttgcattttttctactggtatgttacaaataatttatacacttcaatgagtttagcttgttcttttttatagatataatgatgatttggtccttctgagactataaatgaacagttcaaaagttggaaaattgtttcagtgctgtagacaagcaatgatagtggtaatgacacaggagaaaactaggtaaacttgagagagaatggagaggtggaatccacaggagttggtgattgataggccatgtgggactcccaggatctggcaagcaacttagtgtggtagggaaatctgtatgaatgaagtggtgttgatttaaactgggatgtcttgagttgagagagagagacttaagctatatgaggctgaagctcaggggagagayaggggttggagatagaagagaaacaggagacatcaacaggagatggtaagtgaacgcagtggggaagagatcatggggagtaggagagtgaaaaaagagaaataattttatgtcagtcattgtggagcttgattttattaaatttcccattactatttgaatttctatgtgcaaattagcataattgtctaacgtgtgtaagtcatctttccaacatagttgtgagctccatgaggcagaa

SEQ ID NO: 729972 - DNA, 614 bp, Homo sapiens
tgccattagcctgtggaattttcagaaaaataaatctgtatggatcttttttcacaaaagactttatctttcttgcttctacaaattgcttagattactttacaatacacattccaatttaccgaaacagctctgtcatctgttgtaccggaacaggattgatgcatccatcaatggagyttcataagccttcttgaggtgaatgtacaggaggaatcattcttactttctgggtatcatagattctcaaaataattttaatgaatattgattgttcatcaataattccaccaagcatcactttaaaaattagtgcagtattaaaaaaaactaatatcatatttcaactaaattcctcaaaagcattttccagaagtgtttctcagctgttcaatgataagaaatcactgcacattcttatattcaccttaaaaattcacagcgcagattaaatattgaaagcctttaactgtcctatattaaaaaacatgtttaatcatctttatttttttgaataccaaatgcttatagtcttatttcctatttgcaaagaaattgtcatcagcattgagcttatctctaattttataagcatagattttcgtcgtataaag

SEQ ID NO: 729973 - DNA, 599 bp, Homo sapiens
gcaagtttatttaatctcaagtgctgggaccctggctgactcccttcaagtaatgattctacgagatacttttcaagtatcaatagcaggggatttgggttcctgtatcacatcccctaggtaggtcctattgggttcctatgccacatccsctagataggacctcacttctgaagccccctgcagcagtagcagatagtcctgggtacccagataacatccatctcaagcgctcagcaagtctgtttttctgccttggaactgatgatacttatccaccccagtcaccagaattataggggatgttaataacactggggggcccagtgctatggctcatgcctgtaatcgcagcactttgggaagctgaggtggggggatcacttgggctcaggaattcgagaccaccctaggcaacagagtgagaccccatgtctatcaaaaataaaaaataagttaactgggtgtggtggtgtgtgcctgtggtcccagctactcgggaggctgaggtgggaggactgcttgggcccaggaggtcaaggctgcagtgaactgtgattgtgccactgcactctagcctgggcaacagagcgagactc

SEQ ID NO: 729974 - DNA, 599 bp, Homo sapiens
gcaagtttatttaatctcaagtgctgggaccctggctgactcccttcaagtaatgattctacgagatacttttcaagtatcaatagcaggggatttgggttcctgtatcacatcccctaggtaggtcctattgggttcctatgccacatcccctagataggacctcacttctgaagccccctgcagcagtagcagatagtcctgggtacccagataacatccatctcaagcgctcagcaagtctgtttttctgccttggaactgatgatacttatccaccccagtcaccagaattataggggatgttaataacacyggggggcccagtgctatggctcatgcctgtaatcgcagcactttgggaagctgaggtggggggatcacttgggctcaggaattcgagaccaccctaggcaacagagtgagaccccatgtctatcaaaaataaaaaataagttaactgggtgtggtggtgtgtgcctgtggtcccagctactcgggaggctgaggtgggaggactgcttgggcccaggaggtcaaggctgcagtgaactgtgattgtgccactgcactctagcctgggcaacagagcgagactc

SEQ ID NO: 729975 - DNA, 559 bp, Homo sapiens
cccacgcatgatgtcctcactcttgtgtcacctttgagagggaaggggggacttattctcctggaaagaaagtgaggcacaaagaaaaagagaagaggccctgccaggaggactttcaggggtcccgaaccatagccccttcaccaaagaggagacatttatttctgtggctgctgctcctccctttcgctgaactctattcctccctctccaagcccagtggacttgacttccytgatgtggcttagagcttgaaaaacagagaatcctgcctcctgcctctcgctcatcccccttcacagcccctcccaggttacctgagggaatctaaccctgggtctcagaccagccaaactctgggccagggtacctatgtgaatgctgttgttttccctggcactgaattctgcaggacacgaggaaatctccaaagtgtccagtggcaaggtagtgactcaacgagaggaattctaatggccagtgttgatggagcacttccttggtcccaggccctgggccgagttcctccatgcatcatcttatgtgacccacacaacag

SEQ ID NO: 729976 - DNA, 623 bp, Homo sapiens
caaatgtggccacactttagaatcacccgagggagtatttaaaaatcccagtatccaagctgcaccctggacctgtcagaacagctggggagtgggactacatatcagtagttaaaactttctaagtgataccagttctaaggttctcaaatttagcttctcaaacgttaaagtgcatgccaattccctggggtggggggtgttaggatacagattctcattctrtaggcctggggtgaggcctgggtttctgcattttcaacaagttcccaggtgctgttgaagaggatggtctgggacacacttttgagtactggagttggattagcaactaactcccctttgcctcccaacctgtgtaatttgcctcaccatcaccagccttgacatctaatatggggaaatgctcttttaaatccagccggcacagtgacaaaattacaggctatggaggcagacccaaattccaaccttcactttggcacttactgctgtgtgaccttgggcaagtctctggaatctctgtgcttgcctcttgaggtgtggagacatccactcatgcagatgctggaagaattaaataagataatatatatgtaaaacactccagacataccagattc

SEQ ID NO: 729977 - DNA, 623 bp, Homo sapiens
ctagtcatgccaaggaatcgctaagtcacatcgtgttggaaactgctctttgtggtccaagtccacccatgtttctcttgtttttttctctccatcagatctcagtctcaggaggaggtttgcccccagtcagcaccttgacgaatatccacagcctctcccaccataatccccagcaatctcaaaacctcatcatgacacccctctctggagtcatggcaattgcacaaagtaagttctattcttggttggaaaacytgggggcagggagaagaagaatgggaagcaaattaatgtggtgaaaaataactgtaggtctccttcaaactcacccacgactagtagatttggtttaacttctttagtttctcatctgtctccttaaatccaatatttggattgtttagcctaaaacaagagaaaattgtggaatggatttggatcctggtcacagtttagcagctgtgcatcctgggtcaaatcattgaaccttcaggagattcaatgtcctcatctataaaataggttgttaaagtgatcaactgacagtgaatatgaacatgcttataaatctctaaagcatgaatatgtataacatcgtagcttacactttgtcttgagtt

SEQ ID NO: 729978 - DNA, 722 bp, Homo sapiens
aagatacgacttctgttttaaaaggatccctctgattgctgagattttggggaagggagtgccaacagtgacagcaaagagattatcaggaagttgttgccataatctaagcataggtgatgagagctgatctgattctgtattttgaaggtacaggatttgaagataccaggatttcctgwtggtttagatgtagaatgtgagaaagagtgataaaaaataattccaagatttgggccctaaacaaagtaggaaatagaaattagtgttgttggccaggtgtggtagctcacacccataatcccagcactttgggaggccaaggcaagaggatctcttgaaccctggagtttgtgaccagcctgggcaacatagcaagactttgtctccactaaaaattaagaaaatccaggtatggtggcgtgcacctgtggtcccagctactcagaaagctaaggcaagaggattgcttgaggaggtcaaggctgcagtgagccaagattgcaccactgcactccagcctgggcaacagagcgagaccctgtctcaaaataaaataaaataaaataaaaaataaaaataaaaataaaccctgctgttgtagaaagtgaaaaacaatgttacacaaacataggctgtatcttggtttttctttaaagtggtaccttaggaagcatcttagtagtatgttatgctgtaatgtgatattatcatatccctaa

SEQ ID NO: 729979 - DNA, 722 bp, Homo sapiens
aagatacgacttctgttttaaaaggatccctctgattgctgagattttggggaagggagtgccaacagtgacagcaaagagattatcaggaagttgttgccataatctaagcataggtgatgagagctgatctgattctgtattttgaaggtacaggatttgaagataccaggatttcctgttggtttagatgtagaatgtgagaaagagtgataaaaaataattccaagatttgggccctaaacaaagtaggaaatagaaattagtgttgttggccaggtgtggtagctcacacccataatcccagcactttgggaggccaaggcaagaggatctcttgaaccctggagtttgtgaccagcctgggcaacatagcaagactttgtctccactaaaaattaagaaaatccaggtatggtggcgtgcacctgtggtcccagctactcagaaagctaaggcaagaggattgcttgaggaggtcaaggctgcagtgagccaagattgcaccactgcactccagcctgggcaacagagcgagaccctgtctcaaaawaaaataaaataaaataaaaaataaaaataaaaataaaccctgctgttgtagaaagtgaaaaacaatgttacacaaacataggctgtatcttggtttttctttaaagtggtaccttaggaagcatcttagtagtatgttatgctgtaatgtgatattatcatatccctaa

SEQ ID NO: 729980 - DNA, 632 bp, Homo sapiens
aaaatttgtggaaatttgtcttctctcttgttatgtaagtacctacctaccaaactcaattttgcctctttgcctgctaagcaaagagtacttactatgccagcctgatgtacttactattttgtcctttacaaaaacgtttgccaactccttagatagatggtcacaggacagcaatttaaaaaccaaatgtgctttatgtgctaacaaacaaaagaaaaataacaaaaattcacctcagaagagcagcacctggagcaagagaagatacagagtcatttcctacgctgccatttctatctgsgctccccgtctggttagggaagcagccctcacctttttggtctcgggatcccttcatactcttaaaaattactgacatcccaaagagtttttgttcatgtgggttatatacctattgatattttaccatgtcaggaattaaaactgagaaatttttaaaaagttaatccattaaaataagaataaacccatttcataacattttaaaggtaaaatgtactgtttttaaattaatgagatggtgacactgcttttttatttttttgcaactctctttaatatctacttgaaataaaaacagctagattctcataagttcctgcattcaa

SEQ ID NO: 729981 - DNA, 528 bp, Homo sapiens
tttgcaaactagctggagaaataaaacacaaatgcaaaaccatacagaatatactaaagcaaaaaagcgaagttctgaagggaagaacctccctctggctgaaagaatgaagagaaacttcaaaaaggtggtagggtggaattataaaaagcaaaaatgggggaaggccatttctcaaatagcatgaacaaaggtgaagaaagcatggaaraatgaaaaggccagttagactggaacacagggttgatatgtgttttaaaaaaatactcatacaaaataagtttgcaaaggctgtcttttaattttttaatttccccttcataaaaacctggaggtttcttagactaagctttctaagaatactaataactatgtcaattatgtttcagtagtatggtttcaaccttggatacacaatggaatcaaccatctgtgtgtgggggttgcagagagtagcgctttaaaaagtactcgcccccagagatggtaatttaattgttctggggtgtagcctgggcatcagaattt

SEQ ID NO: 729982 - DNA, 636 bp, Homo sapiens
caagactaccagaaagtagccaggaaaacagactgacctctgagcctcccgatcatctttagggttgtaattagacaggcagtccaggatgaaaatctggccccattcagtgcattcattcagggctgtcagcagcttattaatgttctgtgggttcagatcaagtaagttgctgtttgggtgagactcactgatttcagataatgccgctacggcattagccaccacctggaaaagaagggggtatgaccttgattcaccaagaacagcacagctatagacaaacacttcatcagccttctctgggtcatttcacggatctcaattcataaccattcctgaacattttacctagtcagatagaaacaaataaatcacttcaaaacatatattaaaccaccaatgatattatatakagtggtaaggcaacccagaattaaaacaattcatatattagcagagtcacatgttatttaataggaaaacatacattaaccatgttaacagcactcaaaactttcaaaatcaagacatatgaacagcatatgaaaaatgacaaagtctgaatatgaaatatgtacattaggcaacagagagaaaaatctaggccaaataatcttatagttgtgtagctgt

SEQ ID NO: 729983 - DNA, 540 bp, Homo sapiens
ggataacaacaatcctataattaacgtactaaataaagttaagtcattaagtttttctatgcattctgggcctacctttaataggcagtttaacatagcctacatgaataccaaatatattctgacraaaattcttagaaagagatctagacagatggcattttttcaatattttatcatcttaggttgacaacaaatcaccacacaagtaaacttcctaatgcctaaatgaagattataacaaccggaaggtgcataatgttaggccacttcctcaagaatagctgcagtttattaagcatttaccatatatcaggcaaagtttaaaattttaaatacattattctttcatcttcaaaataattcactaaaatcggcattattacctcagttttacatataagacaactgaagttcattttaaataacttgttcaaagccacatttctagtaagcagccaagccaggactcaaacagcagccactctggctctgaagcctcagtgctatttccataatccagggtttcacaaccttggc

SEQ ID NO: 729984 - DNA, 500 bp, Homo sapiens
tttcattcaatcaagttgacacttaacattaaccatcacatggaatcaagctaagtgtccatcaatggatgaatggttaaagaaaatttggtatatatacacaatagaatactattcagtcataaaaaagaattaaatcatgtattttgcagtaagatggatggaactggagattttatgttaaatgaaacaagccaggcacagaaagacaaatatcacatattctcactcatacataggtgataaaaaatgtgttcacatggaggtagaggkggaattatagataatggagacacagaaagatagggtatggagatcaggataatgagaaattggttaatggtacaatgtatgttatttgggtgatggataccctaaaaactctgattagactacacaatccatgcatataacaaaattacatatgtaccccataaatatgtacaaacaaaaaagaaataaaagaattacagcaattatgtataaaataccactactaa

SEQ ID NO: 729985 - DNA, 558 bp, Homo sapiens
ttcattcttagagttttagttggaattatctattaaatgatctgggctactgccttttagatgtcagtgtgggttaggaggtgtagttaatgagtgtataatgagctataaatactttcattttcagtgggctattttaatactctaattttgaagaataataatttctaataaccaaaaattatactttcatacattcattggtgtagaattttgtatagcagtatcttaaacatttttccaactcttgtgtatatatagctattttttgtcaatgtcaagttttaycttatcttttttcaatagctttccaaagtttatctctttaaaattatttctttcattttttttgtcctattgttcaattatctgaaaattccacatatatattttaaagtatgtctatttggtaaagatttttccttctcagttttattaaggtataactgacaaataaagattggatatatttatggtatgcaacttgatgttttgatatatgcataccttgcaaaatcatgaaatcaggctaattaacatatctctcacctcacaaac

SEQ ID NO: 729986 - DNA, 558 bp, Homo sapiens
ttcattcttagagttttagttggaattatctattaaatgatctgggctactgccttttagatgtcagtgtgggttaggaggtgtagttaatgagtgtataatgagctataaatactttcattttcagtgggctattttaatactctaattttgaagaataataatttctaataaccaaaaattatactttcatacattcattggtgtagaattttgtatagcagtatcttaaacatttttccaactcttgtgtatatatagctattttttgtcaatgtcaagttttatcttatcttttttcaatagctttccaaagtttatctctttaaaattatttctttcattttttttgtcctattgttcaattatctgaaaattccacatatatattttaaagtatgtctatttggtaaagattyttccttctcagttttattaaggtataactgacaaataaagattggatatatttatggtatgcaacttgatgttttgatatatgcataccttgcaaaatcatgaaatcaggctaattaacatatctctcacctcacaaac

SEQ ID NO: 729987 - DNA, 566 bp, Homo sapiens
agggaagatgcctatttcaaagatcctctaaaatttccatatgagatttaagaatgattcaaattttaaagttgccaaatcgtgtcaatgtcttctttaaaaatttctctttttcctctctctttttacttcttatgccattayacaaaatttcctggaatataacattctcaatacccaaagccttgtaaaaatccttcactacttctcatttttttaatgagaaaaagaaaaacaaaactatccttgccccttgcctctaactcactcacaggaaccctaggcaaactggtcaatgagctgttcctaaacataaagattttacttcttgcctttttgcttgagtcatcctatatttaaatgctgtgtctctttcactatgccgtatcagtggttatctcttttttttttttcaattcttcagtgattattgtgtatatacactactactgtattattatgacttgtaacccaagtcatgtatacctatagtatattttctaccatactaagttaactgaatctatttgttatacatttttaatatctcaagaggctgggcctag

SEQ ID NO: 729988 - DNA, 635 bp, Homo sapiens
ttcttttgctcttacttaaaaaaacgtagccaaaagagggattgcctactatagccagatgttaatagaacaccaggaacaagcatatatacacacatatacactcatgaccctaaatgaggcttctttcattatcagggtatatcaagcacattgctgagacgattcttatgccacagacacctgcccattaagtactaatttttatacttgtactcttaagttgtaataaggagcatcaacaaagcatgtcccctctttcttttttggagatgagctatgatttacaaataatgactctatccatagcatctatcatatgttttcatgaaccaactaataggtgtctatttacaaactctcttgtgtctctcagagtagttattttcatacaattggcaaccttcttctttcrtaaaaaattgtttgttagttggaaatagacaggaaatgtaaatgatgggataacattataaagtcactgcttaaggtgatcccagttggagagggagggaaacaatagaaaacaaacaaatggcagaagtaatgtgatgtcactccagtgcttaatatttttcattagttccctgttgctcttaagataaagggcagatttttcaagtttacaagacctc

SEQ ID NO: 729989 - DNA, 613 bp, Homo sapiens
ggacagcatagccagtacaaaaaagaatctaatgggtcagacagagctgaataacacaagaatgtcacaatgcaatcacaagtattaacagcagaataaaacaagctgagaaaagaatctcagaacttgaagactggttctgtgaaataagacagtcagacaaaaataaagaacaactattaaaaagggataatcaaaacatctgmgaagtatgggattatgtgaagaggccaaatctatgaatcagtggcattcctgaaagggagggggagaaaacaaacaacttggaaaatatatttcaggatattgtcaatgaaaatttccccaaccttgctagagaggccaacagtcaaattcaggaaattaagagaactcctgcaagattcttcacaagaagatcatccatcccctagatacataatcatcagattttccaaggttgaaatgaaagaatgttaaaggcagctaaagagtaagagaaggtcacctacaaaggaatctcagtcaggctaagaatggacctctcagctgaaactctataagccagaagagattgggggcctatattcaacattcttaaagaaaagaaaaaaaaatcttcaactaacacttt

SEQ ID NO: 729990 - DNA, 526 bp, Homo sapiens
ctaagtggtaaataattatttactcaatttttatctgatgtctctgctgaatctaccctactttaaaaaataaaatacataaaattatatagaaaatcctactctttgctacaacattgccattcaaaagaacaaagaacattggttcaactctgayggttttttctaaaaaagtattttttactaagatatccaagtgtattgtaatacatacacagacacatatactaacagatagcagacaaatcagagtatctgatgccaagtttttatagtccaaaataaaatggtgattactacacaccaacactgaaggaaaacatattgcttgaaattttctaaaaggttataatgacttttatctttacaacaaattgaataaagagtctcaacccaattacaggaaacaaactcctaccaatagttttagacgatcctaattgtaagtgagagaccttagatttaacataatatccaacctaattatatttcaaacacattagaagacataacattctacaggaag

SEQ ID NO: 729991 - DNA, 526 bp, Homo sapiens
ctaagtggtaaataattatttactcaatttttatctgatgtctctgctgaatctaccctactttaaaaaataaaatacataaaattatatagaaaatcctactctttgctacaacattgccattcaaaagaacaaagaacattggttcaactctgacggttttttctaaaaaagtattttttactaakatatccaagtgtattgtaatacatacacagacacatatactaacagatagcagacaaatcagagtatctgatgccaagtttttatagtccaaaataaaatggtgattactacacaccaacactgaaggaaaacatattgcttgaaattttctaaaaggttataatgacttttatctttacaacaaattgaataaagagtctcaacccaattacaggaaacaaactcctaccaatagttttagacgatcctaattgtaagtgagagaccttagatttaacataatatccaacctaattatatttcaaacacattagaagacataacattctacaggaag

SEQ ID NO: 729992 - DNA, 670 bp, Homo sapiens
caataaatatcctgagattcatatggccctcatggaggatcagtcactgactgtggtttatatttactttctgtgcctttccacagttacagttatcttttttaaaggtattattccatttcttggctttagtaagaggtgcctgtaaaagaattctttcatttgaaatcagtgaaacaggaatttataagcaaaggaaaatggattgctaagaaataaatatttgtgaaatgacccaaggtgagttttaaaaaatgtgtttggatagagcatttctactttattttcttaaaaatccaaaattgttggtctttcacggggaacatctcagtgcttttaggataacacctgttgttatggatttattttkggaatttttgacctcaagtgtgaatgctgcatagccttgtgtcatgagtgtttacctcgcttatttagcctggcgcagaggttgggggttgggggtaggattcctcagatatgtattcagaaaattaaattacttcttagtagttataacatcacaattgcatttaatatttatacagtatcataattatctgtcacctctttttgaaatccatgcttttgttttcttctcattgtgtaataaaatggcagtttccaaagatggatgtctttagtttttaaatgacatgttgattttttt

SEQ ID NO: 729993 - DNA, 545 bp, Homo sapiens
agaataatgtatgtaagtttactggcattttgactttagtagtttacaaatataccagtttactttcaaattaactagtatttttatcttatttagtgtgtcattttcaacccaagacaaaccagaaaggagatgctaaggaagttgcttttatgttgacacttgatccattgggggttcttaagtgactttggagactttgttcataatttttagtaacctggaaaatccctaaataatttactcatctcattttttccagtttttgagacctttgccaagtgtctgtttatcaaagtgctaatgctgtcagacaaacatatggatgagtaggtagracaacatacagtctttttctccaagaatagatgttggttgtgggttttgttttgtttttttttttttaaatttaactcaggcatagcaatagctgtgatttaaattaagaaataaagattttaatttgcaagaatctatccagatatagtgtggtatggtacaaaggacatagttgttggaagggtaagatctagagtggaagttcc

SEQ ID NO: 729994 - DNA, 603 bp, Homo sapiens
gttgcctgtgacaagcgacaccctgaaaaaaatggtcctttgaattgtcttgccaggaaggtgctatttctggtatagttacatgatttggggagactatgggtaaatcttccagtcatacacaaatgtccatcatctggcattcgtaggtgctgatcaaatcaccaaactcactggcacacactgagtggcaacaccgggggcctggagtgttggtatttctcagactgaagtgggcacrttactgatctctgtaatccacaaaatatgtatgtgagctttactaaggttaaagagtgaatccactgttcttaggtgtcatctattgcaattttaaaataaggcgggttagatttaagaatgtgtgtctggcatgcaaactttccctggaaaaggtctaagaaaaactgaattaaatactgcaatgctacattatataggagtttgaaatcagagggttgagtatctacttcaagtcttttcctcttggttaggaacttaggaggtacctcaaaatatcagatctggtctgtttcaaaagcagcacttttaataaatagcagaaaagcaaataaaacactttttcctttttgtaataaatca

SEQ ID NO: 729995 - DNA, 617 bp, Homo sapiens
aacaccactaaaaaggccctaaatttgaaagcatgaaagaagaaagtttattcatgtgaaagtacacaaatacttatcctatcaataatatcctcactagtctgattacaggtcttcaattcattttgaaatgaacagcctgaagctgccagctgtttctgatctgatgtgcttatagaatatttacttagggtatatatttagcagtttagatatcatggctgctgacaagaaaattctaatactgaaacttactatgaagtttctgtttgtaaaatggatatatatttggtcccttgtcaaaatttggcagtgaacaggatgtctgcatctttgtattcctggtcctcagcacaatgcctagcgtatagtaagcattyagtaagaggagattgaactgaattgtttgatatgagaaaaatacaacaaagtcagcatttataagatgatccttagcctggcttaattgagtgtagaatgatggaaacagcaaatgtttaactgtcttagacaattagctaaaaagtctaatttttccatgtcctttcaatcacttataatcttttttgaaatattctgtgtgtatacatacacacatatgtaatatatattataca

SEQ ID NO: 729996 - DNA, 587 bp, Homo sapiens
tgatgtaacccttccagtttacaagtctctgttgcctacagacaactttcagtcaatgctctcattttggagggaaaccgttgggaaagataaagaatttcagaaaagtcccatgcaagacctttatattaattaaaccaatttcttattgatttatgtgaaccatcaatcacaagatatttgaggaagattcaaaacagtgaatgtwtaggactgaatttaaaacaacaacaacaacagcaacaacaacggcagcaacaacagccccctgacctgagaggaaacaaaatttagttagggaataatggaaaacttatagaaattataaattcttccaaataatttgagagaatattgagtctctaaaacaagattagcatctaagaaaaaggaacagataataagaaatagcttttaaaattaaagtgtgaatgtgaaagtagaaaactaaatagaagagctctgaaataaaatggagccacaggaagaacaaattaattattttgaatataaagccaagaccttagccaagaaacgtatgacacaaagatggagccaatgaaagaaatgttaggagatggaggata

SEQ ID NO: 729997 - DNA, 624 bp, Homo sapiens
gcaattgagtgaaataatataagtaaaactttaaaagttatcccagatgtggaatgtcagctgttttgttactgttgttactattattattactaagatgagctggtgatacaacatagtgacaggagatccaggagcaagacgattttttggaaatctatattgacagtgtagtatcaggaagtccccagaaagtatggggaatgaggctgtgatcaagccagggacccagctcctgctattayagttgagcctaagctactatagacatgcaggtcttgtcacaaataaaagttcttttatttgttcatcattgtgtagcttacaaaacctgttaataatggctaacattttctgagcacatactgtatcccaggcactgttctatgcactttacatggaatacttcatttggtcttcacaacagccaagtgaaatatataatagttgacatatcttttttttgtatggaaaaaactgaggtttagaaaagtggaagaattggcctacagtcacttatcttgtaattggtggaagcaggatatgaatgaggtatctgattttatatcctaaatgctttctaagatgctatttgatcctcacaataactctgaaagtggaaaa

SEQ ID NO: 729998 - DNA, 617 bp, Homo sapiens
tctgtgtatactccatgtctaacagagtgcttatgagatatctagtaattgatgaacagaataaagggaggtatctagaataccttccaggtttctactggggataactggggtgatatggcacccttcagaaaaatgggacacaggagagakagcagatttggaaagacagaagatgagttaaggggacatctggagttttatgttcctataggatatccaagtggaggagcccagtaggcagctgggtatgtgaatctggagttcagagtggtctgggctagggcgatatggatgcgggaactgtcagcactgaagccatgattacggcagaagttactcaggaaaggacctagaaagaatagagaagacccaaggaaagagttgtgagcattacttataagcagtgagtagaggcagaggaacccgcccaagaaggaaacttgagaaaagggctgctggcgggactgaaggagaacctggagggacagacgtcaaggatgccaaggagaatgtgtttcaaagaggagacatgggcaaccacatcaaataaacacagcaatgcagtgaagggcagacacagtctctgctctcatgaaacatatacattccggtag

SEQ ID NO: 729999 - DNA, 617 bp, Homo sapiens
tctgtgtatactccatgtctaacagagtgcttatgagatatctagtaattgatgaacagaataaagggaggtatctagaataccttccaggtttctactggggataactggggtgatatggcacccttcagaaaaatgggacacaggagagagagcagatttggraagacagaagatgagttaaggggacatctggagttttatgttcctataggatatccaagtggaggagcccagtaggcagctgggtatgtgaatctggagttcagagtggtctgggctagggcgatatggatgcgggaactgtcagcactgaagccatgattacggcagaagttactcaggaaaggacctagaaagaatagagaagacccaaggaaagagttgtgagcattacttataagcagtgagtagaggcagaggaacccgcccaagaaggaaacttgagaaaagggctgctggcgggactgaaggagaacctggagggacagacgtcaaggatgccaaggagaatgtgtttcaaagaggagacatgggcaaccacatcaaataaacacagcaatgcagtgaagggcagacacagtctctgctctcatgaaacatatacattccggtag

SEQ ID NO: 730000 - DNA, 576 bp, Homo sapiens
cggaaccgaggctctggtcacgaaggcaagtgacaggtggatcccggatatccagggtggaggttgagcctctgctggccgacggtgggaggggctggacctgggggtctccagccgccctcctcctccaagggcacagccaagagaccgcttggtctcgtattaaatcggggcagctgcaggtagaaacgcctgggcaagggggcctggtgaaggagctgccccaccttctccgggggcrgcacgcactgggggcccccacagaggccccattggagcctctggccctagcagaagacggtgaatccattcacctctccgtcagagaacagatgcaggaggtacgatcacccggcatcatcaccatagcaacagctggccaggcagccagggtaggggggaccctgccagtgccgggctccacccatgcacccctgcagcgtgatggcctcatccccgggtgggacctggcagggcagcagaggccccttcatccacggggcctgcacggggcgcatgtcctgagggcccagggccaggcgcatggaggggagtgggctggcgacctacaggccc

SEQ ID NO: 730001 - DNA, 559 bp, Homo sapiens
gacagcgtcttgcttgtcacccaggctggagtgcactggcaccatcacggctcaccgcagcctccacctcccaggctcaagcgctcctcccaccacctcagcccccgccagtagctgggactccaggagtgcaacaacacaccccactaattgttttagtcttctgtagagacagggtcctgccacgtacggagaagttctgacactgccatgctgtctacgggcgccttgttgcgtcctgctccaaaggcacaagcagatgyccttgggatcacccgcggggtggacacgggcaggcccccgcagccctctctgcagttatttgctcttaaggaatctaccaacgtccatgattaaatatttgtcaatcactgttccatgctggctccctggccagcctgtaaattctgtgagggcaaagaccacagcggcctgtcaccacagagttcctttcactacaggaaggccctccccaggcccagtgacagtcggaggaggtcaaggtcctccgtgtccaaggccacggggcgaggaagtggctccaccacaccaggatcca

SEQ ID NO: 730002 - DNA, 625 bp, Homo sapiens
aacacagccattcaactggcaggatatacagtacttggaaagcagtattaccaagagactttgagatgatagtggtagcaaattatataaggtcttgtaatgcaatgtggcagtaaaatcagtcaatgagattttagtctgtatatgcaaaagcttcacatcatgtggctgaaagataaaagttatttaaatggtactgctgagatcacaaagagaatacaagtttggggcatgtacatgccccaaataagcaaatcaagtagtgttcagactagaaaataaatgtataatgatcttcagactttaatccttaaaatattaaaataacaaaatgtatattttttgctcatctctgagtatagttatgataacattttacaaatatttgtaagatacaaacattatggaagtcaagatatttttaaaggtaggataagagagtttatagtcaagtattgggatgaaattaagtaacagaaatttaakactgaatctgggaaatgttttctgacagtgaaatctattagtctctggaatggaatctcgagagaggtggggagaatttctattcctctagtcattggactagatcaagacttggatagcgtattatttgaagtaaaaa

SEQ ID NO: 730003 - DNA, 623 bp, Homo sapiens
atatagtttcttgattaatgtctataaactataggatctatatctagtttttctctcagttgaataacctatgctcacaaagctggctggaacataataaatattgtcaaataagaaagagaaagtcatctgacttcgtaaaataatggcaatgttctggatctttagatagccaagaaaccttagaaatcattaaattatatataattgttttatagattagaaagcaacaggccgggtgcggtggctcacgcctgtaatcccagcactttgggaggctgaggcgggcggatcatgaggtcaggagatctagaccatcctggctaacacggtgaaaccccgtctctactaaaaatacaaaaaaattagycgggtgtggtggcaggcgcctgtagtcccaactactcgggaggctgaggcaggagagtggcttgaacccgggaggcgcagcttgcagtgagtggagttcgcgccactgcactccagcctgggcgacagagcaagactccgtctcaaaaacaaaaaacaaaagaaagcaacatttttgctgttgctgtcatttgtattaacttcgttaaattatgcttgtcttattgtacatcatctatcagtaattaggatag

SEQ ID NO: 730004 - DNA, 614 bp, Homo sapiens
taacatgttctgtaacattctctttcttgatatgaaggctgattacagaactcctccttgttttacacagtaaatgtggaactaggtgtgaatataaatttgtttaaactaataattgccattcaatagccttctgagttcatttccatcagatttacttaaaatcgtttttagagtacagtaatagtgagagttgagtttcacatataatgttcatgagggaacaaaatgttctcaaacacaaattttgaaagcagtcttacagtgtcttgtattggctagatcatgcagataaatctttatgagggtatcactttgataggaaaatatattcaattattactaataatttctttatatgtaaaagacaatattttatttgcttttcctaaaccaaactggtgcatgccatacttggtcatagtaaataaaagaaaagataatatcaacatctttcttytagtgagcagaattcaggaaagttctcaacatgaatacattgtggtcaggtttatagacaggtttattaggcagtaggtttaaagaatattcatatactattaataccaagtggtgataagcagtgataaaatagcttacactacccagttctg

SEQ ID NO: 730005 - DNA, 596 bp, Homo sapiens
ctataacataaaagtgcaaagtaaagcagcaagtgctgatatagaagctgcagcaagttatctcaaatatctagttaaggtaatagattaagatgactacattaagcaacagatttttcaatgtagatgaaacagccttctgttggaagaaaacaacatctrggactttcatagctagagaggaaaagtcaatggctggcttcaaaatttcaagggacagattgactcttttgttaggggttaatgcagttggtgactttaagttgaagccaatgcccatttaccattctgaaaatactagagcccttaagaatcaagctaaatctactctgcttgtgctcaataatgaaacaacaaagcctggatgatactgcatctgtttatagcatggtttactgaatattttaagcccactgctgagacctactgctcagaaaaaaagatttatttcaaaatattagttcttattgacaacgcatgtagtcatctaagagctctgatggagatgtacaaggagatgaatgttgtttgcctgcctgctaacacaatatctattctgcagcacatgggccaaagagtaattctgacttacaagt

SEQ ID NO: 730006 - DNA, 596 bp, Homo sapiens
ctataacataaaagtgcaaagtaaagcagcaagtgctgatatagaagctgcagcaagttatctcaaatatctagttaaggtaatagattaagatgactacattaagcaacagatttttcaatgtagatgaaacagccttctgttggaagaaaacaacatctgggactttcatagctagagaggaaaagtcaatggctggcttcaaaatttcaagggacagaytgactcttttgttaggggttaatgcagttggtgactttaagttgaagccaatgcccatttaccattctgaaaatactagagcccttaagaatcaagctaaatctactctgcttgtgctcaataatgaaacaacaaagcctggatgatactgcatctgtttatagcatggtttactgaatattttaagcccactgctgagacctactgctcagaaaaaaagatttatttcaaaatattagttcttattgacaacgcatgtagtcatctaagagctctgatggagatgtacaaggagatgaatgttgtttgcctgcctgctaacacaatatctattctgcagcacatgggccaaagagtaattctgacttacaagt

SEQ ID NO: 730007 - DNA, 579 bp, Homo sapiens
cctttgcagggacatgaatggaactggaggccattatccttagcaaactaacgcaaaaacagaaaaccaaatatcacatgttctcacttacaggtgggaactaaacgatgagaacacatagacacatagagtggaacaacacacactggggcctaccagagagtggaaagtgggaggagggaaaggatcaggaaaaataaataatggataccagrtttaataccttggtgatgaaataatctgtatagcaaccccccatgacacacattcatgtgtgtaacctgcgcatcctgcacatgtccccctgaacttaaaataaaagttaaataatcttaaaatctaaagtttcctttaaaagtcttctttaaaaaaagattataagagaagccctaatgatcacttcattaaggcaaataaaatggttgacgatttttcaagaatttgacagacattttagttgtctgcctaatattcattatcctgtgctttgtttctaaaacaaattctgatgtttttaagaaagcaagtactcaacctttttttttttttagattactttggccagcctcttttgcaact

SEQ ID NO: 730008 - DNA, 579 bp, Homo sapiens
cctttgcagggacatgaatggaactggaggccattatccttagcaaactaacgcaaaaacagaaaaccaaatatcacatgttctcacttacaggtgggaactaaacgatgagaacacatagacacatagagtggaacaacacacactggggcctaccagagagtggaaagtgggaggagggaaaggatcaggaaaaataaataatggataccagatttaataccttggtgatgaaataatctgtatagcaaccccccatgacacacattcatgtgtgtaacctgcgcatcctgcacatgtccccctgaacttaaaataaaagttaaataatcttaaaatctaaagtttyctttaaaagtcttctttaaaaaaagattataagagaagccctaatgatcacttcattaaggcaaataaaatggttgacgatttttcaagaatttgacagacattttagttgtctgcctaatattcattatcctgtgctttgtttctaaaacaaattctgatgtttttaagaaagcaagtactcaacctttttttttttttagattactttggccagcctcttttgcaact

SEQ ID NO: 730009 - DNA, 626 bp, Homo sapiens
ccagtaaatgaatgccattaggtgatttctactcagtctttgtactagcaattcagtctcaaatagtgatgactttagtggaaggataaggaccaattatgagagactcagcgatagttctttgtccttgggttctcaggtggtttagtgctgctgagttcatctgtggcattcctgaaataactgaagcctgaattccatttcataaccagtactggaaaaagtaagggtccaaagaggaaaagcatagaaagccacattaagcagttacctgcaatgctacagcctgatgagaggcatgaggtactgttacatgtcctctctattctgggcaaaaagtgtttttcagtttcaagtctttgtaaggctacacttccagcttttacttcagtcagaaagaatcagtgatgtgrtctcaaactgctgggattctgaaatggcctaattttaattcaaagtagttttctttagcataaaaagatgaatcattcagttagcataaagtggtatcttgggaggtataggaacatgatccatcttccatcttgcattgctaactggtgtctgtttatcttcccttccccttccatttcagagggcagcaaagcagttctgtgcatttttag

SEQ ID NO: 730010 - DNA, 601 bp, Homo sapiens
cataactgggaaatgctgtgatgtcaaacacaatgtgattatcttgttggggtatgtacttccccagctgctcagagaatgaagcctgtggaagtaggctttgcactagaaggtgagcttggggattcagggaagtaacactaacaaatatcaagggtctgggtggaattgctstaaactgtcctggtgagcaatgaaccaggaaaggggagtctgacaaggaaccctgaagatacagctgagcttatgcctgctatgtgtagccataaataatgctgcttgtaaatatgctctttccttcctttgtctcagatccttctgtaaagtcttggtgaaaccaatggactggtttctgttgtgctctggataattaattgaaaatctgcctctgggctgaagtcacagaggtgagggtactctccatcccctggaagcctgggtgttacttgcagctgaaggaggagacacttagtgttaagtgactcctcctaacactgggaaatgctcctgctgctgccgaagcaccaagatgctctgccaatcagccattcagcaccagctctgaagccactcttctacatagtcacttatcttccagggt

SEQ ID NO: 730011 - DNA, 642 bp, Homo sapiens
aaaaggaaatgtacataatgtaaaataaattacattacgcaatttacaaagtaatattaacaaaaattcttagacagctgcctccttatttaaacaaaataaatattcaggtagttaaattaacataaaatacacatttagggaataataatttatagaaagacagattgcaaattttaataaagttatattttacaatgatagatactgatctcttcaaatctgtgtgatagaaatggagaaaaaaagtaccagaaaaggaatctaaatgtttactttctaaaaataaacacaaacagatttctgaaaaatagggaaaagtttacttgagggttaaaagtaggtaatctagaaactatggcttaaaaacaataaatctacaaaacacaacaagactgacarttatattctaaataatatagagatttttgatcactgaaaacatgactcccacaaactaaagctcttcatatactgcccatttttaagatctgacttggtagaaacacagaaaaataaaaatgcaaaattaactgtttagcattagtttcattcatttaataatgtagacataaccatttttcattgtccctgctagatataaaattattataacacactgcaaaccatcctttttataaa

SEQ ID NO: 730012 - DNA, 617 bp, Homo sapiens
agcaagtgaagtcaggactttttagattgataaaaggagatgtctaaaatgggatttttatgcctcaagacatgctttctttggaggaagataaactgcataagagacagtggggtgacacatgatggagctggcttgtctgccctgatgaattttcacatacctcgctacagtacgagtggggttgactacacggtgggttacaagacctgtcggcatcaggctggctcatcaccaagcagccccctgcggaacagaaaatcatgttttgacaaataatatatyttgctatgatgaaaatacactgtggttagtgacttgtctttgaatcttgaaccaccttgggaatcccaggaatttttctgtcagtggttgactgtgaaatatttggttaaccttgaccaccttatgtagtgactccaggccctttttacccaggggagctagctcagtgcctggtactcagcaggtattcaacaagcatttgttgaaagaatgattttatagctgctattttgaaaatactaattgcacacaagctttttctgtcaggagcacatgaatccaagtccagcaattgaaaagctgatttcatttcaagttaaaattctttcttg

SEQ ID NO: 730013 - DNA, 616 bp, Homo sapiens
gcaagcacatagtatgtgttcactacgtgttaacttctgttttaatcaatcattttcgattatggcaatgttaacattacactgtcattatctagttaggcacttgttcccctttgaactataattgccctgagtgacgagaatgcttcttttctgcatatrtacctctagaatctggcttaatgtccgacatgttatgtgttctcagtttatttgtgttaaataaattaacaaactgaagtgtacacacagaaaaaccactgaagctagcaggagagctcagagtacgctagaaggtaaaagagttataaaagacccaggtgataatttgacataacaatgtgagaagatgaacatcctgaggcaatgcttccctcgtctcctttcataatctgcttgagtccctggttgtctcctctggggaagaacagcaacctcatctgctcatacatggaccccattcactttgcagctctatccttgcctctgttaccacccacttagactacccccgctccctaccttcgctactcattggattttgtatccctctactgaaataattatatggtattaaaccaaagatattaccattgttctttaaactaaattccta

SEQ ID NO: 730014 - DNA, 616 bp, Homo sapiens
gcaagcacatagtatgtgttcactacgtgttaacttctgttttaatcaatcattttcgattatggcaatgttaacattacactgtcattatctagttaggcacttgttcccctttgaactataattgccctgagtgacgagaatgcttcttttctgcatatgtacctctagaatctggcttaatgtccgacatgttatgtgttctcagtttatttgtgttaaataaattaacaaactgaagtgtrcacacagaaaaaccactgaagctagcaggagagctcagagtacgctagaaggtaaaagagttataaaagacccaggtgataatttgacataacaatgtgagaagatgaacatcctgaggcaatgcttccctcgtctcctttcataatctgcttgagtccctggttgtctcctctggggaagaacagcaacctcatctgctcatacatggaccccattcactttgcagctctatccttgcctctgttaccacccacttagactacccccgctccctaccttcgctactcattggattttgtatccctctactgaaataattatatggtattaaaccaaagatattaccattgttctttaaactaaattccta

SEQ ID NO: 730015 - DNA, 562 bp, Homo sapiens
tatttttgttgtcatgtttttcactttaattactctgacactacgtgatgttaatatttagtcagcaagaattttctcaatgtgtagttttagaggttatgataaattaaggcactgaacgcatgtcagttttcttggcagattcagcttctaaatgagctcccaggtwttaacacaaacagagttgatgcgggcatcgtactggtgatactgtgatacaatgtggtaacacattagctatgctgtgaaactgcataacagatgcaaagcaagataagaggctctgaattttaagttaaatattacttccaaatcatctgaagatgacttaaattatgaacagtacaaaattatgtttggagcagaattcattcattaaacaaatgtttatcaaacatctactaggtgcccagccctatccacaatgcttataaatcaaagttgaaatatcactgtctttctttgcaacacagctcactgtctagcgactaccggggaatcataatatgggcataaatactaactcaggagtctgcaaggtggacaggcaaggtttttcatc

SEQ ID NO: 730016 - DNA, 573 bp, Homo sapiens
cctgaaacctctcagcctctatgatcatgtaagccaatatcttataataagagacagagagatccagagagagaaaataaagaatatttctattctttatatttccttttagttctatttttttgtggagaaacttaactagygtaccctttttgttctttgtaagtagaagtgtctgctgtgctatcccattcctgaaaactgttgtaagctgggtgattttggggcagataaatggtctctttagaccatagactataggtctttaaatcaaacgaaactatactgattaaccaaacccaaggcactttgtttacacctagacatgatttacatgacaagaccctgaatcatgaacctgatgttataatgggatcaaattttgacagaggtctttggaggagtgagtgcgttttgcatagcagaagactataaataacttatggccaaaaatcagtctgtggaaattttaaaatatgtttgtaaattcttaggtaatcttgccattgagaggtgggggtcagtgtctccttccctggattatggttggacttgtgactacttaaacatcag

SEQ ID NO: 730017 - DNA, 523 bp, Homo sapiens
ccaaggtgtcatgctttcagatattattttctgagtcccaacaaggccatcaggaaattctgtcttcacagaatcatcaacttgttggcttctgtatacatcactgtgatagaactctctgtagcttctagagactggcataactttgagtttgtacattatagtgctattcactcaaataaaagagttaatgtttatagtgctctctctgccaaaaattttgctwgatcttttttcatgcgttatctcatttaatcctaataatcctttgaggataggtactactataagcgaccttctttttcaggcaaagaagccaagcttcagagacattaagtgtgtgaaaggaaaataaaaacttgagatcccaattcattatgccaaaagtaaaacattaagctgaaagctgagtcatgcaagaaaatgcctttccttttgttcctcagtagacagctacagaaaaaagtttaaatatctccacagattcaccttatcttatgtaaagtgcatatatattgagtgt

SEQ ID NO: 730018 - DNA, 638 bp, Homo sapiens
atactttcatgtagattaattacaaatgatctcagtaaaaagtagttggaaatagactggttagatattgtcattatatgcacaaaataatcattttagtattagaatagttctcttgaaacatttttctaacaatattttgtagtgagacacgttgaagctatgtatagtaagtgacaacaaaatcatatcattggtatgaagaaaaacaccaaatattctttcctcagagtaaaagaacaggaacccaaatcttccaggagcagctgtgagtcattaacatacaagtttaasagaaatgggttataacgtacctttgttttataccactggcaattgttaacttgtcttcaggtgaccatttatatagactttgatcttagcatattaaaatgtgggctcagtttgagcaagtataatcaggggaatatatcttttatagtattttgatttcagttggatacagtaaaattcaaaaatgcttaacaccacatttaatattgtcaaggaaacttacaaatttgaaaggtcagaaggtttgtaaattagtaagggaggttcttataaattgatagtaaaaacagtaataagagtaatattaatataataagaatacattttaacattcaatattaatt

SEQ ID NO: 730019 - DNA, 638 bp, Homo sapiens
atactttcatgtagattaattacaaatgatctcagtaaaaagtagttggaaatagactggttagatattgtcattatatgcacaaaataatcattttagtattagaatagttctcttgaaacatttttctaacaatattttgtagtgagacacgttgaagctatgtatagtaagtgacaacaaaatcatatcattggtatgaagaaaaacaccaaatattctttcctcagagtaaaagaacaggaacccaaatcttccaggagcagctgtgagtcattaacatacaagtttaagagaaatgggttataacgtacctttgttttataccactggmaattgttaacttgtcttcaggtgaccatttatatagactttgatcttagcatattaaaatgtgggctcagtttgagcaagtataatcaggggaatatatcttttatagtattttgatttcagttggatacagtaaaattcaaaaatgcttaacaccacatttaatattgtcaaggaaacttacaaatttgaaaggtcagaaggtttgtaaattagtaagggaggttcttataaattgatagtaaaaacagtaataagagtaatattaatataataagaatacattttaacattcaatattaatt

SEQ ID NO: 730020 - DNA, 614 bp, Homo sapiens
aggatcctcccacctcagcctcccaaagtgctgggcttacaggcgtgagccaccaaccccagcccacttgtaggtcctatgcacaacagccagagttctctctgtgtatgtcaccttgctctccacaaagaaggacagcagaagctggaagaaagtcctctgggcgcctgggctctggcgttgctctcttccacccatcgttcttatctcgcactcagggtagaaaagtctggtggaatggacacaaggaaagggctcagcacaggaggaaacaaggaggtgtaatsatgaccacagacggaggagatggcccaaggagatgataaaggaaaaggaggtgcagagctaaggaaagccccaaggagctgagagaggaaaagagacaccagagagacttccacggagatggggaggccttaagtagggcagcagcacatgtgggagagaaaccgagagggtggtgttaaagaaacgtaaaaggagccccactcacttccagtacagaaattcacccacagcagaggccaggcctcaattagaggcctacacaatggggtagacgctctcacagtccacgtccatcagcaccccttccatgttcctgcccacagaaa

SEQ ID NO: 730021 - DNA, 614 bp, Homo sapiens
aggatcctcccacctcagcctcccaaagtgctgggcttacaggcgtgagccaccaaccccagcccacttgtaggtcctatgcacaacagccagagttctctctgtgtatgtcaccttgctctccacaaagaaggacagcagaagctggaagaaagtcctctgggcgcctgggctctggcgttgctctcttccacccatcgttcttatctcgcactcagggtagaaaagtctggtggaatggacacaaggaaagggctcagcacaggaggaaacaaggaggtgtaatcatgaccacagasggaggagatggcccaaggagatgataaaggaaaaggaggtgcagagctaaggaaagccccaaggagctgagagaggaaaagagacaccagagagacttccacggagatggggaggccttaagtagggcagcagcacatgtgggagagaaaccgagagggtggtgttaaagaaacgtaaaaggagccccactcacttccagtacagaaattcacccacagcagaggccaggcctcaattagaggcctacacaatggggtagacgctctcacagtccacgtccatcagcaccccttccatgttcctgcccacagaaa

SEQ ID NO: 730022 - DNA, 593 bp, Homo sapiens
tatgataacaatattatatatagtataacaatattatatatagtattattaatatgactctttaataataatattggcagccagtagctgccaatctaatggatgtgacctggactctctttttgtcaacctgcattttttaacattactcatatcattgaacatcttttcatataattactgacaacttcaatcaattcttatgtgatagttcttatcctttcctcattttttctataaggacttctgtctttttcttatcaatatgcagaatttttgttttttaatagcctgggtacctatccttcacatgtgatattttttttctctcaggctgtggcttacatatttacatgtagcatattctttcttcatggtaatacaaacttttttttkgggggggtgcatttatttggttttttttgtatcttaatgtggtaagttctattaattttttactgatggcatctgttttttgtgagtttttaaaacaaatatatccttcattaccactatatcatacagatactcttctataacttgttgtaacttgtttctaaaagctttaccattttacttttcatatttagtct

SEQ ID NO: 730023 - DNA, 651 bp, Homo sapiens
tactgtgaacatcagataaaataaaaatatcctgttgtttatcctctttgttggagcatcagagagacttaaaaaggttccaccatctttatatgactattcagcaacgaaatatagacgggaaatctttacaaagaagtatgtaatctacaacccatactgaatttgaaatctaaaaccttcactttcaaatagaaatagccacctgactcactagtagaattaaaaaaaaaaaaacaacacccagtaacatcaccacaattatataaaagtgtattttatgttactgccatcttaaaatcagatcttccaagacatccaacttactccaatccaatttttagatgctattcttcaatgctggtatattttgaatacagttttactctatctagtgttagacactgagtgtacaaagaaacatattaaaccctatagccttcaactagttaaycccagaaatcaaaactgtgtatatcatacctcaatatttaaaatatactaatgtagaaaggcaacttactacaaaagttaatcagctggattttgtcaaagtttgtttctgttttgttgtattgcattgttttaaattgagtgaaacaaaggaagaagcggataatgcaatggcacgtattccacattaatatcttt

SEQ ID NO: 730024 - DNA, 515 bp, Homo sapiens
ttctgtgggtcaggaacctgggcatatcttaactgagccctttgctttagggtctctcaccaggctgcaatcaaggtgtcagccacggctggggtctcatctgaaatcttgactgaggaaggatctgcttccaagctggcatagttgttggcagtactcagttcctacaggacttgttgaggtaagggtctgagttcctagctagctgttggctggaggatgccctcagttccttgcatgtgccaatatggcaacatgtttcatcaaagtcaccaaagggaagagtatggtaagcaaaagggcaggtcaytatcttatttagcctaatcacagaagtgatatcccatcatgttttccatattcaattggttagaaaaaaaaacctaggctggcccaatttcaatgtacaagggcatgaacaacaggaggcaggattattagggcatcttagaatttgtctgccacagtagatttttttttttttttgagacagagttttgctcttgtcaaccagg

SEQ ID NO: 730025 - DNA, 606 bp, Homo sapiens
attgctaagcttaattttccatgcatatatgatggaagatgataatgctgtacaggtaactgcaagaattaaatcagattacatatgttaaactttgcatcacagaataggagctaaatgttttagctgttttgatagaagaggaagagcaatcttcagttttaatttattcattttttaaaaaattgccacatataaactgctttaagaggaaagtatatgagaaatttataaaaatgtatttttatatgagaaaaattaatttctcatataaatttataatttcaaattttaatttattaaaaagtcactcagacttttataaattaaattttaaaatrtagctttatttattttttcaaatatcagaatattatcattcaccatttttatgcatttccaaaatttataatgaggactttttcttcttttggatttgaatctctcatttacttcagtaccattcagacttcaacttctgttcaagactgaaaaaaactgtaatgcaattatgagtaggccatttcttccttctttctcctctactccaacttaagtacctagaatcctcacataatctccaatctttctcacatctattttact

SEQ ID NO: 730026 - DNA, 587 bp, Homo sapiens
cagaggggagtattgttcctgccctgagccccagcagatgaaaattcttagagcaaaatgaacacatgctgagtgagggcttctcattgctaagagaattgttctgttactcaagagatgcccaatcttttccctgttctcaagtctgaggtcagagcgagccatcaacgtggtatcgaagcttgtagctctgctgggcagttcatgaacctgctgatattcacagcagccaacgcgaaggctgcacctctgttcactcaatattagggctctcctcasacccactgccagcaatttctactatttctttaatatggatcaatgcaaacactgctttacttaaggctgggggactgtgagggtttttctttttcttgtcatatgtgatcatctttattgccctgaagatgtattacaaattaaagatacattctgatccattctttaagcccctgttcgaacattcctcctccaggaagtcttccctgattgcccacccaaaggtgtcttctctgccctactaagtttctaaaaggcaatcctgggctcagatcaatttctcaccatgctgggaagcagaagaagtg

SEQ ID NO: 730027 - DNA, 587 bp, Homo sapiens
cagaggggagtattgttcctgccctgagccccagcagatgaaaattcttagagcaaaatgaacacatgctgagtgagggcttctcattgctaagagaattgttctgttactcaagagatgcccaatcttttccctgttctcaagtctgaggtcagagcgagccatcaacgtggtatcgaagcttgtagctctgctgggcagttcatgaacctgctgatattcacagcagccaacgcgaaggctgcacctctgttcactcaatattagggctctcctcacacccactgccagcaatttctactatttctttaatatggatcaatgcaaacactgctttacttaaggctgggggactgtgagggtttttctttttcttgtcatatgtgatcatctttattgcyctgaagatgtattacaaattaaagatacattctgatccattctttaagcccctgttcgaacattcctcctccaggaagtcttccctgattgcccacccaaaggtgtcttctctgccctactaagtttctaaaaggcaatcctgggctcagatcaatttctcaccatgctgggaagcagaagaagtg

SEQ ID NO: 730028 - DNA, 606 bp, Homo sapiens
tggaaaggaagggcctctaatttccttttgaacttagggagaggacaccgggactcctggctttgctttttaacaccatggagagtgctcagcgatattcatcatgtgagttataattttgggaacaggcgacacgaagcctcaagaacataaatcaggagcccagctccttaatgggaagcagggaaaacatgagctgatgtctgtgatccagaaattttatgatggaaacttcatctgttttatgaggctgttaaaagtggctatcctttcatacaaagggaccgattggaaagtagggcaggagacctggcaggacgaaggaaggagtcaggcgtacccacctcctgcacagggggcgggggyggggccgcaggcacgttcagaccgtcccctgcactcagagggtctggtgcatctagaaccctctctgaggtcaggggctcctcacagctgagccactgcctccttctttggggcaccaacctgcctcggagggctgcccataacatctttttttcctgatgctttaacttaggacaccttgctgaccctggagggacggcccctcccagggctggccagttcctagagatagtaacccct

SEQ ID NO: 730029 - DNA, 606 bp, Homo sapiens
tggaaaggaagggcctctaatttccttttgaacttagggagaggacaccgggactcctggctttgctttttaacaccatggagagtgctcagcgatattcatcatgtgagttataattttgggaacaggcgacacgaagcctcaagaacataaatcaggagcccagctccttaatgggaagcagggaaaacatgagctgatgtctgtgatccagaaattttatgatggaaacttcatctgttttatgaggctgttaaaagtggctatcctttcatacaaagggaccgattggaaagtagggcaggagacctggcaggacgaaggaaggagtcaggcgtacccacctcctgcacagggggcgggggtggggccgcrggcacgttcagaccgtcccctgcactcagagggtctggtgcatctagaaccctctctgaggtcaggggctcctcacagctgagccactgcctccttctttggggcaccaacctgcctcggagggctgcccataacatctttttttcctgatgctttaacttaggacaccttgctgaccctggagggacggcccctcccagggctggccagttcctagagatagtaacccct

SEQ ID NO: 730030 - DNA, 606 bp, Homo sapiens
tggaaaggaagggcctctaatttccttttgaacttagggagaggacaccgggactcctggctttgctttttaacaccatggagagtgctcagcgatattcatcatgtgagttataattttgggaacaggcgacacgaagcctcaagaacataaatcaggagcccagctccttaatgggaagcagggaaaacatgagctgatgtctgtgatccagaaattttatgatggaaacttcatctgttttatgaggctgttaaaagtggctatcctttcatacaaagggaccgattggaaagtagggcaggagacctggcaggacgaaggaaggagtcaggcgtacccacctcctgcacagggggcgggggtggggccgcaggcacgttcagaccgtcccctgcactcagagggtctggtgcatctrgaaccctctctgaggtcaggggctcctcacagctgagccactgcctccttctttggggcaccaacctgcctcggagggctgcccataacatctttttttcctgatgctttaacttaggacaccttgctgaccctggagggacggcccctcccagggctggccagttcctagagatagtaacccct

SEQ ID NO: 730031 - DNA, 587 bp, Homo sapiens
cacccaagaatgatcaataaatactaaaaaaacaaacaaacaaacaaaaaacaaagctatgttaaacttttttttttttttttttttttttgagagagtcttgctttgtcgcccaggctagagtgcagtggtgtgatctcagctcgctgcaacctgtggctccttagctaaagcaatcctcccacctcagcctcctgagtagctgggactacgggcatgcagcaccatacccagctaaacatatgaggttaaaatgtagagagtataataatgaccctgcttttttgaatagctcactatctagtgaaaaacaaccttaaaagagttctacaaatgtttaagttgcactactactgtttgaataaagatattgcttgataacttaaaaaaaaaaatgaggtttaatttggggagtttaaaaaaagatacaactaaaatcctaggcaaaacagcatctaaatcaargctggttttttggagttaaaatatcctaagggaggcctttgcattatttaagaggaagataaagatacttattcactccaaacttcattaagcagtctattaaaacttctaggataaaacta

SEQ ID NO: 730032 - DNA, 612 bp, Homo sapiens
tccccctgccgagggcatgtgctgcggaaggccaaggtaagccctgatgtccgggggtgtctgggtgtcctgggcaggcactttaagctcccagcattctcgggtgtgagtagggagcccattcttcttcctactgcatccacttggcactcagccttcagtagacatctgggaatgggtgcttatcgagttctcaccaccccgcagatcctgttaggaaccgggttctcaaaggtgaacagtgactggaaggtgctgaccgtttagccccagtgccaacaattggctccagagtcatctcagatgcaggcaagccctgggctcctctggactcgttttctcagtggtgsggtggagattagaccaggagaccgctgaagtcctcttcagcactcagatgtgtgattctttagaaaaacaaaggaaagggtccaggaataagctttcccccagccccttccctagcaccgccagctgcatgaatcgggctctgagggcctcggaggaacctgtttactccctcctggggcagcttccggtcttctcatgggattagccactagcaagttttgatgctaacctttgaaacctcagaaatctttaaaacacagt

SEQ ID NO: 730033 - DNA, 606 bp, Homo sapiens
catgagtgtggctggccatgggcactgggctcgccttgcacgcccaccaggagggccaggggcatacgcagtcctgacgtggactttgtgtcttggcgtaccctctccacgtgcccgtccccctcgtcatcagaggtaaaggcatgagaaaatygcgctgtgaaacgttttttaccttttattattattttttggacagatgcttttgtcaccaagacatgaaaagctgccattcttcttaacctgttttttaggaatgtctttttactgtgtgtcacacttagatcaaggagttttcagaggttccttattttattaattaattatttgtgctgcttttgacaggtagcagagggttttaatacttcactaacagtacaccctcctcccccttgggctagcatccccagcccttaatccacgtcggagccggcaggtgcttctcacaccaggagcctctgggggcaggggctggctcctcgccgctgtacaggacgtttactgctgcttggggccagggcagtcctttgaaagggaagcaagttccggaatttgttcgctcatggaactataacaccttagagcaagaggcaggaattccagggc

SEQ ID NO: 730034 - DNA, 606 bp, Homo sapiens
catgagtgtggctggccatgggcactgggctcgccttgcacgcccaccaggagggccaggggcatacgcagtcctgacgtggactttgtgtcttggcgtaccctctccacgtgcccgtccccctcgtcatcagaggtaaaggcatgagaaaatcgcgctgtgaaacgttttttaccttttattattattttttggacagatgcttttgtcaccaagacatgaaaagctgccattcttcttaacctgttttttargaatgtctttttactgtgtgtcacacttagatcaaggagttttcagaggttccttattttattaattaattatttgtgctgcttttgacaggtagcagagggttttaatacttcactaacagtacaccctcctcccccttgggctagcatccccagcccttaatccacgtcggagccggcaggtgcttctcacaccaggagcctctgggggcaggggctggctcctcgccgctgtacaggacgtttactgctgcttggggccagggcagtcctttgaaagggaagcaagttccggaatttgttcgctcatggaactataacaccttagagcaagaggcaggaattccagggc

SEQ ID NO: 730035 - DNA, 577 bp, Homo sapiens
ggaacttttcaggttcaatggatcctcaataagattgcagcccagttttcttcagaaaccatagagttcagaaggcattggaatgttgacaaatttagaggtcagaaaaaaaaagactgtcatgcaggaattgtgtgtctggaaaaactctccttcagaaataatggattttatatatatatawatatatatatatacacacatatatatacatatatatacatatatatgactatacatagtactacatatatataactatatatagtactactatgaaattatatatatagtactatatatagtagtcatactataaaagctagtagtaatatgtatatttttggtgtttatatgtgtgtgtgtgtgtgtgtgtgtgtgcatatatatatagtactatatatagtagtcctataaaagctagtagtaacatgtatatttttggtgtttaattcttcctttgtttttcctatttggtttaaaagaaaatgcccattgactaatgaatgaataaacaacatgtagtgtatttctacaatggaatatgatttagccataaaaggaatgaaatactgat

SEQ ID NO: 730036 - DNA, 577 bp, Homo sapiens
ggaacttttcaggttcaatggatcctcaataagattgcagcccagttttcttcagaaaccatagagttcagaaggcattggaatgttgacaaatttagaggtcagaaaaaaaaagactgtcatgcaggaattgtgtgtctggaaaaactctccttcagaaataatggattttatatatatataaatatatatatatacacacatatatatacatatatatacatatatatgactatacatagtacyacatatatataactatatatagtactactatgaaattatatatatagtactatatatagtagtcatactataaaagctagtagtaatatgtatatttttggtgtttatatgtgtgtgtgtgtgtgtgtgtgtgtgcatatatatatagtactatatatagtagtcctataaaagctagtagtaacatgtatatttttggtgtttaattcttcctttgtttttcctatttggtttaaaagaaaatgcccattgactaatgaatgaataaacaacatgtagtgtatttctacaatggaatatgatttagccataaaaggaatgaaatactgat

SEQ ID NO: 730037 - DNA, 562 bp, Homo sapiens
tgtaaatcttttgttatttctttcatctgtgcttgaagtttttagcatacaactcctaaacattttttttagatttacagccagatatttccatattttgagagattataaattaaattgtgttttaattttggttttcacatattcatagtttattaaaaatatttaattttttgtgttaatcttgtatcctgtcactttrctgaactcatgtattagctataggaatttttatgtggaatccagggagttttctacatagataatgacatctgaaaataagtacatttgtatttattacttttcaatatatgtgccatttatttctttttcttgcctactacaagtggtgagagcagacatccacgctttattcctaatcttagaaggaaagcatttacctggaagatttttatggatgatctttattgagttgacacaatttctctctattcctagcttgctgagagtttttatcataaacgggtgttggattttatcaaatttgttttttgcctcaattaatacgatcatataatttttcttctctattctatttata

SEQ ID NO: 730038 - DNA, 562 bp, Homo sapiens
tgtaaatcttttgttatttctttcatctgtgcttgaagtttttagcatacaactcctaaacattttttttagatttacagccagatatttccatattttgagagattataaattaaattgtgttttaattttggttttcacatattcatagtttattaaaaatatttaattttttgtgttaatcttgtatcctgtcactttactgaactcatgtattagctataggaatttttatgtggaatccagggagttttctacatagataatgacatctgaaaataagtacatttgtatttattacttttcaatatatgtgycatttatttctttttcttgcctactacaagtggtgagagcagacatccacgctttattcctaatcttagaaggaaagcatttacctggaagatttttatggatgatctttattgagttgacacaatttctctctattcctagcttgctgagagtttttatcataaacgggtgttggattttatcaaatttgttttttgcctcaattaatacgatcatataatttttcttctctattctatttata

SEQ ID NO: 730039 - DNA, 562 bp, Homo sapiens
tgtaaatcttttgttatttctttcatctgtgcttgaagtttttagcatacaactcctaaacattttttttagatttacagccagatatttccatattttgagagattataaattaaattgtgttttaattttggttttcacatattcatagtttattaaaaatatttaattttttgtgttaatcttgtatcctgtcactttactgaactcatgtattagctataggaatttttatgtggaatccagggagttttctacatagataatgacatctgaaaataagtacatttgtatttattacttttcaatatatgtgccatttatttctttttcttgcctactacaagtggtgagagcagacatccacgctttattcctaatcttagaaggaaarcatttacctggaagatttttatggatgatctttattgagttgacacaatttctctctattcctagcttgctgagagtttttatcataaacgggtgttggattttatcaaatttgttttttgcctcaattaatacgatcatataatttttcttctctattctatttata

SEQ ID NO: 730040 - DNA, 517 bp, Homo sapiens
tccctttattttgagcctatgggtgtcattgcatgtgagatgggtttcctgaagacagcatacaattggattttgcttctttacccagcttgccactctgtgccttctaattgggacatttagcctgtttactttcaatgtttgtattgatatatgtagatttaatcctgtctttttgttgttagctggttattatgcctgcttgtttgtctggttgctttatagtgtcacgggtctgtgtacttaaatgtgtttttgtattggctggtaatggtgttttcttttcatatttagwactcctttcaagatctcttgtaaggtgggtctagtaatacaatccctcaatgtttacttgtctgaaaagatcttatttctccttcacagagaaagcttagtttggctggatataaaattcttggttaaagaaatttttctttaagaatatcgaatatagacctgcaatctcttctggctttcaacatttctgctgagaggtccactgttagcctcatacggt

SEQ ID NO: 730041 - DNA, 596 bp, Homo sapiens
aacagaattaaagataaaaccatatgatcatataaacagaacatgaaacggtgaaagaaaagtctttttaataaatgatgttggaaaactgaatatccacatgcagaagaatgaaattggatccttatgacactcaatatatgagaattaactcaaaatggattaatgacttaaacatatgactgcaaactgtaaaactattagaagaaaatataggagaaaagttccatgacgttggtatgggcaagatttcttgtatatgatcctcaaatcacagacagcaaaaccaaaagtaaacaaatgggattgcatcaaattaaaacatttctccgcagcaaaggaaacaatagagtgaaaagacaacccacaggttgagagaaaatatttgtaaatgatacatgtaagtggctaaaatycaagctatataaggaacttaaacaaatcaataacaaggaaacaaataactcaattttaaaatgagctaagcacctgaatagacatttctcaaaagaagacgtacaaatgacaaacaggtacaagaaaaaatgctcaacatcactagtcatcagggaaatacaaattaaattcacaataag

SEQ ID NO: 730042 - DNA, 518 bp, Homo sapiens
atccctttattttgagcctatgggtgtcattgcatgtgagatgggtttcctgaagacagcatacaattggattttgcttctttacccagcttgccactctgtgccttctaattgggacatttagcctgtttactttcaatgtttgtattgatatatgtagatttaatcctgtctttttgttgttagctggttattatgcctgcttgtttgtctggttgctttatagtgtcacgggtctgtgtacttaaatgtgtttttgtattggctggtaatggtgttttcttttcatatttagwactcctttcaagatctcttgtaaggtgggtctagtaatacaatccctcaatgtttacttgtctgaaaagatcttatttctccttcacagagaaagcttagtttggctggatataaaattcttggttaaagaaatttttctttaagaatatcgaatatagacctgcaatctcttctggctttcaacatttctgctgagaggtccactgttagcctcatacggt

SEQ ID NO: 730043 - DNA, 604 bp, Homo sapiens
cctatcatttatttctttgtggggagcctcagaaagaaaaggctgaaggaatctctcagagtgattctccaacgggcgttagcagataagccagaggtggggaggaacaaaaaggcagctggcatcgacccaatggagcaaccacactctactcagcatgtggagaaccttcttcccagggagcacagggtcgatgtggaaacataatttcccacatctgagctggggaattgtacacatagtaacccagcctgttctgcmtcataaggctgctgcatcaaatcaatgctttattctaatcaagttcagctttcatggactttcaaaacaaccccttgctgtttgtggttggaagagacattaacttccttcctaggcagtaagcccagtttgaatgtgctccagttccaacgatgaggggaatgggacccagtgagactttcctggtacctgtggaatcccaaataaagaccatacaaaaggccatgcattattctcaatcattatcctggaacatcctccaaatccagccacagattttcctccctttgtctatctcctccttagatagagcttgagcttgtcggaattaccaagaggcatc

SEQ ID NO: 730044 - DNA, 495 bp, Homo sapiens
atgtgtgatgtgctctctttggtcccatcgcttcctattgtgattcctccaccctgggcacttgctctcatcctgttctgccggctgctgcctcactcaacaaaacctgtcgacttcgactaaggtcaagattcatgggtcgaccttagtaccacctgccattggccccacgaccatgccctgtgccaccacccaggccccagagcccasggcacagcaggttcaccctgaggacatctgaacaggtcttttttcacaagaggacagaagaaaggatagcgacactgagctccaatgccgtgaagaggagcatcacagacaggatcctctgaaatgcaggatgcacgaggtctgtgctggactggccaacccttctgccttcctgagatgaccagatgggtttagacagtgtcatctgctggctcctcttccctcgtacctgactcaacctgctcatgatctgggagacagtgtcatatcctagtatcctgggcc

SEQ ID NO: 730045 - DNA, 600 bp, Homo sapiens
caattcactaaatagattaggtgaatccttccaatgagaagaacagagaactgtgagcttgagagtgatggaacttactttcctgacaacaagtgtgattctgtctgttcttttacccaagaatgtctagctggaaaggacactcactgaatgaatggaattaaatgcctgtcacgtgggtgccagaatggagctagaggcagtaacaagatgatactaggtacatacagttcttgacaaaataatgaatgcatttcaaatagatgcaaatattttaattttaacttggacaagggagggaggtgtatataatttgggggtaggtgaaaaaggcctaagtgttggttatggtgagggcattccaatgagatatcgcaggacattctatgtggtatgactctaagaagagttttcacagatataaaaagagatggaaggaaaggaagttcttttttctygcattttttatatcatattctgagtatgaagtcatatcctaagcattcggaaaacatgcccagtgaggaatgaggacaatattctgaagatgccagaagtaaaagtggataattctaattttttcaagacattgtgccactg

SEQ ID NO: 730046 - DNA, 648 bp, Homo sapiens
ctgaacaatggcgagaaatgggatccaccagagaataaaggaagggttttgcatgttccagtgaggtgttgggcttcatgtcgttcattttgttttattctattgaattttattgctattattccacataaaattcaccattttaagttacacaatttaattttaaatatattcacaagatttggaactatcattgctatctaattccagatcacttatatcacccttaagagaaagcttatactcattagccgtcagttcctattctcccctcctgcagcccctggcaaccattaatctgtgtttagtctgtatggattcacctattctggacactttacatacatggaattatataatatgtggtcttctgtgcctggcttctttcactgaacatgctgttttcacatttcatccacatgatagccaatgtcagtgtttcattcctttttatggctgaaggacattgcattgtgtagatgtatcagtttcctagggctgctgyaacaatgtaccacaaactgggcggcttcaaacaacaggaacttattgtctcataactctggaggttagcagtctaaagtgtcagctggctaccctccctctgaaacctgtaagggaatcctaccttgcctcttcctaacttct

SEQ ID NO: 730047 - DNA, 624 bp, Homo sapiens
agtatattaaggcttttcaatcccctttatgggcatctcattccctgacatttcgtttttaagttcttggttaggctattgtttgttccaactgttatttatgaccrtcggcaaccatgatgttcaacaactgcctatgattctttttactcatttccccaggaaatacattgttctctctgggatagctctgagtcaagtcaaataaggatagcattgtgagttctagggaacaaccagacaggtaaaataataacagtcctctggaaataagggattaaaggatctgtaaccctattgtgtcccctccagtgatttcatgtctgctggttttcaccatgattgtggaccgttggtttttaagagctgaggaggaaggaacaggagtggaaccagttaaaacatcacagagctcactgttcttatcaagattcagctattattcttgaacaaacactctccagattgcagcaagcctttggttaatttctagagttctaaacaatattaattctgacaattcttccatagttcattttactcttaggaagtaggtcatttttggaagtcattactctgttatttttgttgatgtcactgtgttactggaaaggggccccaatc

SEQ ID NO: 730048 - DNA, 624 bp, Homo sapiens
agtatattaaggcttttcaatcccctttatgggcatctcattccctgacatttcgtttttaagttcttggttaggctattgtttgttccaactgttatttatgaccatcggcaaccatgatgttcaacaactgcctatgattctttttactcatttccccaggaaatacattgttctctctgggatagctctgagtcaagtcaaataaggatagcattgtgagttctagggaacaaccagacaggtaaaataataacagtcctctggaaataagggattaaaggatctgtaaccctattgtgtcccctccagtgatttcatgtctgctggttttcaccatgattgtggaccgttggtttttaagagctgaggaggaaggaacaggagtggaaccagttaaaacatcacagagctcactgttcttatcaagattcagctattattcttgaacaaacactcyccagattgcagcaagcctttggttaatttctagagttctaaacaatattaattctgacaattcttccatagttcattttactcttaggaagtaggtcatttttggaagtcattactctgttatttttgttgatgtcactgtgttactggaaaggggccccaatc

SEQ ID NO: 730049 - DNA, 591 bp, Homo sapiens
attcatagccttctgactccctttgtttctgttgagatgttggcagtcatttttattgttattccttattatgcaatatgtctctaccacttcagcgggttttcagatttttctttttaaatctttgtttttctcagtttatgatgtatgtagatgtggtattgataatgtggattgctatttttatcgaatttgaaaaaattttgccaacattttttgaacaatttttttgtttgcccttttatctctcttctcctttttttcccctaatttttattttagtttcaaggggcacaggtgcaggtttgttacacgggtaaattgcgtgtcattggggtttggtgtacaaatgattttgtcacctaggtagtgagcacagtaamcaataggtagttttttgaccctcaccatcctgccattcttccaactcaagtaggccctggtgtctattgttactttctttgtggtcatgtgtattcaatgttttgctcccacttacaagtgagaacatgcagcatttggttttccaatcctgctttaatttgtttaggataatggtctccatcaggatccatgttgctgcaaaggcca

SEQ ID NO: 730050 - DNA, 475 bp, Homo sapiens
aacaattcttacttcaaacatgtaagcatgacgttcctctccttcatgccttcctggccttttttttttttttttttttttttgagacagagtctcgcttcttcacctaggctagcgtgcaatggtgtgatcttggctcactgcaacctccacctcccaggttcaagcaattctcgtgcctcagcctccccagtagctgggattacaaccacatgccagcacgtccgactaatttttgtacttttagtagagatgggggtttcactatgtaggccaggctggtctcgaactcctgacctcaggtgatccgctcgcctcggcctcccaaagtgctgggaytacaagcgtaagccaccgtgcctggcctggccctattttatctgggtctgacaaaagttatttcatcctagtatctgcaatttttccgcagaaaattacagagacgcacagtgaatgtgaaaggagggaaattaac

SEQ ID NO: 730051 - DNA, 473 bp, Homo sapiens
tggaggttaaggaagagaatatttcagtttgaaaatatgaagctaagccccacaacgaaatagttacagagttttaaaaacgaaaatgttcattaaaacccaccaccagaaactctctttcaagaggatccttcatattttcatgkcattgaatctttcttaaagtgcatttgaaagagatgttttcagtggaatagagagatgtgtaacaatatttacaaaagcggttggctgtaataaaaaggaaaacgcaaatgagtggggacacaggggaccctgttccatttattctcaaagcacgtttgaaaactgcgttgccatagcgtccttgggtagaggcaaagtcgaggcagatcttgttcctggagtattgatttgattttggaaacggtccaaggctttcagaaatcaggctgactttcagatctaaagtctcaagaatattcgttctagcagtgagcctgtgagaatct

SEQ ID NO: 730052 - DNA, 521 bp, Homo sapiens
actcacaaactggggaatggagggatcaggctgacaatacctgaatcttccatcaaatctaccatcactaatagtgggatgagatcatatacctctaaatgtgataccataggtacacagcactgcttttgaagtattctccttaaaaaattgaacccagccgggagyggtggcttacgcctgcaatcccagcactttgggaggccgaaacgggcgagtcacctgaggtcaggagtttgagaccagcctggtccaacattgtgaaaccccgtttctactaaaaatacaaaaattagcctggcatagcggcgggcacctgtaatcttagctactcaggagactgaggcaggagaatcacttgaacccaggaggcagaggttgcagtgacccgagatcgcgccactgcactccagcctggatgacagcgagactccatctcaaaaacaaacaaacaaaaaccccaaatctgataaagccttttaagtaaataaaaataaaagctaaggaatgattatcacaga

SEQ ID NO: 730053 - DNA, 521 bp, Homo sapiens
actcacaaactggggaatggagggatcaggctgacaatacctgaatcttccatcaaatctaccatcactaatagtgggatgagatcatatacctctaaatgtgataccataggtacacagcactgcttttgaagtattctccttaaaaaattgaacccagccgggagcggtggcttacgcctgcaatcccagcactttgggaggccgaaacrggcgagtcacctgaggtcaggagtttgagaccagcctggtccaacattgtgaaaccccgtttctactaaaaatacaaaaattagcctggcatagcggcgggcacctgtaatcttagctactcaggagactgaggcaggagaatcacttgaacccaggaggcagaggttgcagtgacccgagatcgcgccactgcactccagcctggatgacagcgagactccatctcaaaaacaaacaaacaaaaaccccaaatctgataaagccttttaagtaaataaaaataaaagctaaggaatgattatcacaga

SEQ ID NO: 730054 - DNA, 587 bp, Homo sapiens
ctataataaagttccttagaagattttttatatcttcctttccccaactactataataaacagctagttgccttagagaccactgcaggttttactattttacaacctggcctttagtactgacattaggcaaactcaatgttgtttaatagtgtcaaagaaaatactgaatggtctcctcataatcacaccagagattttccaatttgtgttgatagtwgggagcttctggtgatctgggctaaggagtaagataatgaaaatagaatttagaatgttttgcttaggaatagatgtccaaatggataagacaaaaaagggaccagagacaagaatatcagagaggaaatggatgcttaatgtgaattgaaggaatgtctgaactagactaaaatccaaaattacaaatgagaagcacagggaaaccaggtggtaagtgtgtgctgagcagtagctagaagcttggtgtggctgtgactggggtgcctgaaagggcctgggctctgcagaggtgtgttggaaggtggtgggctaggaggtcccctcttccctgccccccttccgtccttccatgaggtaattgcatg

SEQ ID NO: 730055 - DNA, 643 bp, Homo sapiens
aaaatcagactaaagaatgatcttggcgtctgtggtgaataatcaaattgagtatcatttctttacttttgctggaaatgtgtagttactaaaatagtaggcatttcagttaaacctaagaggaactaaggataatcacttctcaagaattggaggtaagcccctttaggagaatgtttggttctgtaggggctgagggacagagatcattaccccttttggtctctagagggcaacagggtaccatttgaaaacagccttaaactacccttgtgtatgctgctatttgtaaaggaaaagaggctagaagggaagaaaaaaaaaggatcaacgaaaatayatattgcaatgaaaaaaactcctgattctggtcccagctcagtcctcattagacacttgctgcattaccttgaagactcttcaccccctgggtctcagtttcttcctcagactggaagacctccaagcccttctagatctaaacctctaatgctctttgaaaagcatgtttggagacacttcctgattcatggaccctgggtttatcctccctgcacgggaataggcacaaagcacgtgacaattgttccctagtcactacacctctcttcatctcagtgcagactgctaatgcttatagcag

SEQ ID NO: 730056 - DNA, 615 bp, Homo sapiens
taccagtgggtcagggtactagcctgcccaacttgtcacagccaccaccaacaccagcacagactgcttgggtcctagcaggttgttccaccactgctactgccattacccatttcwcaccagctgcccaggagcctgagaagttgcccacatgtctggcccactgctgccactgctagcatctgagcaagtcacctgaaggcccaataattggccctccaagacccactaacgctgttgtcagtttaagccactctgtgggccctagcacaggctcattcaacccaccgctgccatcactagggcctgaagactggcccacctagcatcttagttcccagccaaacttcaccacagccttcactaataagtgcaccttaagtcaatgaggaagtcacagataccactgatgttgtatactgccaaataaatcatacagggatcacactactataggcactcaaaatcaaagccaaagcaccctactcaacaaacaacacgtaaaatcttcaggaaaaaaatcctcccctatgaaagcaatttcaaaaatggaagaagtgactgttgcaactaaatgtgcagatatcaatgtaaggacacagaaaactaaagaac

SEQ ID NO: 730057 - DNA, 623 bp, Homo sapiens
gagctttatgagtgagtgtcctggtgacggctcctccggggagccaaggaccaactttcctggcacgttgaggtcccctcgccctgtcacactctcctgcattaccccattctactctgtcttcatattttatactatagatatttagcttttaaatagacatttctggtctgtgttttatttcaagtgtctgggaacrgatagagttgaggttcaagggagaatgagagctctgtctagatgcgttgacatagcacaaagaaatctcccctcctccctgatatctccccgccagttctcagggaaggacagattcagagcaacacagacaggtctggaaagggatggggggacatctgaagcaaatgttcagggcctgaagctgtgagagtacacctgccctacagagttggagccctcatgtgatgatgcagagctgaagtgttatattctggaggggataaaaagtgctctggggtttcctgattatgaagggtaggggtcagtctgcttctaggagatgtggactgaattagtgaaaaataaatgcacagggaatgaggatgagtaaagcaagcatcagcatctcccgccatcagttcagactgattcggaggtgggga

SEQ ID NO: 730058 - DNA, 623 bp, Homo sapiens
gagctttatgagtgagtgtcctggtgacggctcctccggggagccaaggaccaactttcctggcacgttgaggtcccctcgccctgtcacactctcctgcattaccccattctactctgtcttcatattttatactatagatatttagcttttaaatagacatttctggtctgtgttttatttcaagtgtctgggaacagatagagttgaggttcaagggagaatgagagytctgtctagatgcgttgacatagcacaaagaaatctcccctcctccctgatatctccccgccagttctcagggaaggacagattcagagcaacacagacaggtctggaaagggatggggggacatctgaagcaaatgttcagggcctgaagctgtgagagtacacctgccctacagagttggagccctcatgtgatgatgcagagctgaagtgttatattctggaggggataaaaagtgctctggggtttcctgattatgaagggtaggggtcagtctgcttctaggagatgtggactgaattagtgaaaaataaatgcacagggaatgaggatgagtaaagcaagcatcagcatctcccgccatcagttcagactgattcggaggtgggga

SEQ ID NO: 730059 - DNA, 623 bp, Homo sapiens
gagctttatgagtgagtgtcctggtgacggctcctccggggagccaaggaccaactttcctggcacgttgaggtcccctcgccctgtcacactctcctgcattaccccattctactctgtcttcatattttatactatagatatttagcttttaaatagacatttctggtctgtgttttatttcaagtgtctgggaacagatagagttgaggttcaagggagaatgagagctctgtctagatgcgttgacatagcacaaagaaatctcccctcctccctgatatctccccgccagttctcagggaaggacagattcagagcaacacagacaggtctggaaagggatggggggacatctgaagcaaatgttcagggcctgaagctgtgagagtacacctgccctacagagttggagccytcatgtgatgatgcagagctgaagtgttatattctggaggggataaaaagtgctctggggtttcctgattatgaagggtaggggtcagtctgcttctaggagatgtggactgaattagtgaaaaataaatgcacagggaatgaggatgagtaaagcaagcatcagcatctcccgccatcagttcagactgattcggaggtgggga

SEQ ID NO: 730060 - DNA, 455 bp, Homo sapiens
taagatcatgtctctccccccgactcctgatcctcattcctttctttttctttttctttctttcttctttttttttttttttgagatgcagttttgctcttgttgcccaggctggagtgcaatggcgcatcggctcaccacaacctccgcctcccgggttcaagcgattctcctgcctcagcctcactgagtagctgggattacagacakgcaccaccatacccagctaattttgtatttttagtagagacagggtttctccatgttggtcaggctggtctcgaactcccgacctcaggtggttcgcctgcctcggcctcccaaagtgctgggattacaggtatgagccaccgtgcccggcaacctcattcctttctggtgctgttgtttcgccctctcattcccttcttctaacttggtaggctttgttcttgcctaattcctcttcagtgttc

SEQ ID NO: 730061 - DNA, 455 bp, Homo sapiens
taagatcatgtctctccccccgactcctgatcctcattcctttctttttctttttctttctttcttctttttttttttttttgagatgcagttttgctcttgttgcccaggctggagtgcaatggcgcatcggctcaccacaacctccgcctcccgggttcaagcgattctcctgcctcagcctcactgagtagctgggattacagacatgcaccaccatrcccagctaattttgtatttttagtagagacagggtttctccatgttggtcaggctggtctcgaactcccgacctcaggtggttcgcctgcctcggcctcccaaagtgctgggattacaggtatgagccaccgtgcccggcaacctcattcctttctggtgctgttgtttcgccctctcattcccttcttctaacttggtaggctttgttcttgcctaattcctcttcagtgttc

SEQ ID NO: 730062 - DNA, 610 bp, Homo sapiens
tgaaaataattcagaagatctatacatgctgatgagaaaatgttcaagccacacttttagataacaaaaatgagttacagaaaaaaatatagagagaatcctttgagggtgtgtgtgtgtgtgtgtgtgtgtaagagtgcattcataagcacacacattttttggaaggatgtacaaaaatcaaacaatggttacctctgaggactatgaatggagggagaaaggaagacaartttttagtcttgactttatacctttcagtgctttctgaatttattacctacagcatgtaacttttgtgatagaaaatttaacagaataagataaaataattgccatagcaaagaaaggaaaaggaaagataagacaaatgcagaaggaagaaaaagagagaaaaaattatgtagtaactttcaggttttaatatatttgcaggataattactagtgtatataaaacctgattacatttctagccaagtttctagtactatcaaccaggagttcacacagttttagtcctgaaagggttttgcattagttagtccaattactctattctacagatgagcagactgggactctaacatcacactgacaatatcctcttt

SEQ ID NO: 730063 - DNA, 587 bp, Homo sapiens
ataaaaagagttcctctttaagggttaacttgctcagcatcctggctctttgttccctgctttcaaggccagacttccttacgctctgtatcccctgccctggtaaacaaatttcccgccagtccttatctatggagaccacatcccacatctgctacccactctatagattaaccctcctgttgcaacagctcctcccgccaagactgcactctctgttggtataaccacattcctgcacttttcaagttagccagccaggttcagcttagattgtgcagtccagctccagccaatggagacaagacacagttacagggacaagctgcattaagagattataaaaaacccctgctctcctttgttcaggtgtgcactygccatcgttccatcataagtagcatcctttctgcagaagtcaattgccttgctgagagatcctttgtctcagtgctgatctttctttacaacactgagcatttgttcccaacaagcagtactgaagaaaaaactgatatccttaaatgcctatattaagaaagaaggtaggtctcaaattagtaaattagtttctcctgtaagaagca

SEQ ID NO: 730064 - DNA, 644 bp, Homo sapiens
gttcaggagaatcgcctgcctcagcctcctgagtagctgggattacagacatgtgccaccatgcccagctaatttttgtcgttttagtagagatggggtttcaccatgttgatcaggctggtcttgaactcctgacctcatgatctgcccgccttggcctcccgaagtgctgggattacaggcgtgagccaccgtgcccggccacttttttaaaaaattattttttatttcaaggtttttaggggtgggtggtgtttggttacctgaattaattctttagtggtgatttctgagattttggtgcacccagcagtcaggaaggattgagcaacagggtggggaatatccatctccccacctccctaccccgatcagcctgaactgatggcagaaactgactgctgatgcttgctttactcacccacattccccattcacttattcttcatcaatttggttcacatgttcccagcagtcgcttcaccccagaagcagtstgactcctattcttcaataccagggaaactcaaagccctctctgcccccatctctgatattacacttcagctcaacatcatcacatgaaggatccaactcttcagggcagatgttcccccagagtcagcccctgaattttggcccca

SEQ ID NO: 730065 - DNA, 469 bp, Homo sapiens
gagaagggggagagtggaaggaaccaggggggagagaaaaacgagaagggccctgttagaagttgtgtgtgcatgtgtgtgtgtgtgtgtagatcaggagggggtttctagggacctggggaaaggagagctaagggcaggtgctaaggggcccagccctgttaattccaaggtcyggaattaattccaggatactgcacttcctacagtaccactttatggccatatccaagtccagccctgagcagcctatggtcacagaaaatcgtgagaataatcagagaaaaatgacacgttacatacatgagaacaattatgagaatgaccagtccatgtgttcataatttgtcatcagaaactatggtggtcagaagacaatgaaatggcatttttttgagtgctgtaagaaaacaacctaactcagaattgcacatccagtaaaaatattttcagggaagaaaaatgaaaa

SEQ ID NO: 730066 - DNA, 544 bp, Homo sapiens
ccaccagcccaccgggaggaaggaacaactccagacgcgcggccttaagagctgtaacattcaccgtgaaagtctgcagcttcactcctgagccagtgagaccacgaacccaccagaaggaagaaactgaacacatccgaacgtcagaaggaacaaactccggacacgccgcctttaagaactgtaacactcatcgcgagggtccgcagcttcattcttgaagtcagtgagaacaagaacccaccaattccggacacaatacgaccccagcaacaggctatgtcaaaagcctgaaagacattccctagccccataggaaaaacacagctgtttactgagcacccactatgygccaggccatccattaatattaaacttctcaacaacccttcccaacaaagtaggaaaagtagctccatttttctaaagaggatgggcagaccgaaggcctttactgacaagcccaaggtcgcacagctagtaaatggcaaaaccaggaaagtaacccaagcctgtaaagttccaaaactccgattttcctcct

SEQ ID NO: 730067 - DNA, 468 bp, Homo sapiens
tcacttgaggccaggagtttgagaccagcctggccaacatggtgaaacctgtctctactaaaattacaaaaattagccaggtgtagtggcacacgcctgtaatcccagctactcaggcactgaggcaggaaaatcgcttgaatccgggaggcggagmctgcagtgatccaagatagtgccactgcactgcagcctgagtgacagagcaagatacagtcccaaaaaaaaaaaaaaaaaagaacgatgtggtcttttatttattatgattctcaattcagctttccctccggtattttgtagatccaaacacctctgacagatttgatgcaaattttagtttccccaaatgagcactcctaatattaattgtactctatgctgtcactggccaatcaagactgaggactgctcccagtcactatagggaactcaccagagaatataaaattaaatcatgaccctgaaaag

SEQ ID NO: 730068 - DNA, 660 bp, Homo sapiens
ggtcttctctatgaaggaaaaaagtctccttaatttacttatgtaaagaagttacttcaatctgaaagttattttgttttcattatgctactacttttttttttttaacgagaaaggatcctctaacttggaaaaatctgtttgtatctcttcttagatatgagattaaggaggatttgggagaatgaggcattcctttaccaggaagtgaagactctgcaaattagaaaaattatgaaggcatgtaagaaaataaaaaatcatttaagtggtgtgcaatataatggtgaatatgtacctatgggttcagtaatttgctttgcaaatattaawcccattttattgttgatgatttagttatgtaactaaatggagagtcttattgtccttaatgaaaatgactaataatctttcctttataagactagtgaatataaaaattctaagtaaaatagtgaattttcaaattaacacaattgtttgccctcaattattgtctgcagatattaaaagtaagattcttaaaatgtgccctacttctctggtaataatggtaaaataaaaaaaaaagcctgattctcaatattaaagaaaataaataacttgagggaaaataaacatacatatttcattctataattatggaaagaatgaaaacat

SEQ ID NO: 730069 - DNA, 593 bp, Homo sapiens
caaatactctatgattccacttataagaaatatctaaagtagtcaaatttatagaaatagaaaatagaatggcagttgccagggactggagtgagaagaaaatggggagttgctgttcaggcacggagtttcagttttgcaagattaaaaagttctacagaaacattgcgtagcacattaatatagctgatactactgaattgtacacttcaaaagagttacatgtggccaggcacagtggctcacacctgtaatcccagcactttgagaggatgagacaggcaggttgcttgagtccaaaatattgagaccagcctgggcaacatggcgaaaccccatctctacaaaacatagaaaaattagctgggcatggtagcacacacctgtagtcccagctacttgggaggctgaagtgggaggatggtttgagcctgggagktcgaggctgcagtgagttgagatggtgccattgcactccagcctgggtggcaaagtgagcccctgtctcaactgtctcaaaaaaaaaaaaaagaaaagaaaagaaaagaaaaaaaagagttaaataataaactattctttttcttcagttttta

SEQ ID NO: 730070 - DNA, 567 bp, Homo sapiens
atgaatcgagcatttgatatttttgtaaagaatcttctttaaatacatgtaactttcttagttggcaaaacattaatttctgtaagactaatttcttcaccgctttttattttttccttttgcatttatttagaatttaagtaaatttattattattataaatgcaaaagtaaaagattaaaaaaactactgttgtaggaatttttaagacattataaattcatttaatcatcaaatatgtttgaaaattaattcattcaatagrtatttttggagcactgtttatgccttatgacaattcttagcaagcaatgtagacatgtaagatgatctctaaaagagcttgtatcttcttggagagtaaatacatgtaacatataaccatgaaacttaacaataagaggctgtaggaaaataataaaaaatgtaatagggtgggaaaatattcaaatctttcttttcctgttttctttataggagagttatctatttaaacaaatcataaccttgcatttaatatatatatagaaaatatctgaaaatttcttcacaaaaattaaaaatgaa

SEQ ID NO: 730071 - DNA, 574 bp, Homo sapiens
tttgaaaccaaattcaattgaatccaattcttttatgttaatgttattaaatattcttccagtatggaaaccaggagtatcattatgtgtatgttgagaaaagagggattaaaatttgatgacaatgttctatttttattagcagacaacaatttaaaaggttgttcatcaagagaattaatgtaatcctgaaaaagaaaataaaggaagttccattatgaaagatatccattatgtgtttcaacaaatcaaatttgaaaagcaattctcaaagttgttaaatttatgccagtacatgttcagaataccagctcatgatactaatgttgaattttttttaaataaagaaygttcaatgaacaaaagaatggaatcagatgaatgtggccactgtaaaatgtaagtggaacatagagtgtatctgaaaggaatttcataaacaaatgctgcaaaataaagaactgttaagtgtcaacacagaacataataaagaatataaatagcctatatagggtatataaaaaataagatatgtcatttagttacttatattgtggtaaggagaggtgacttt

SEQ ID NO: 730072 - DNA, 605 bp, Homo sapiens
tctaaaagctcttctttgtgtttgttaacacaaaacagaattttcagactattgcttatacttgttttatttaatgtgaattcagggtttagatacatatactcacagagtgcaattgtgatactcaaagagcttcattgaatttatttcccttagaaaaggttaaatagggttgaaatatttgagcactttattttcattttttcaaatatctagatcaggggtcagacaactacacgcataggccagatctggcttgctgcttgcttttttttttttttttaataaagtgtcatgagattgcagctatacctacttgattcagtattatctagggcagcttttgcactataatggcagagttgagtagttgtgccggaaaccrtatggcctgcaaatactaaaatcttaactcactagccctatgcagaaaaagggtgccagccactcatctaggtgaataaataaacttcatgtaaagctctagaatttttaagtagtatgaatagaacattgatgtgttaactgagtatgcactgaagatatagttttatgtcttccaggaacaaaatatataaatggaaaaatctgtcagtgagtcatta

SEQ ID NO: 730073 - DNA, 583 bp, Homo sapiens
ataatggccataatgcccaagatggaaggttgtgggtttatgggaatgagggcaaggaacaccaggcccgcccagggtggaaaactgcttaaaggcattcttaagccacaaacaattagcatgagggatctgtgtcttaagggcgtgttcctgctgcaattaattcggcccatcccttcgttccccataagggatacttttagttaatttaatatctatagaaagaatgctaatgactggcttgctgttaataaatatgtgggtaaatctgttcggggctctcagctctgaaggctgtgagacccctgatttcccacttcacacctctatatttctgtgtgtgtgtgtgtctttaattcctctagcgctgctrggttagggtctcccctatggagctggtctggacaggctgcccgcatgcgcagagcactccttaccctcaggaagtgagcatgcagtgtgtttagggagttgtacgcatgcccacctgaggctttcttcctttttccagtggagtgtacctgaaagatcatacttcaccatttttgtctctcactgtgcatgcctaggaagtttcttctcc

SEQ ID NO: 730074 - DNA, 458 bp, Homo sapiens
ccaggtgatctcaataaaatttacattaaagtctaaaaagtgctttcctaaccaacacaattctaatgtcacatttaaatggacaatctataagtttaataattgtttttctatttacatttgtaataatttcattcggattttttttttctccatctcagtccagttggcagtcaccaattacaccaatccccwaattatttatcttaatttaaggaagaaagacaataatggggtaaagatactagtagtttccttctaatactccagagattgggaggaaaatgattttgaaggattccaactttcatattgaataagtaaattaatataaaatctatagcagatgatggatttgtaataaaaatatgtaagtacattaaaaaccagctacttattgagacaccatgaacatatacagcaaatgtcagtttagtaacatattcactcattgtttt

SEQ ID NO: 730075 - DNA, 563 bp, Homo sapiens
atatatataacagcaaagaaaattttaggaccagaggacttcactgttgaattctataaaacacaaaagactaatgaatagcaatccttccaaaactcttcgtccaaacagaaaaggaggcaacatatctcaagtcaatttattgaaaccagtattattcaaattccaaaaacaaagacatcacaagaaagcaaaatacagattaatttcttataaatgaagtgcaaaaatcctaaataaattactagcaaactcaatccagcaacacataaaaacaccatgatcatgtgggattgatctcaggaatgcaagacagctcaatatacraaaatcaatcaatgtaatatatcaccttaatagaagcaaaggataaaaaacacctgattatctcaagagatacagtattttacaaaattcaatgccctttcatgattaaaacaacaacattcaacaaattaggaaaagaagcgaacttcctcaacctaaaaaaaagaaatatctggaaaagctacagctaatatcataattagtggtgaaagagtgaatatttttcacaaaagatc

SEQ ID NO: 730076 - DNA, 586 bp, Homo sapiens
ccctgggccatgggcttgaggagacacagtcctgccctcagccagctcactgtctgccccagctctccccactttacagatgagtaaactggggcacagaggagtgacatgcctgcttcaaggtcgctcagtgcctccaatagcagagctggcasccggccccaaggagcagagagatgttttttgtttgtttgtttgagacggagttttgctcttgttgcccaggctggagtgcaatggcgcgatctcggctcaccggaacctccgtctcctgggttcaagcgattctcctgcctcagcctcccaaagtgctgggattacaggcatgcgccaccacgcctggctaattttgtattttttttagaagagacagggtttctccatgttggtcaggctggcctcaaactcccgacctcaggtgatctgcccacctcagcctcccaaagtgctgggattacaggtgtgagccaccgcgctcggcctgagatgtttttaaaacagatattattggctgcgaatcaatgagaaaactgtgtgatggaagtctcaggatcccaagctaaatgttaagtcagtaattccactt

SEQ ID NO: 730077 - DNA, 608 bp, Homo sapiens
gtgacagcacaggacaggacagaggactcttgcaattgcctatgccctgaccgaggagaaccaggctgccggccctcccatgggggccgagcttcatccaccagtgtggtctgggcctctggccacagtgaaagactaactctctctcctgctggtcccaagcacataggctggaggtgtggctggctgacctcaccattttcccaacaggctctcattttkgccttgtggggcagagtggggacagggcccaattttgtagccagaggaaacagtggtccaggaggcctgtgacagagtctgtgacatccttcccatcacccccagtagaagagcccaaggccaaatcccaatggcaagaagtgtgggaacatgggaacagtgggaccacccagtagcgaccaactccccaacgccaaaggtggcaggagcaggagggaagaagggcctgacctgcccttggagggtagccagaatctgcagaccctcttcctcctcatttccaggctgcaaggccaactcctgagactcagaaatttcaaagaagggaccctgggctcctcgggtccagcccaagccagaatctccaatctcacacacactttagc

SEQ ID NO: 730078 - DNA, 608 bp, Homo sapiens
gtgacagcacaggacaggacagaggactcttgcaattgcctatgccctgaccgaggagaaccaggctgccggccctcccatgggggccgagcttcatccaccagtgtggtctgggcctctggccacagtgaaagactaactctctctcctgctggtcccaagcacataggctggaggtgtggctggctgacctcaccattttcccaacaggctctcatttttgccttgtggggcagagtggggacagggcccaattttgtagccagaggaaacagtggtccaggaggcctgtgacagagtctgtgacatccttcccatcacccccagtagaagagcccaaggccaaatcccaatggcaagaagtgtgggaacatgggaacagtgggaccacccagtagcsaccaactccccaacgccaaaggtggcaggagcaggagggaagaagggcctgacctgcccttggagggtagccagaatctgcagaccctcttcctcctcatttccaggctgcaaggccaactcctgagactcagaaatttcaaagaagggaccctgggctcctcgggtccagcccaagccagaatctccaatctcacacacactttagc

SEQ ID NO: 730079 - DNA, 610 bp, Homo sapiens
accggggctgcaaacagatctagaattgaagaaagatgtcattactgggctcatccactaagtgttgtcacttgactgagccccatctcctcatctataaggtacacctgtacctgtttcaatgagactgatttgtggcaaagcacccagcaaytgtaaccactagatgaatgcaatggggtgttatcaggcaaacgggaataagaacaagtattatgaaacagctagaatggaaagtatgcaaagaggaatttgaagaaaaaatttaaatctatgctagctttatttggtgtagcaacacgtaaaagcaatccctgtccccagagcttcctgtcttctaaaataagacttttggggcatgaaatacacgaactggggatacagatttgaatgatggtgatgatggagtgagcagctgggttctctttgttttgttttgtttttttaaactgtccaggaccaggttggaaaaaggccttgagcagcgtggggtgggtggggcatgtggaaaggggacctaaagagagaagcaggaacaggctactgaaatccagagacccttgcctaggctgttgagcaagtggctttgccccttggggtgatggtttgt

SEQ ID NO: 730080 - DNA, 540 bp, Homo sapiens
tcaaaataacacaaaacacgaatgtactatcttactgttctctatttcagaaatctgacttgggactcagtgtactaaaatcaaagtgttggaggtcctgggggggatttgttttattgccaaacttttccagctttcagaggctgctcacattcctgggcttgtccaccatttccatcttcaccatcagccatctcgtcacccttaaytctgccttcatcacatctccttcgccaacactgactgaatcttctacttccctcttccacctttttttttttttttttgagacggagtcttgctctgtcacccaggctggagtgcagtgacgcgatcttggctcactgcaacctccacctcccaggttcaagccattctcctgcctcagcctccggagtagctgggattacaggtgtgcaggcatgcaggcatgcaggcatgtgccaccatgcccagctaatttttgtggggttttttgtttgtttgtttgttcgttcgtttagtagagacagggtttcaccatgttggtcaggctggtct

SEQ ID NO: 730081 - DNA, 540 bp, Homo sapiens
tcaaaataacacaaaacacgaatgtactatcttactgttctctatttcagaaatctgacttgggactcagtgtactaaaatcaaagtgttggaggtcctgggggggatttgttttattgccaaacttttccagctttcagaggctgctcacattcctgggcttgtccaccatttccatcttcaccatcagccatctcgtcacccttaactctgccttcatcacatctccttcgccaacactgactgaatcttctacttccctcttccacctttttttttttttttttgagacggagtctygctctgtcacccaggctggagtgcagtgacgcgatcttggctcactgcaacctccacctcccaggttcaagccattctcctgcctcagcctccggagtagctgggattacaggtgtgcaggcatgcaggcatgcaggcatgtgccaccatgcccagctaatttttgtggggttttttgtttgtttgtttgttcgttcgtttagtagagacagggtttcaccatgttggtcaggctggtct

SEQ ID NO: 730082 - DNA, 518 bp, Homo sapiens
tccatcaataccttcttcctttctttctggttcagtgctgggcccaggtggaccttgatatatatcatccacactaaaatctgctccgagctacaaaattagggttgaggaatctcactggactcaagctaagattgaactgatgcagcagtgccattttcagtttatcctagaagtaggatgccttcctcctatggagagcaaaatatcccccatgccattcatggttttaaaaaatatatgattataagctgcacagtaaagaggggagttagccactcgaaggcttgcagttttgttttkttttttaagtgtcttcttcgtataagagaatgtaaaaccatttgctggttgtatgcatgtggtcaaaacttttaaaggcaataaggagactggatttttactaggaggctaaataagtatcctacacagccacaggaggaaatttaaggttttatgacagttcagcataagtcagcagctagagcagaaaaggggctcgtggggagggaaagtgt

SEQ ID NO: 730083 - DNA, 566 bp, Homo sapiens
atcccatggcagaaagtagaagtgcaaaagagtgtccatgagaaccagagagcaagaggaggctaatctttcttttagaactagcccactctcacaataactaacccattatcatggtaaccacattaatccatccatsagagaagagccctcatcatctaatcaccttttactaggccgcacctcccaacactgttacattggggattaagttttccacacatgaactccagggaacacattcaaaccatagcaaaggccaattctcaagggagcagatatgacaccagggattctaaaaatcttgtacatggcataaagaaaccctccacatgggaacttgggcacactcctcagaatggggtgattttcttggcctgtgctattgctatcttgaaacatcctgacatcctgaaaaggaaaaacaagacaaaatttgaattccacttaaattcaagataatttatttcttgaatttttaagagtaggacatttgtaaatttggggagaagcacattttctgcatctatttataaaatggacttaagattttttgagaaagagga

SEQ ID NO: 730084 - DNA, 640 bp, Homo sapiens
aattaacttcttattttttttaatgtcataaaatgttgacttactgattccaaattcatccattacacttttaagtgatcgtccagcttcaattctacttagaaccttcattttctcctccaaattcagtgttgtatatttccctctcttattcatactgaatttaactctgaaccaccaacaggagaaaacaaagggaaaagccttaatgaattggcaaaaaaaaamcccacattttttaaacaaaacttagctgaaagccccagaaggcatgggcattgtattggaggataatggactgaaggggctaaccatgactgaagagctagtctagaggtggaggtcttatgcactcagaaagctgccagttgcaaagtcctgtctggctcttgctcctgcaagccatgagtgatcatttttcagaatgccccctacctctcctctcttttgacagatacaacagcctcagtcaggaatgacaggaatacctgcatactttccctaactcaataccggaaaacggacaatatgaagagaggagggatggagcaagatgtgcccacaagacaggtgtgataagtttccataaaaactgatgcttcagaagaagggagcgtgaaagactcaaaggcaatgacag

SEQ ID NO: 730085 - DNA, 565 bp, Homo sapiens
aatcccagctactcaggaggctgaggcaggagaatcacttgaatccgggaggcagagtgcagggaccagccccacagggtctgtgggtctctccccgtgtgcggcgatgagagagtgtagaaataaagacacaagacaaagagataaaagaaaagacagctgggcccgggggacgactaccaccaatgtgcggagaccggtagcggccccgaatgtctggctgcactgttatttactggatgcaagcaaaaggggcagggtaaagagtgtgagtcatctccaatgataggtaasgtcacgtgggtcatgtgtccactggacagggggcccttccctgcctggcagccgaggcagagagagagaggagacaaagagaaagacagcttacaccattatttctgcatatcagagactttcagtactttcactaattttctactgctatctagaaggcagagccaggtgtacaggatggaacatgaaggcagactaggagcatgaccactgaagcacagcatcacagggagacggttaggtctccggataactgtgggcaagcctgact

SEQ ID NO: 730086 - DNA, 593 bp, Homo sapiens
actggaagagaagcatctgcctttaaaatacagtagaaggccgggcatggtggctcatgcctgtaattctagcactttgggaggccaaggcaggtggattgcctgagctcaggagttcgagaccaccctgggcaacatggtgaaaccctgtctctcctaaaaaaaaaaaaaaaaattacaaaaaatttgccgggcatggtggtgcacacctgtagtcccagccactctaaaggctgaggtacaagaattgcttgagcccagggtcagaggttgcagtgagtggagatcgcgccgctgcgctgcagcctgcgcgacagagcgagactatgttttttttwaaaaaaaaaaaaaaaaaggaattagaaccttgtggtttagagctgggatttttagagtcatgggtctgggttcaaatctagctccttcactcatgagctccttgaaaatgagcaagttgcttactccaagcctcagtttctcattgtaaaatgagaagaataataatacattcttcacatttgatatacaaatggatgaaatattatggataaattatttactgtgccaggcactgtgctaaatagccaacagat

SEQ ID NO: 730087 - DNA, 554 bp, Homo sapiens
agcctctgaaagtgctgggattacaggcgtgagccactgcacctggctgatttttgtatttttagtagagacggggtttcaccatattggccaggctggttttgaactcctgatcttgtgatccacccgcctcggcctcccaaagtgctgagattacaggcrtgagccattgcactaggccagcaattcattattttttatgtctgaataatattgtatagatatatcatattttgtttatccatttattagttggtgaacatttgttgtttctactttttagctattacagataatgttactttgaacattcttttacagatttttgtgtgaacatatgtttagtttctcttgggtatatacctaagagtggaattactaggtcacatggtaactttgtttaatgttttgaggagctgccaaacttttctacagtagctacaccattttatattcccatcagcaatgtgtgaggtttctgatttcttcacatctttgccagcacttgttactgtctttttgatgactgccctcttagtacccacagttgattt

SEQ ID NO: 730088 - DNA, 474 bp, Homo sapiens
agagagataagtaaatcgctctttccattttccagatctcagagaggctgaagtaatttgtggtctcagaaacaatggtaagggaggagtaaaatccagcacttccgactcatattttcccattcgtttcactcaggatgggaaggactgactttctgtcaacccaaaatgaaagctggaaaagtaaatgaaaaattratattatatataggaaatgaataagggcacaaaacatacttaaaacagtacctggcatctactaagcagaaactattaatagtttagttaaaatgtattctatatggcacttcccatatactaatcaattacaaaataaaatcactttagtttcttgaagattctaagatgccacagttttagtcaaattaaccttgaaaagaaaccagtttaggatacttgagagtaacattaccaaatagtctactttttacaaatattcatgatagtatattc

SEQ ID NO: 730089 - DNA, 598 bp, Homo sapiens
ctgagattatgttaaacgaccaaacctaagaacaatcagtgttcccaaggaagaagagaattctaaaagcttagaaaatatatttgggagaataattgaggaaaacatccccagcattgctagagacctagacatccaaatacaagaagcacatagaacacatcagaaattcatcacaaaaagatcttctcctaggcaccttgtcatcaggttatccaaagctaagatgaaggaaagaattttaagakctgtgagacagaagcaccaggtaacctataaaggaaaacctatcagattaactggagatttctcagcagaaactctacaagctaggagggattggggccctatcttcagcctcctcaaacaaaacaattatcaaccaagaattttgtatccagagaaactaagcatcatatatgaaggaaagatacagttgttttcagacaaacaaatactgagagaattcgccattaccaggccaccactataagaactgctaaaaggagttctaaatcttaaaacaaatcctagaaatacatcaaaacagaacctctttaaaggataagtcacacaggacctataaaacaaaaataca

SEQ ID NO: 730090 - DNA, 598 bp, Homo sapiens
ctgagattatgttaaacgaccaaacctaagaacaatcagtgttcccaaggaagaagagaattctaaaagcttagaaaatatatttgggagaataattgaggaaaacatccccagcattgctagagacctagacatccaaatacaagaagcacatagaacacatcagaaattcatcacaaaaagatcttctcctaggcaccttgtcatcaggttatccaaagctaagatgaaggaaagaattttaagagctgtgagacagaagcaccaggtaacctataaaggaaaacctatcagattaactggagatttctcagcagaaactctacaagctaggagggattggggccctatcttcagcctcctcaaacaaaacaattatcaacyaagaattttgtatccagagaaactaagcatcatatatgaaggaaagatacagttgttttcagacaaacaaatactgagagaattcgccattaccaggccaccactataagaactgctaaaaggagttctaaatcttaaaacaaatcctagaaatacatcaaaacagaacctctttaaaggataagtcacacaggacctataaaacaaaaataca

SEQ ID NO: 730091 - DNA, 598 bp, Homo sapiens
ctgagattatgttaaacgaccaaacctaagaacaatcagtgttcccaaggaagaagagaattctaaaagcttagaaaatatatttgggagaataattgaggaaaacatccccagcattgctagagacctagacatccaaatacaagaagcacatagaacacatcagaaattcatcacaaaaagatcttctcctaggcaccttgtcatcaggttatccaaagctaagatgaaggaaagaattttaagagctgtgagacagaagcaccaggtaacctataaaggaaaacctatcagattaactggagatttctcagcagaaactctacaagctaggagggattggggccctatcttcagcctcctcaaacaaaacaattatcaaccaagaattttgtatccagagaaactaagcatcatatatgaaggaaagatacagttgttttcagamaaacaaatactgagagaattcgccattaccaggccaccactataagaactgctaaaaggagttctaaatcttaaaacaaatcctagaaatacatcaaaacagaacctctttaaaggataagtcacacaggacctataaaacaaaaataca

SEQ ID NO: 730092 - DNA, 509 bp, Homo sapiens
cttgtttttgcctaattagcattttagtgagctctctctactatctgattggtcgggtgtgagctaagttgcaagccccatgtttaaaggtggaagcggtcaccttcccatctaggcttagggattcttagttggcctaggaaatccagctagtcctatctctcaaaacgagcctcaataaatttaagaaaattgaaattatatcaagcattctctcagaccacagtggaataaaactggaaatcaactccaaagggaaacttcaaaaccatgcaaatacatggaaattaaataacctgctcctgaatgagcactgggtcaaaaacaaaatcaagatggaaattaaaacattcttgaactgaatgacartaatggcacaacctatcaaaacctctgggatacagcaaaggcggtgctaagaggaaagttcacagccctaaacgcctacatcaaaaagtatgaaagagcacaaacagacaatctaaggtcacacctcaaggaactagaga

SEQ ID NO: 730093 - DNA, 640 bp, Homo sapiens
ttccatcacacataaatagagacaatgagagagaggacttatagatcaaaagattcatataaactaattacaatgtatgtgtacatcatatttggattccgatttgatagcatatctgttaaaaaaataaacattggggaaatttgaacattcactggatgcttgatgtcattaaagtcatttaaatttcttgtttctttgtgttttttgtttgtttcttcatttgtttttagagacagggtctcattccattgtccaggctggagtgtagtgacacaatcatagctcactgcagccccaaattcctgggttcaagcaatcctcccatctcagcctcctgagtagctgggaccacaagcacataccaccatacctggctaatttttaaaaactttttgtcaagacacagtctcaccatcttgcccaggctggtcttaaactcctgggctcaaatgatcctcccacctcagcctcccargtcattgggattacaggtgtgagccaccgtgcccagccttaatttctttttggtgtgaaaattatataatagttatgtttttaaaaagagtctctaccatttatagacatatactgaaatatttatgggtgaaattgaaaatatatatagcaataattatta

SEQ ID NO: 730094 - DNA, 624 bp, Homo sapiens
atattctgatccccttccatgtaaagtgcctcagcaccaggtctgattaaagttaagtgctaaatagcccactatcattagaaaagtctgtgtccccaccttgtagtaataaagctcagacacaacaggatgtcataggaagggaatgaggcatgtttttcttttctccagtttttctgcctgggcttccctgcaagtaagattatctacatttaaaacatatttgatcggccaggcgcggtggctcacgcytgtaatcccagcactttgggaggcccaggcgggcagatcacgaggtcaggagatcgagaacatcctggctaacacagtgaaaccccatttctactaaaaatacaaaaacaaaattagccaagcgtggtggcgggtgcctgtagtcccagctactcgggaggctgaggagggagaatggcgtgaacccgggaggcagagcttgcaatgagccaagatcacgcactgcactccagcctgggcgacagagcgagactccgtctcaaacaaacaaacaaacaaaacaaaacatatttgattcaccttaaatggctactcatatctgtcctttcctctgcaatgctctgccttgatcctggtccaggtttatctggc

SEQ ID NO: 730095 - DNA, 624 bp, Homo sapiens
atattctgatccccttccatgtaaagtgcctcagcaccaggtctgattaaagttaagtgctaaatagcccactatcattagaaaagtctgtgtccccaccttgtagtaataaagctcagacacaacaggatgtcataggaagggaatgaggcatgtttttcttttctccagtttttctgcctgggcttccctgcaagtaagattatctacatttaaaacatatttgatcggccaggcgcggtggctcacgcttgtaatcccagcactttgggaggcccaggcgggcagatcacgaggtcaggagatcgagaacatcctggctaacacagtgaaaccccatttctactaaaaatacaaaaacaaaattagccaagcgtggtggcgggtgcctgtartcccagctactcgggaggctgaggagggagaatggcgtgaacccgggaggcagagcttgcaatgagccaagatcacgcactgcactccagcctgggcgacagagcgagactccgtctcaaacaaacaaacaaacaaaacaaaacatatttgattcaccttaaatggctactcatatctgtcctttcctctgcaatgctctgccttgatcctggtccaggtttatctggc

SEQ ID NO: 730096 - DNA, 514 bp, Homo sapiens
acatggaaattaaacaacatgctcctgaaccaccaatgggtcaatgaagaaattaagaagaaaattttaaaatttcttgaaaagaataaaaatggaaatacaatataccaaaatctatgggatacagcaaaagcagtagtaagagggaaatttatagcaataaatgcctatatcaaaaagcagaaagaaatataaaattaaatataaataatttgtattcaaaaaagtagaaatacttcaaataaacmtaaaggaattaggaaagcaaaaacaaaacaaacccaaaatacacagaaggaaagtaaaaaagatcagagcagaaataaatgaacttgagactaaaaaatacagaatatcaaagaaataaaaagttggtttttggaaaagataaacaaaatcacagttttagtgggtcaggaatcagggcatggcttgactgtgtcctccacttcagggtctcacaaggatgcaatcaaggtgtcagctgaggttagactgagcaaggatccacttc

SEQ ID NO: 730097 - DNA, 618 bp, Homo sapiens
cttagtgaaataactttccagacctcatagagcatttggaaatattttccttatatacagaactctaactactaagtaccattctttcccaaggtcttcagagttcttttttcttttcttttctttcttcctttttttttttcttttttgagacaaggtcttgctgcatcacccaggctggagggcagtggcatgaccatggctcactgcagcctcaacctcccaggctcaagcaatcctcctgccttaggcctcccaagtagctgggactacaggcgcatgccaccacgcctggctagctttttaatttttttgtagagatggtgtctcactatgttacccaggcggacagagttcttatttctaggaataataacatgaatatttaytcattcattaaaagagaaaggttttacgcttaatactttcgttgttctgttttttcttaaggtcagcatcagagctacttaataaataattgtgctgtcctgaaaccactttggggtaactcagcagagaacccaggctgccaacccagggcaatatgagtacagttccttcaggctgggagggatcctgggcttgtggccaccctaggggctgcatattgttgactca

SEQ ID NO: 730098 - DNA, 618 bp, Homo sapiens
cttagtgaaataactttccagacctcatagagcatttggaaatattttccttatatacagaactctaactactaagtaccattctttcccaaggtcttcagagttcttttttcttttcttttctttcttcctttttttttttcttttttgagacaaggtcttgctgcatcacccaggctggagggcagtggcatgaccatggctcactgcagcctcaacctcccaggctcaagcaatcctcctgccttaggcctcccaagtagctgggactacaggcgcatgccaccacgcctggctagctttttaatttttttgtagagatggtgtctcactatgttacccaggcggacagagttcttatttctaggaataataacatgaatatttattcattcattaaaagagaaaggttttacgcttaatactttcgttgttctgttttttcttaaggtcagcaycagagctacttaataaataattgtgctgtcctgaaaccactttggggtaactcagcagagaacccaggctgccaacccagggcaatatgagtacagttccttcaggctgggagggatcctgggcttgtggccaccctaggggctgcatattgttgactca

SEQ ID NO: 730099 - DNA, 582 bp, Homo sapiens
tcttggcaggaatagaacaaaacaaaacaaaacaaaacaaaaaaaagccccgatgcttcagtcaggaggtacgtgatgtcaactcactgcactgccagcgaggttaactttgatcacctgctcaagctgttgtctgccaggtttttctaccaaaaagttaccatatttctctttgtaactaacatattctggggaaatattccagtactacatcaatatctgcttcttcaaatcttcacctgcaagtctcagcatcggttgacaactccagcctgaatcgaccaccactaygatggctgcctaatgttgatttttcttatttccaccattccttctgcatttattagttggcaatctgttgcaagaaaaagctttcccttctctctccatttacttactcgttaatttaattatttcaacatggactcatggattcctattttattcaatgggttttattcattacaatcattatttatattgattctcaaattgcccaggtttggccaatggaagtcctttccatttgacccctatatcctttccataagtcctcatccatccaagcactccctcactttc

SEQ ID NO: 730100 - DNA, 582 bp, Homo sapiens
tcttggcaggaatagaacaaaacaaaacaaaacaaaacaaaaaaaagccccgatgcttcagtcaggaggtacgtgatgtcaactcactgcactgccagcgaggttaactttgatcacctgctcaagctgttgtctgccaggtttttctaccaaaaagttaccatatttctctttgtaactaacatattctggggaaatattccagtactacatcaatatctgcttcttcaaatcttcacctgcaagtctcagcatcggttgacaactccagcctgaatcgaccaccactatgatggctgcctaatgttgatttttcttatttccaccattccttctgcatttattagttggcaatctgttgcaagaaaaagctttcccttctctctccatttacttactcgttaatttaattatttcaacatggactcatggattcctattttaytcaatgggttttattcattacaatcattatttatattgattctcaaattgcccaggtttggccaatggaagtcctttccatttgacccctatatcctttccataagtcctcatccatccaagcactccctcactttc

SEQ ID NO: 730101 - DNA, 456 bp, Homo sapiens
tcacttgagctgaggagtttaagaccagcctgggaaacacggtgaaacctcatctctaccaaaaaaaatgcaaaaaattatccgggcatggtggcacgcacttgtagtcccagctactagagaggctgagagatgagaggactgcttgagcccaagaggtsgaggctgcagtgagccatgatcaccccactgtactccagcctggacaacagagtaagaccctgtctcagaaaacaaaacaaaacaaaacaaaacaaaaactatcataacacatcatacaatggtattatgaaataagaaaataatactgccaggtgtggtggctcatgcctataatcccggcactttgggaggccaaggtaggtggaacacctgtcaggagtttgagaccagcctggccaacatggtgaaaccccatctccacaaaaaatacaaaaattagctgggcatggtggc

SEQ ID NO: 730102 - DNA, 665 bp, Homo sapiens
ttttaggatccctcctcagacaagcaggcctaataaaagctattcctgaagctaagatatggggagcctcagaaattgtatcattcctattcatacaagtgaggacaaaaggcatgactcttccaactctggagatcccttctctccctcagagtgtggccctccacttcatttttggggcataacatctacataggacacaaataaagtctcaacactaacaggaaaacaggactgtaacaggttttcaagaatgtgttggtaaggtccactaaatctgatttttttcattcctctttgtggtctaggaggacaggcaagggtgcaggtttttgaggatgtgtcagtaagaaccactaaattcaaccttcctcagtcctccttgtggtctaggaggtcaggcaagggtgcaggttttcaaggatgtgtcagtaagggtcactaaatctgaccttcctcagtcctccttgtggtctaggaggaaaactagtgtttctgctgctgtgttggtgagcacaactattccgaycagcagtgtctggggaccattgcagattcttgggcaaaaggtatttctgctgctgtgttggcgagcatgactattctgatcagcagggtcctgggactgttgtgggttcttgggcagggggagaaacaaacaaacc

SEQ ID NO: 730103 - DNA, 615 bp, Homo sapiens
ggaaggcaaatggagtgaaataccttatgtccaagatttcttttcattgaaggagaatacacaactattcaaagcttgcagtttacatcccacaggaggacctctcagcttacccccatatcctagcttccctatagctccccttcctattagtgataagcctcctctaatctcccctgctcagaagcaaataagcaaagaaacctccaaaggaccacaaaaacccctgggctatttgatatgtccccttcaagctgtagggggaggggaatttggcccaacccgggtacatatccccttctccctctctgatttaaagcagatcaaggtagacctgggraagttttcagatgatcctgataggtacatagatgtcctacagggtctagggcaaaccttcaatctcacttggagagatgtcatgctattgttagatcaaaccctggtctttaatgaaagaatgcagctttagctgcagcccaagggtttggagctacctggtatcttagtcaagtaaatgatagaatgacagccaaagaaagggacaaattccctactggtcagcaagccaaccccagtatggatccccactgggatctttactcagattatggg

SEQ ID NO: 730104 - DNA, 513 bp, Homo sapiens
tttttacactgtaattagagttcaaacttccatagcgcctagcctaaaattaaacccagaattatgccaatttatgcctgctatatatgcacacacaaaagacttataatgcaatatactaaaagaactaaaggtaggtgggtttttccttgaaggaatcatagctacattattttcaagtttaatctgttacattcacctgcctatcaaataaatgtagcacttaaacgcataaaacaaaatttgatttagtgacaaaaagccattagcttctaatttaacttcaaaacgcttttcaaaaaatctaccccatctaattctaagtgaaccagaccacacttgataraaaactgttgttctaaaaaccatacgtacttaacacaaacagtaaacatatgagaacatttagtcttctattaatgtcttacaaaatatttcaatgtggctggttataatttttttttttttaagggacagggtctgtcaccgcggctggagtgcagtggtgtgata

SEQ ID NO: 730105 - DNA, 520 bp, Homo sapiens
actctccaccctcaagcaggcttcggtgtctgaagtttccttgtttgtgtccatgggtacccaatgtttagctcctacttataagtgagaacatgcggtatttgattttctgttcctgcattaattcacttaggataatggcctccagctccatccatattsctgcaaaggacatgatcttgttattttattttattttatttttttgagatggagtctcgctctgtggccaggctgaagtgcaatggagccatcttggctcactgcaaactccacctcccaggttcaagcgattcttgtgcctcagcctcccaagtagctgggattacaggcacccaccaccacgcccagctaacttttgtatttttagtagagacggggtttcaccatgttggccaggatggtctcaatctcttgaccttgtgatctgctcgcctcggcctcccaaagtgctgggattccaggcgtgagccaccgcacccggccgatctccttattctttatggctgcatcatgtaca

SEQ ID NO: 730106 - DNA, 520 bp, Homo sapiens
actctccaccctcaagcaggcttcggtgtctgaagtttccttgtttgtgtccatgggtacccaatgtttagctcctacttataagtgagaacatgcggtatttgattttctgttcctgcattaattcacttaggataatggcctccagctccatccatattcctgcaaaggacatgatcttgttattttattttattttatttttttgagatggagtctcgctctgtggccaggctgaagtgcaatggagccatcttggctcactgcaaactccacctcccaggttcaagcgattcttgtgcctcagcctcccaagtagctgggattacaggcacccacsaccacgcccagctaacttttgtatttttagtagagacggggtttcaccatgttggccaggatggtctcaatctcttgaccttgtgatctgctcgcctcggcctcccaaagtgctgggattccaggcgtgagccaccgcacccggccgatctccttattctttatggctgcatcatgtaca

SEQ ID NO: 730107 - DNA, 521 bp, Homo sapiens
acataaaatgcgtaagactggcatgccttacctctgccagctggtttctgcctcacatttgattgaatgacatcccacctttcactagctttgtagcctcactggcagcacttgtcacatttgtgctttcattacacccagacgctgtgtgagaaactcacccaacagcctgatcrcccaggctggaacccaattttaaaccaatgtgaacttgagtctgcccctagaggagtcaaatttggcctggcctttgtacctactcagccctgctgagtgtcctatactgatccccatcacctctaattcatttcattccaccagtgcctgggtcccagttttgacagatatgtttctctatggcaaacttggcactttgagggcctatgttcttaagggcaaaagtcattaaatctctttccctccaattttatctttcaattttatactctaaacatacaagtctttcttcttaaacttttcctggtgttttgtgggtacttccttcccactcctttgagatt

SEQ ID NO: 730108 - DNA, 521 bp, Homo sapiens
acataaaatgcgtaagactggcatgccttacctctgccagctggtttctgcctcacatttgattgaatgacatcccacctttcactagctttgtagcctcactggcagcacttgtcacatttgtgctttcattacacccagacgctgtgtgagaaactcacccaacagcctgatcacccaggctggaacccaattttaaaccaatgtgaacttgagtctgcccctagaggagtcaaatttggcctggcctttgtacctactcagccctgctgagtgtcctatactgatccccatcacctctaattmatttcattccaccagtgcctgggtcccagttttgacagatatgtttctctatggcaaacttggcactttgagggcctatgttcttaagggcaaaagtcattaaatctctttccctccaattttatctttcaattttatactctaaacatacaagtctttcttcttaaacttttcctggtgttttgtgggtacttccttcccactcctttgagatt

SEQ ID NO: 730109 - DNA, 616 bp, Homo sapiens
tgcctgtcagattggcaaaaactagctcagatgcccttttaatttacataaccttgataatctgtggtaaaaatttaatttggtaaatttaatctcaaaattctccagtaatttaaaaatcttaaagtcatgatttaaccctcgggttttgcaccccaccccaccgagtggaaatttgggtgactaaaaagttaaaataatagaagcacaaaatatgcagcatttgttaacattttataaacacaaagatrtcaattctcaaaaaatgtaaatttctttttggttaagaaacatttaagagttgctttataatgaaggatagtaactctcctaactgtcaaactatgaatgttatttatctttccttgtttacttcaaggaagccaatatgatggtactctgaagaccatatgaaactcatttgacatcccgctgggcctggatctgtttcactgcaaatgctctgctgccaaaactatacaagttgctccctctgggcccaggaactatcacggaagaggtgggcatgtaagattgtaagggccagctttgagggataaaattagaacaagaccaaaccctccaaatcaagaagaggttacaaaaaaaaaaaaaa

SEQ ID NO: 730110 - DNA, 644 bp, Homo sapiens
cttaggccgcattgatctatgatctggctcctgcttccctctcctcatacctccactactatgcaacatgcaatcctggctccttgccaaaccatactacatgttgaatgcgatgttccctccaacatggcattgttttcaaggctcagcctcagtattttcatctcagtagccttccccaaactctctaacccctaaggcagttagactccttgttctcatagctttgtaatagcacttacccacactgtgttggaattagctattgctttctctccctagtagaatggactctttgagagcatgaattatgctttatttatcctattcctagcatgtaaccaagtatctataattcagttttgtgtcaatgatarttactttattaataatgtcatacctaccacatattgttattttaggccatcattttcaattaattagcacttccttatgttagaatatacctgtatgttaaagtaatcagaagctagaataatttaacttgctttgttggtattcttgataaccaataatggcttgctacgccctgattaatctttgcagaaagcccgcttatctaccattttatttactgacaactgtgaagtaacccatgaccagctgtgtgaattgctgaagta

SEQ ID NO: 730111 - DNA, 617 bp, Homo sapiens
tcaaataatggtctcttcatattccctcttgttggtgtcatttttctctaagacaccagtgttgaattttacagttttcttttggctccctatccccaaactgtctgcatgcctaattccctttgctcctataaatctctattcagatgtcaatttaacagagaccttctcagctcatcctatacaaaatatatgacagtaaccctttccctgccccaatatttcctatacttttctcctccttttcttcaaagcccttatcttacctgatatattacrtatttatttgtttattatccatatttccaactataagttaaatgtcatgaggaattttgttggttttgtgcattggggaattcctagtggccaaaacagtgccggctacataataaagttataaatatttaaatattttgctggctgaataattttttcaccatgttctaccagtttttcatgtatgttttatatatccctttttctccatagcttccactatcttaattcagatgctgtaacaacttctttttgaaacagagtctcgctctgtcgctgaggctggagtgcagtgggatgatcccagttcactgcaacctctgccacctgggttcaag

SEQ ID NO: 730112 - DNA, 578 bp, Homo sapiens
ttttgtgctgtttattttgatcacctggtcaaggtgttgtctgctttctctattgcagagttcttgttttttctcttaattctaataaatatgtggggagatattttaagaacatgccagtatcgcttgagcgcaggaggttgaggctgcagtgaactatgatcgcaccactacactccagcctgggattacaggtgtgagccaccaggctcggccaagtgttcttttttatgygtcttttgcttgagcttgttgagcttttgcaatttgcgggtttatcatttttatcaaattagaaaaaatgttgaccattatttctccccattattttttctttcaccaccctcccctcctttgggcactcccattgcatatgtattaggccgtttaaagttgtcccatagctcactgatgtgctgttcatgttttttccagttttttttcctgtctgttttattttagattgtttccgttgctatgtcttaggtttctaattctgctgcagtatctaatctactgataatccaatccagtgtactttcacctcacacattgtattttttacctctagaagttaa

SEQ ID NO: 730113 - DNA, 588 bp, Homo sapiens
tacttctcaaattgtctttttctcaatcctttgactctgccggacttcattacccccaccacctggtgttgggcctgataaccccaacatttctatgcctttctcatatccaggagagactgagaatctgacaactttaaaagtctgaaaagaaacatttaccatctattctctctgaaggagtcttcatgtacctaacaaggccagctttgctagytaatattcttcttttctctctctcttaacctttcttgccactcaacctgatttaccaacataacctgtttctggccatgctctcagtctgcattctttactgtagcctcaggatggtaatgtaaaccaaaaatgaaattttaagcagccccagccaacagaatggacccctcctctcagtcaattgcattccaaagttatcctaagacaagaggtcaggccatgatggaaatgggtggttggatgtacctcattataccctccttcctttggaattcaggcaaaactaaccagcattaacattaaaacagagaccttaagataatttattatctctgaagcctgcacctggaagcttcatctgcataataa

SEQ ID NO: 730114 - DNA, 539 bp, Homo sapiens
attatactgtagtctatttagtgtacaaaagcattatgtctaaaaatgtacataccttagttaaaggacactttattgctaaaaagtactagcaatctatctgagccttcaacaaatcacacgcttttttgctggtggaargtcttgccttgatgctgatcaaggtggtggtggttgaaggttggggtggctggctgtttcttaagacagcagtgaagtttgccacatcagttgactcttcctttcataagatgtttttctgtagcatgtgatgctgtttgatagtattttactcacggtagagcttcattcaaaattggagtccgtcctctcaaaccctgcaggggctttatccactacatttatttaatattctaaatcttttgttgtcatttccacagtgttcaccatatcttcaccaggagtagattccatttcaaaaaaccactcattgttcatctatgagaagcgactccccatccattcaagtttgatcatgagactgcagcaattcagtcacatcttcaggatccactact

SEQ ID NO: 730115 - DNA, 539 bp, Homo sapiens
attatactgtagtctatttagtgtacaaaagcattatgtctaaaaatgtacataccttagttaaaggacactttattgctaaaaagtactagcaatctatctgagccttcaacaaatcacacgcttttttgctggtggaaagtcttgccttgatgctgatcaaggtggtggtggttgaaggytggggtggctggctgtttcttaagacagcagtgaagtttgccacatcagttgactcttcctttcataagatgtttttctgtagcatgtgatgctgtttgatagtattttactcacggtagagcttcattcaaaattggagtccgtcctctcaaaccctgcaggggctttatccactacatttatttaatattctaaatcttttgttgtcatttccacagtgttcaccatatcttcaccaggagtagattccatttcaaaaaaccactcattgttcatctatgagaagcgactccccatccattcaagtttgatcatgagactgcagcaattcagtcacatcttcaggatccactact

SEQ ID NO: 730116 - DNA, 539 bp, Homo sapiens
attatactgtagtctatttagtgtacaaaagcattatgtctaaaaatgtacataccttagttaaaggacactttattgctaaaaagtactagcaatctatctgagccttcaacaaatcacacgcttttttgctggtggaaagtcttgccttgatgctgatcaaggtggtggtggttgaaggttggggtggctggstgtttcttaagacagcagtgaagtttgccacatcagttgactcttcctttcataagatgtttttctgtagcatgtgatgctgtttgatagtattttactcacggtagagcttcattcaaaattggagtccgtcctctcaaaccctgcaggggctttatccactacatttatttaatattctaaatcttttgttgtcatttccacagtgttcaccatatcttcaccaggagtagattccatttcaaaaaaccactcattgttcatctatgagaagcgactccccatccattcaagtttgatcatgagactgcagcaattcagtcacatcttcaggatccactact

SEQ ID NO: 730117 - DNA, 524 bp, Homo sapiens
agcttgaaaacaccaggcacagtagctcacacctgtaatcccagcactttgagaggctgagacgggtggatcgcttgatcccaggaattcaaaaccagcctgggcaatttggggagaccccatctgtactacaaacacaaaagttagcctggtgtggcagtgtgcatctatagtcccgttccagctacagggactcaaaaaaaaaaaaaaaaaaaaaaggaaaggaaaaaaaaaacttgaaaacaagctgggcgtgggkggctcacacccagcgctttgggaggctgaggcgggaggattgcttgagtccaggagttggacagcagcctgggcaacatagggagagcctatctctacaagaaaaacaaaacaaaacaaaaacaaacaaacaaacaaaaaacaagcatggtggcacacacctgtagctccagctactgaggtaagaggattgcttgagcttgggaggttgaggctacaatgagccatgattgtgctgctgcactccagcctgggcaacagagcaa

SEQ ID NO: 730118 - DNA, 638 bp, Homo sapiens
agactctgtctcaaaaaaaaaaaaaaaagaaaaagaaaagaaaagaaagaaaagaaaacctgccatttcctcataattgaactgccatcacctggatattccctgtgcccttctccaaagccagcatggcaaccacgggggtgaaatactcagacgagcaaagggatcagggctttaagaagccagccttcagccaagcatggtggctcacacctgtaatcccagcactttgaggggccgaggcaggtggatcacttgaggtcaggagttcaagaccagcctggccaacagggtgaaactctgacagtactaaaaatacaaaaattagctgggcatggtggtgcatgcctgtaatcccagctacttgggaggccgaggcagggggattgcttgaacctgggaggtagaggctgcagtgagcccagatcagtccactgcactccagcctgggcaacagagtgagactctgtctcaaaamaaaccaaccaaccaaccctgaccagtactcctcaaaatgatcaagctcatccaaaacaaggaaagtctgagaaactgtcacagccaaaaatcagctttcaaaggacttgttaagtccttgcacatacatgttcatggtgggatatttactacagcacaaa

SEQ ID NO: 730119 - DNA, 688 bp, Homo sapiens
gcgaattgcctgagcccaggagtttgagaccagcctggccaacatggtgaaaccccatctctactaaaaatacaaaaattagctgggtgtggtggtgcatgcctgtaatcccagctactcacgaggctgaggaaggagaatcgcttgaacctgggagatggaggttgcagtgagccaagatcgtgccgctgcactccagcctggtgacagagcgagactccgtctcaaaataaataaataaataaataataaaaaattatagctgggcgtggtggctcatgcctattatcccagcaccttgggaaggcgaggcaggtggatcccttgagtccaggagttcaagaccagcctgggcgacgtggtgaaaccccatctctactaaaaatacaaaaattagctgggcrtggtgacagaatctatggtagtcttatgtagtaatcttatgtagtcccagctactggggtggaggagagggcctgaggtggtaggactgcttgagcccaggaggttgaggctgcagtgagccaagattgtgccactacattccagaccctgtctcaaaaaaaccaaagttcacttcaagtaactctcctctttgcctacaaaacatactcaggatgttaaatatttaacactcaagcattaaatactatagcactttgatttgtcactcttttcctaaaggagt

SEQ ID NO: 730120 - DNA, 591 bp, Homo sapiens
aatccttatggagaggagtgttttacctaaaaccagaaatatggatctaaaattttaacctttggggtaagttttggcttaggaggtcttccccgcacccgtgcaggggggagccggatattctgaaaagactagatttgacaaggggtgtgcaaagcacaactttaacagacacaatgatggggtctgactgcaaacacaaaatcgacagaatcacatgctcttgtcgtcagttactcttagcccaaaaaccgtttacttcttcctactaagccttctctgatgacacccccgtgaagtgctctgttagtggctagaccgtgacctccttgagccatccagagcttggcactcagtaatgtcagaatgaagggcaccagcctttcccgaacttgcagatcctacaaatcacccgagggagtggttaaaatgagattcctggaccacacmcagacccactcaatcaatccttctggacaaaggcctagctgtctgttctagtaacaagcatccttccgatctggatacttaattatatcaactcaacacgctgggggttcggacaagttgcaggttcgaaattacaatcgt

SEQ ID NO: 730121 - DNA, 427 bp, Homo sapiens
atctgaaatgtttttgcaagggcgatctcgcagacccaaggcgttgcaagcgttgcgcagcctttcgctggcgtctgcggctcttttccggggcgcgaggagggaaaagagtagtgtctttcagggtctgcaaagctgttttgaaaagttaaccaaaaaggttttaaatagcaagattttcttttcaggaaaagtttttaaaacggctgatactcgtccagttttggtgggcgctaaaaagtyttattactaagctacaagtttccctgttaagattttcaaaacccctcgtggacagggctgaaagtttgccgggctgtgagacgtgactgaacacgcttctaaatcctcagatagatcatttataaagctctggtgcccttgggatgaaaggcttcgctgagtttttaagacttgccttcgtggg

SEQ ID NO: 730122 - DNA, 677 bp, Homo sapiens
tttcttatgattgctttgactatttggggtattttttggttccatatgaattttagagtagatttatttctaatcctgtgaggaatgacatggtagtttaatagaaatagcattcaatctgtaaattactttgggcagtatggccattttaatatttatttttccaatccatgagcatggaatgtttttccacttatttgtgttgtctgtgatttctttcagcagtgtttcatagttctttttgtagagaattcccatctccttgggtggctgtattcctaggtatttcattttctttatggctattgtaaatgggattgtattcttcatttgactctcagcctgggtattattggtgtataaaaatactactcattcctgttgattgattttgtatcctgaaaccttgctaaaatcacttatgagttatagcagccttctgaaagagtctttcaggttttctaagtacagaattatatagtcagtgaggagagatagtttgacttcttttcgtatttgratgttcagattctatttctgatttgacttctcttgctatttctaccacatctgcagttatttattccactaaaaatttaaagctctcaaagtcaaccatgaatgttagaatcaacttcttccaaagtcctgttaatattgatatttttacttcctcc

SEQ ID NO: 730123 - DNA, 602 bp, Homo sapiens
ctcactgttatcattcatttcaaagaattttttatatttttatcttaatttcatttttgacctaacaattattcaagcacaggttttaaaatttccatatgtcggcatggctatgagggttctttttggagttgattcctaatttcattccactgtggtctgagagagtacttgatatgattttgattttcttaaatttactgagacttgttttgtggtctatcatatggtctatcttggagaatgttccatgtgctttgaatagaatgcatattctgcagttgtcgggtagaatgttctgtaaatatctgttaagtcaatttttgtatggtatagtttaaattcattgtttctttgttgaatttctgtcttattgacttgtctagtgctgtcagtgaagtattaaaamccccccctctattattgtgctgcacactatctcacttcttaggtctactagtaattgtcatattaatttttggagctcctgtgataggtgtatatatatttaaaattgtgatattttcctgttggcctagtcctttcatcattatataatcttcctccttgtgtttctaactgctgtttctttaaagcttgtt

SEQ ID NO: 730124 - DNA, 602 bp, Homo sapiens
ctcactgttatcattcatttcaaagaattttttatatttttatcttaatttcatttttgacctaacaattattcaagcacaggttttaaaatttccatatgtcggcatggctatgagggttctttttggagttgattcctaatttcattccactgtggtctgagagagtacttgatatgattttgattttcttaaatttactgagacttgttttgtggtctatcatatggtctatcttggagaatgttccatgtgctttgaatagaatgcatattctgcagttgtcgggtagaatgttctgtaaatatctgttaagtcaatttttgtatggtatagtttaaattcattgtttctttgttgaatttctgtcttattgacttgtctagtgctgtcagtgaagtattaaaaaccccccctctattattgtrctgcacactatctcacttcttaggtctactagtaattgtcatattaatttttggagctcctgtgataggtgtatatatatttaaaattgtgatattttcctgttggcctagtcctttcatcattatataatcttcctccttgtgtttctaactgctgtttctttaaagcttgtt

SEQ ID NO: 730125 - DNA, 446 bp, Homo sapiens
cccaggcttattagggggaggaaattcccacctaataaactttggtcagaccagttgttctcaaaaccctgtttcctgataagatgttataaatgacaatggtgacaaaacttcataagcaattttaatttaacttcggtcctgtggtcctgtgatctcgccctgtctccacttgccttgtgatattctattacactgttaaatacttgatatctgtcacccasacctattcatatactccctccccttttgaaactccctaataaaaacttactggttttgtggtttgtggggcatcacggatcctaccaaagtgtgatgtctcccccggacacccagctttaaaatttctctcttttgtactctgtccttttatttctcaagccagtcgacgcttaggaaaacagaaaagaacctacgtgattatcagggcaggccccgcgata

SEQ ID NO: 730126 - DNA, 682 bp, Homo sapiens
ggaggaagtaaaaatatcaatattaacaggactttggaagaagttgattctaacattcatggttgactttgagagctttaaatttttagtggaataaataactgcagatgtggtagaaatagcaagagaagtcaaatcagaaatagaatctgaacatycaaatacgaaaagaagtcaaactatctctcctcactgactatataattctgtacttagaaaacctgaaagactctttcagaaggctgctataactcataagtgattttagcaaggtttcaggatacaaaatcaatcaacaggaatgagtagtatttttatacaccaataatacccaggctgagagtcaaatgaagaatacaatcccatttacaatagccataaagaaaatgaaatacctaggaatacagccacccaaggagatgggaattctctacaaaaagaactatgaaacactgctgaaagaaatcacagacaacacaaataagtggaaaaacattccatgctcatggattggaaaaataaatattaaaatggccatactgcccaaagtaatttacagattgaatgctatttctattaaactaccatgtcattcctcacaggattagaaataaatctactctaaaattcatatggaaccaaaaaataccccaaatagtcaaagcaatcataagaaataaaa

SEQ ID NO: 730127 - DNA, 616 bp, Homo sapiens
gagtgtactactgacagattccatcagcttttgtttatctgggatgtttcaatttcttcattttttgaaggaaattttgctataaatgaaattcttggttcacatgtttttgtttttccttcagcactgtaattatgctatcacatttccttctgtcctccatggtttttcatgatattggttgttaatcttattgaggatcccttttatgtggtaagttacttctctcttgctgcttttaagattcagtgtgtcagccaggtatgggagctcatgcctgtaatcccagcactttgggaggctgaagtagatgaatcatttgagcccaggaatttgagaccagcctgagcaacatagggcgaccctgtctctaccaaaaaaaaaatacaaaaattaactgrgcatggctgtgcatgcctgtagtcccagctatttgggaggctgaagtaggaggataatctgagcccagaaaggtggaggctgcagtttgccatgattgcagctactgcactccagcctgtgcaagagagtgatactctgtctcaaaaaaaattcaatgtgtcttggtgtatgtatattagtttgctgcaaaagtaattgtggttttaggtcatga

SEQ ID NO: 730128 - DNA, 637 bp, Homo sapiens
tcttaaggagctccacccctgtggctttgcagggtacagctcccatcccagctgctttaacagcctgtcattatctgtggcttttacacgtgcatggtgaaagctgtcagtgaatctaccattctgaggtatggaggacagtggccctcttctcacagctccactaggcagtgccccagtggagactctgtgtgggggctccaaacttttcttccatattgccctagcagaggttcttcatgagggctccactcctgcagcaaacttctgtacagacattcaggcattcctttgcatcctctgaaatctatgcagagttccccaaacatcaattcttgatttctgtgcaaccacaggaccaacatcacatgtaagctgccaaggcttggggcttgaaccctctgaagcaaaggcctgagctgtacattggccgttatagacatggctggagccgaagcaactggtacacagggcaccaggtcatgaggytacatagagaaggggcgccctgggcccagtctacaaaatgatttttttcctcctagacctctaggcctgtgattggagaggctgctctgaaggtctctgacataccctagagatattttcctcattgtcttggtgattaacattcagc

SEQ ID NO: 730129 - DNA, 585 bp, Homo sapiens
aacaaaaacagccaatatatcaaagattttgtttaaaatcctgtaagcttaggttattgtctttaacttaacctaaaggactcccagtattttttagcatgccccaaatacaacaggaatcatgtatttaaactcattcttattaaactggcccacttctgcccttaagcagtttgcatgtgatcagttacagaagggtccagtatttaaccattttacacattcagcttatgtgcacagactgagactagtatccttaggaagacctgctgccaaggttggccttttactagattgtttgtgcaaataaaagtgggtcatgttgaatacctgctttccttctgggaatgtggaattttggtacatgcaaagcagaaagtgcctacaggaccaacctacaatagaaactttgggtgccaagtctctaatgggctcctcgagcagaaacatggcacacgtgttgccaaatttttattgctacaagaatgmgctctgtatgaccactcatgagagggagagagcataaggagacctgcacgctggttcctccagactctaccttctctttttcccttatgctaacct

SEQ ID NO: 730130 - DNA, 523 bp, Homo sapiens
gaatgtattactcacttaaaactgcattggtggactgggcacgatggctcacgcctgtaatcccagcactttgggaggctgaggccggtggatcatgaggtcaggagatcaaaaccatcctggctaatatggtgaaaccccatctctactaaaaaaaaaaatacaaaaaattagccgggcatggtggcacaagcctgtagtcccagctactcgggaggctgaggcaggagaatctyttgaacctgggaggttgcagtgagccaaaatcgcaccactgcactccagcctgggtgacagagcgagactctatctcaaaaaaaaaaaaaatgtattggtatggaaggcaatgaaagttctattttggggctgccttaatgtgagattaaccctgatcacaccacttgcatttcaactattgtttagtatgatggcatttcaattggcagttttccttacagtgatctgtctacacatgcacgcacataaatgcacacaagggcatatgttcacagtgaaacacaaa

SEQ ID NO: 730131 - DNA, 642 bp, Homo sapiens
atcgcttgagctcaggagtttcagaccagcctgggcaacatggttgaaaccctgtctctatcaaaaatgcaaaaacttagccgggtttggtggtgcatatctgtggtctcagctacttgtgaggctgaaatgggagaatctcttgagtggcgggggttgtgggggaggttgcagtgagcctagatcacgccactgcactccagcctgggtgacagagtgagattccatctcaaaaaaatttttttaaataaataaataaaaacattttcattctttttatcttaaaacttggaagaaacattagatacaataatactttcattagtcaattagagaaaastttaagtaatacggctttgactattcagtagtagtgaaaagtaaaacaaatattgaactctaaagaaaaatgttatttacagaaatctataaaataaactttaaaatgtatttacttattatatatcagttctaaccttaattacaaaatcaatgcagagcaccatttcaatgatatattataactaaagagaattgatcataaacaactgttacgttatccaaaaatattttcagtaattcaaacatgcaacttgaatagttgttgagtgacacaaacttgaagcaactaaaattattttt

SEQ ID NO: 730132 - DNA, 596 bp, Homo sapiens
aaacaatgcttagtgacatattaaaaaaaaaaaaaaaaaaacaaagctagccaaacaaacacaagtaaactaaccaacgtgtctcggtgtattagtttcctagggctgccattctcaagttattttatacgcttgcattttacygtgctttctctgtatttcctttgctaatgaattctctcttcctttcatcccacttgccccctcctaactcctattcatgctttatttatcagcctaaataaaatctcttctaggaagccttccttgagccattgatctctcatctaccaccctaaccaatcccacctcccagtcactcgcccactaacgtacataaacacacagagtaggatgcttttatgctgtggacacactgcattcatcacagcatattaataactcggtagaatgtgaacacactgcattcctgacagcatattattaataaatctgtagagtgcatgtttacttgccttcttccctctatggactttatccccatcatgagtagaacatagcaggggtgaaaaaggtattttaagataaatgaatgcatgaataacctttaaaaataccaactaccacttataaag

SEQ ID NO: 730133 - DNA, 586 bp, Homo sapiens
aaaaagaataaaataatggcaacctggatggaattggagatcattgttcttattgaagtaactcagggctgtaaaagcaaacattgttgttctcactcataagtgggagctaagccatgaggattcaaaagcataagaataatgcaatggactttggggactcaggggaaagagtgagggrggtaaggaataaaaactacacattgagtacattgtgcagtgctcaggagaggagtgcaccaaactcttagaaattaacactaaataacttattcatgtaagcaaacaccacctgttccccaaaaacctattgaaattttttaaaaagaagcaggaaaataaataaataaataaataaatacatacatacatacatacatacatacatacatacatacatacatacttgaaaccccattagtcagtgtgaacgtcttttatacattgttggacttatttactaatactcttttgagcattattgcatctatgctcatgagaaatcttgatctgcagtattgtttttcttgtaatgtttttggttttggtattaggtattagagtaatgctgatctcatagaatgag

SEQ ID NO: 730134 - DNA, 637 bp, Homo sapiens
ttcaatttgttgaaatagttttagtagaagtgatattattcttctttgtacatttggtatggctgtgaatccatctggtcctcagcttttctttgttgagagactttttattactgattcaatcttgctagtcattattggtctcttccagttttctatttatttctgattcaatctttggcagttacatgtttccaggaatttatccatgtcctctagggtttttttgtcagtgtacatttgttcataatggtcttttacgatttttttgtatttctgtggtgtcagttgtaatgtgtccttttttaatttccgattttgtttattaagatcctctctcactgggcttggtggctcacgcctgtaatctcatcactttgggaggctgaggygggcagatcacctgaggtcaggagctcttatttcctgattactctagtttgtggtttatcaattttgtttatccttttgaagaaccaacttctcttttatttgcttctttatattttttagtctttattttatttagttgcactctaatgtttactatttactctgctaacatgagttttgatttgttattgattttctagttctttaacgtgcattgttaggttgttaatttgtaatttttcta

SEQ ID NO: 730135 - DNA, 632 bp, Homo sapiens
aatccctggggataaattcactcatatgcttgctttctttttttcctttttgttaaatctgttaagattttttttttttaaattacccacagcagagttgtatttcacagctggcatatcaattttagtgtgaagttttaaggatatctgcactataaatggttattgtgttctattatgaagtagtgccactgcgcacagacatctctctcttactgcctctctcattcttcctcgctggattcttctctctctctttctaactcattctcaattctgttagctcagtcaatgggagaagggtttcatgtcagacatacatgtgtacaatatcatgggtgggacagagctaaaaamactgtaggccccagatgcttctgggtgggctgggaagagaaacacattcaacactgaggaaattttattagtacagacacaagaggatttttttcatttatgttaattaatttcttatttcatcatttctctggctacatctacaatcatgttccacttagttgaagatgaaagccaatttactcaccctccaaattgagaactacagtctttcaagctgatgatattacaatgtaattaaataacataattcataccatgagtattattttttc

SEQ ID NO: 730136 - DNA, 623 bp, Homo sapiens
atgtggccttttatgtctggcttctgtcactcagcatcgtgttttcgaggtttgtccatgctgtagcatggatcagtgctacagtcttttttttttgagacagggtcttgctctcttgcccaggctggagtgcagaggtgcaatctcggctcactacatcctctgcctcctgggttcaagcgattcttctgcctcagcctcccaagtacctgggattacaggcatggggcaccactcctggctaatttttgtatttttggtagagatggggtttcaccatgttggccaggctggtctcaaactcctgacctcaagtgatccacctgccacagcctcccaaagtgctgggattacaggcctgagccactgtaattgcccggcctacaatcatattttgttgtacggatggaccacattttgtttatccatttatttggtgggttttgtctttyggatgttgttaaccgtccacctaccgtttgtaagtttgttgacatcttatctccaatctccccatggggagagacggagacctgtctcttcccatctgccttagcatccttgcttctgaagacagctctcaggaagtagcagggcgtgaggaagggatgaagggtgggtgt

SEQ ID NO: 730137 - DNA, 627 bp, Homo sapiens
atcccacatatgtggtcatgggagttgagagagcgacaccgtgagcccaggcttgttccctgggctccaggcgggaaccggcggggcggacaggctcctcggcagcatcgacacggctccctcgtcccctctgcagatggtgaggccccaggagggagcagtgacagctgatcagtctgtggggtggggtgtgtgggtgcgtggggtgttgttctctgcactcgctaggagtcaatttcattttcatcttagaggtratgggttgttgctgtgtgtggggggattccatgatgagctggctctaggatcaagggacctggggtgttcaggttctcagccctgccctggaaggggagacagcagcacctattgggactggggggccatgtgtgagtttctggtggctgctgtaatatattaaagtactacacctgggctgcttagaacaagaatgtcttctctcatggttctagagcctggaagtctaaaatccaggtgtcggcagggccgagcttcctctggaggctctggggaggaatctttcctgcctcttccagctttcagtggctccagccgttccttggcttgtggctgcatcgccccaatcccggccgtccccctctgcat

SEQ ID NO: 730138 - DNA, 627 bp, Homo sapiens
atcccacatatgtggtcatgggagttgagagagcgacaccgtgagcccaggcttgttccctgggctccaggcgggaaccggcggggcggacaggctcctcggcagcatcgacacggctccctcgtcccctctgcagatggtgaggccccaggagggagcagtgacagctgatcagtctgtggggtggggtgtgtgggtgcgtggggtgttgttctctgcactcgctaggagtcaatttcattttcatcttagaggtgaygggttgttgctgtgtgtggggggattccatgatgagctggctctaggatcaagggacctggggtgttcaggttctcagccctgccctggaaggggagacagcagcacctattgggactggggggccatgtgtgagtttctggtggctgctgtaatatattaaagtactacacctgggctgcttagaacaagaatgtcttctctcatggttctagagcctggaagtctaaaatccaggtgtcggcagggccgagcttcctctggaggctctggggaggaatctttcctgcctcttccagctttcagtggctccagccgttccttggcttgtggctgcatcgccccaatcccggccgtccccctctgcat

SEQ ID NO: 730139 - DNA, 655 bp, Homo sapiens
cctgtcccttatccacataccccactctggtatttcaacagcccagagaccaccacggtgcttgggggctctcggcaagggggcgaagcctccctgagaacttctgcaggccgcccttctcttccctttcctgccggggctcttgctgcagagaagctctctgccacacttttttttttttaaataaaaaaaatgaaaataaagaaatcatttatgtttcaaaactttgattaaaattgaaaacagaaacaccacagcacttcccgtttcctctgcatctggcaccactcacctgggtgcasagggtgggtgggtgcatgccagctggtcattcgcccggaaatctctgggaggaagtatcagcacagcctagcagggcgcctgggactggctctgtgggctggccgtccctctggctggggacacggggaggccgagcgtgtccgcaaagacacgcgagctgtccacctttctgggctgcaggggtctgcagaacctcggaacctcggaggggctctctgtctgcttcagcgtctctttctcaagtgactgaaagcagaggctccctgctgcgttacaccattgagtcctttcgcatctgtgcgcatcccgcttccatcgctgcggggatcccttcggtcctcccaggcaggcg

SEQ ID NO: 730140 - DNA, 664 bp, Homo sapiens
ttatataaacatatgcacacacatatgtgtatgtatgtgtgtttatttatgaaatataaaatacttaaattgtttaaacatatcatgtgttgcatttattaaacaaaaaagtgaatgtatggaattaatgaccactaggtttcttctagttctgaaattctgcagtttgcaaaaatcacaaatattaaggtaatttctgaattcagtctttacaagwctcttgaaagcttcctctgaaagagtgttttcaaatgactttcaggtttgaattattttcttttactataacaaaatgttttattgtatattatctgtttacactccatttaataagcagacaagaattcattgggttcttactgcatgacatacattagaggagagcttggtatgttttgttaacactgcattcttcacacaaatattttaggaaatggttttcattctcattttgtaaatgaggatacttaagcctggcatattaactcattctgggtttcactacttccactttaatttcattattctttagagtacgctatacctgccagtgacttaaggcaaacaacttagtggtacacaagtgattactatttttttaggcattaagattttcaaagctctatagaaatgtttattagaataacagactatattctcaacc

SEQ ID NO: 730141 - DNA, 580 bp, Homo sapiens
agcagggcggagtctgggcgagctatcaatggagcccaccagcagccaggcgccaggggtggcggggggagggtgcccttgtccccaggaaccctgccccaggtcgcaggccgaaccctgggttccccagggttctccggggaacccagaaggttccccacagcccagagcttggcctggctcttaggggtaaagggagctgctggggggtctccaacaaagtcagacctgggtctaggaagcggggctagcccagggggagacctttttgtgttgccgtccctgggtgaggaggtgggaggtctggagcaggcagggcctcgggcgaaggggcgcagcgcaggcgaggggctctgtgggtacagcccgtggcccccagcgcctgcccgggtcgggctctgccctgcccttggggygcctactgttgtcatcgtgtgggatgtggagtttaatgaggacaacagagtgggggctgccactctgcagggggtgcctgggccggtcccaagggtggtgggcagtgggatgaggccgggagctggtgggcttggctctgactgccccgtgccccccaggatcc

SEQ ID NO: 730142 - DNA, 551 bp, Homo sapiens
gtggtctcctctgccctggggacgttcggggcggttccttgcacttcagtcccccccgggtcccctcctgctcccgggttttctgccccgttcccccgggtggctgtgggctcccgagccccgtgtcggccagccggccccagggccccacgaccccatggtgtctcccaagaaggtacatgaagcacaagcgcgacgatgggcccgagaagcaggaggacgaggcggtggacgtgacgccggtgatgacctgcgtgtttgtggtgatgtgctgctccatgctggtgctgctctactatttctacgayctcctcggtgcgcggccccgggcgggtgggccgcggcgtggagatgcagcccgccccgtgcggagggagggtggcgtgcgggcctggcccccggcctcacggccctgcccctgcagtgtacgtggtcatcgggatcttctgcctggcctccgccaccggcctctacagctgcctggcgccctgtgtgcggcggctgccttcggcaagtgcaggtgagtctgccctgctggccccgacgtgcct

SEQ ID NO: 730143 - DNA, 551 bp, Homo sapiens
gtggtctcctctgccctggggacgttcggggcggttccttgcacttcagtcccccccgggtcccctcctgctcccgggttttctgccccgttcccccgggtggctgtgggctcccgagccccgtgtcggccagccggccccagggccccacgaccccatggtgtctcccaagaaggtacatgaagcacaagcgcgacgatgggcccgagaagcaggaggacgaggcggtggacgtgacgccggtgatgacctgcgtgtttgtggtgatgtgctgctccatgctggtgctgctctactatttctacgatctcctcggtgcgcggccccgggcgggtgggccgcggcgtggagatgcagcccgccccgtgcggagggagggtggcgtgcgggcctggccccyggcctcacggccctgcccctgcagtgtacgtggtcatcgggatcttctgcctggcctccgccaccggcctctacagctgcctggcgccctgtgtgcggcggctgccttcggcaagtgcaggtgagtctgccctgctggccccgacgtgcct

SEQ ID NO: 730144 - DNA, 626 bp, Homo sapiens
ttgattccccaaaaatgtaaccactaatagcttactgttgactggaagccttaactgattacatgaacattgattaacatatattgtgtatgttatatgtattatatactgtattcttacaataaagtaaactagagaaaagaaaatgttattaagaaaattatagggaagagaatatgtatttacttttcattaagtggaagtggataatcttaaagggtctttattcttatattcacaatgagtaggatggagagaaagagcaagaggaagggtggatcttgctgtctcagtggtgggaggtggcagagggcaaagaaaattagtgtataaatggactcatgcagttcaaacctgtgttgttcaatggccaactgtaattatcattaactgggataaacacgayacatattccagatatgggttagcttttcctattaatactgtcatagcagaaccataatctaagctcttataaaatgttgtatctcagctgtgatgtattggcaacccaaaccccctgaactagagtgtctcagtctgaaggggacatcattatatggtatgatgtccagcaagaccaaacaaacacttcatggcagaagaaaaattacagctggcacatg

SEQ ID NO: 730145 - DNA, 480 bp, Homo sapiens
gttgtaattatcactggatgtttttctttaaagtcaatgtttctcttttctaacaaccaatatccactgttcattatgaattttgcatgtgaaagacaggaattgagttttttttaatgttaagtaaatttgagaggtatatagcatactctgattctacatcaaacctgtamtttttaatggacttacacaggtattttatataaagtacttcaaattcttttagggaatatgtaatttttaaattaatatataaaaaaacggtggcctgaaaaccaagtgaacctaatgttaattgaaagttaaagttgccctctctgagatgagagagagcctggagtgaaagatgaacaccaaaactttttccgcaacaaatggcccagtccctgctgagtgccaaccatccaataaaggcatcagccctacagctctggccatgaaacagaatctagatatatgttattaatacactaacaagag

SEQ ID NO: 730146 - DNA, 634 bp, Homo sapiens
ttagaaaaggaactaagtttgcttctgttaaaagtaaaacatctgctaacttttaatagtgttaaaattatttattcatttaacaatattatttgtatacctaatgtgtgccagtcactgttcaaggtttgtttttcacagagcttagatggaaacaaaggtgtgagatgagtccggatgttcttatatttgttcccaaaacagctccaagttcttaaggacaaagttcatcagaagaaacgtcactgttgtaactaaaccagggtaaataatagagagggtctttgtctaattcagtgtgtataataaaagaagtagggcagggtcatgttgagttttgagttgaaagaaatttkctataaatatataatgttttgtttgtagaaaaatgtaaggattttgccaagagttaaatgagaaaaagcaaaaacaatccaattgtaagtacatataaattctcattcctcatgagtataaaatcatctggctaactacatgccacatgccagaagtattgctaaattagttgtttctgacatgatcctgacatgattgttgtcaaaaatccctggctttatggtaatgtgcactttatctgtccttcaatgaaagtactatgaagaaaaaaaaataa

SEQ ID NO: 730147 - DNA, 584 bp, Homo sapiens
aactcatcaaaatagagagcagaatatggttaccagaagctgggaagtgtagctgtggggtgtgtgtgtgtgtggtggggtggggggtggaaaaagtagggatggttaatgattatataaatataattaggtagaacaaataagayacagtatatgatagcacaacaggcttactacagtcaacaatagtattctatactttcactaaaagagtggaattggaatctttctgacacaaagaaaggataaatgtttgaggtaatggatacaacaattaccctgctatgattattatatattgcatgactgtatcagaacatcacatgtaccccatgaatatatacacctattatatacccataatattttattataaatagtaaaataataaagtatataacccacaaatatattattttaataattaaaataatatttaaaatgtatttcatgaaaaatgcatttatttacatttcagaaaaattattcttaattcagtctaactacatttgagaaacatggcagaataagcgataataaaattaatcctttgaatgatgttgattatgatgattatgatgata

SEQ ID NO: 730148 - DNA, 622 bp, Homo sapiens
ctctgagtgcctgaggcttttccaggtgcacagtgcaagctgtcagtggatctatcattctgggttctggagtatggtggtccacttctcacaactccactaggcagtgccccagtggagactctgtctggtggctcccaccgcacatttcccttctgctctgcactagcagaggttccccatgaggtctctgctcctatagcaaacttctgcttggacatctaggaatttccatacaccctctgaaatctaggcaggggttyccaaacctcgattcttgacttctatgtacccacaggcccaacaccatgtggaagccaccaaggcttgcagcttgcatcctctgaagcaatgccatgagctgtaccttgtcctcttttagccatggctgaaactgaagcagctaagtgtcagggcaccatgtcctgaggcagcacagagtggggggaccctggggctgccccacaaaaccattttttcctccaaggcatctagacctgtgatgggaggtgttgctgtgaaggtttctaacaagacctggagacattttccccattgccttggtgattaaacttctactccttgttactgatgcaaatttctgcagccagcttgaatttct

SEQ ID NO: 730149 - DNA, 540 bp, Homo sapiens
cgcacagaggactgggaaggaatgctgtgatttaattcaatgtgcccttcagaagccactggaaactttaaatagcaagtatcattcttcccccttccttcatgcataggaaaaaagagtaaaaggagaaagccccagatttataacagattatccctaatcacaggatcatgagggatttttttttctgtatatattttgtattttctgttttccctaatgagcatgtatatattttaattatataaaaataaggcctggtgcagtagatcacacctgtaatcccagcactttgggaggccaaggcaggtgtatcatttgaagtcaggagtttgagaccagcctggccaacatggtgaaaccctgtctytactaaaaatacacaaattagctgagtggtagtggcagtcatctatattcccaactactcgggaggctgaggcagtagaatcgcttgagcgtgggagacgaaggttgcagtgagctgagatgatgccactgcactccagtctaggcgagagagtgagaccctgtctcaaa

SEQ ID NO: 730150 - DNA, 556 bp, Homo sapiens
ttactgagggcttcctaggtggtgggcatgtgctaagtgtatttgtttatcatcttcagctctcccaaccatatgatgcagttcctgcatgtttgctgatgttgttgattgggaaagtcgagctaaattctgtgtccccagtcacacagcttggggtaatgtgtgacagcccaggattcccacctggatctttctgacaagaaagtcatgtttagaccaccctgtaaggtacctttggccaagacccatgatgtgtgctgaatctgaaaccaaataatatctaagaggccagaataaaggtcaaatgatgtttaggccaagagagctgccgtgagcatggaaaggttgtggggccgtgtggtcagctggcaagtgtggagttggttcctatgcttctytcaccatttagtggctcgccccggtgaaaatggcagttccaatgggatggaccgcaccagaaagtttaccctcgtcaggcagaagcccctgagaaaacgggggctgacagaagcccctgggagatgctcagggagtggcccaaggttgggagccaagc

SEQ ID NO: 730151 - DNA, 613 bp, Homo sapiens
cttgcaggtgtcaggtggtaacgcattgtagttttgatttgcatttccgtgatcattagtgatgttgagcattttttcatgtttgttggccatttgtatatcttcttttgagagttgtctattcatgtccttagcccactttttttttttttttttttttgagatggaatctcgytctgtcacccaggctggaatgcagtggcatgatctcgtccttagcccactttttgatgggattgtttgtttgtttcttgctgatttgtttgagttcgttgtagattctggatattagtcctttgtcatatgtatagattgtgaagattttctcccactctgtgggttgtctgtttactctgctaactgttccttttggcatgcaaaagctctttagttaaattaagttccatctatttatctctgtatttattgcatttccttttgggttcttggtcatgaaatccttgcctaagccagtgtctggaagggtttttctgatgttattttctagaatttttatagtttcaggtcttagatttaagtccttaatcaatcttgagttgatttttgtataaggtgagagatgaggatccattttcattctcctacatgtggc

SEQ ID NO: 730152 - DNA, 619 bp, Homo sapiens
tattctgtggttgttggatggaatgttctgtatatgtctattaagtccatttgttccagggtatagtttaaatccattgtttctatgttgactttctgccttgatgacctgtctagagctatcagtggagtattgaagtcccctagtattatygtgttgctgtctgtctcatttcttaggcatattagtaattgttttataaatttgggggctccagtgttaggtgcacatatctttaggattgcaatattttcctgttggagaaggccttttattattatataatgtccctctttgtcttttttaactgttgttgctttaaagtttgttttgtctgataaaataatagctactcctgcttgcttttggtgtccattttcatgaaatttccaaccatttaccttaagtttatatgagtccttatgtgttaggtaagtttctcgaaggcagcagatagttggttggtgaattcttatccattctgcaattctgtattttttaagtggagcatttaggctgtttacattcaatgttagtattgagatgtgaggtatcatgtactcattgtgttatttgttgttggtataccttgttttttttgtttgttttttaaattgta

SEQ ID NO: 730153 - DNA, 619 bp, Homo sapiens
tattctgtggttgttggatggaatgttctgtatatgtctattaagtccatttgttccagggtatagtttaaatccattgtttctatgttgactttctgccttgatgacctgtctagagctatcagtggagtattgaagtcccctagtattatcgtgttgctgtctgtctcatttcttaggcatattagtaattgttttataaatttgggggctccagtgttaggtgcacatatctttaggattgcratattttcctgttggagaaggccttttattattatataatgtccctctttgtcttttttaactgttgttgctttaaagtttgttttgtctgataaaataatagctactcctgcttgcttttggtgtccattttcatgaaatttccaaccatttaccttaagtttatatgagtccttatgtgttaggtaagtttctcgaaggcagcagatagttggttggtgaattcttatccattctgcaattctgtattttttaagtggagcatttaggctgtttacattcaatgttagtattgagatgtgaggtatcatgtactcattgtgttatttgttgttggtataccttgttttttttgtttgttttttaaattgta

SEQ ID NO: 730154 - DNA, 653 bp, Homo sapiens
tgtgcatgtctctgtgtatgtatgtgcatgtgtgcacgcattcgcacatggcgttgcacagggtgtgtccatgtgtacgcaagtgtgtgtatatagggagcttctaaatcagatgaaaccaactggaaatccggatactgatgtttagaattcaagctctggagtcagactgccccaggcctcagtttttccattgggaaatgggctgatcctccccggatgagagcactggagtccagagaggccaatgacgatcagatttatctcagtatatggtctgtgctgtgggccttgaggctgaaattttgtgagctcctttaattctcttttttgtgtgtgttgggggttggcggcagggtcttgctctgtcrtccaggctgggctgcagtggtgcattcatagctcactgcagcctccagctccctggctcaagcaatccttcaacctcagcctcccgaggagctgggactacaggtgggactatcatgccctgctaacaaaaacgtttctttttgtagaggtggagcctccctatgttgcctaggctgcagccccagcattcattaatcatccccggctcctacctctgcccagcccttaatcccccgaacatatgatggggattaatcccccaaacccttgggggggattaa

SEQ ID NO: 730155 - DNA, 512 bp, Homo sapiens
gaactgtgaatttattctagcacgccctgcacttcacaagaaaaagagatctctccctgggctcctgccggctcctccaggatacagcactggagaaggcaacttggtgtttcctatctccgccactctggatttgggaatccaaacccaactccctttctatcactgacagcgattgaggccaatgcctactcctttgggatgatgctcgcctgtctcaggaccgactgacccatgttcaactgcttttcacatggaatccttctccactttggccttcaaaacgctcatttgaatatttactactaccaccaagatctgcccctgccatggtgccacctgggcccacccctaggcttgcaggyacaccacagtggccccttctgccagtcccagccagtgtgtgtgtgcatgaccctgcgtgtgcatgtctgcatgttaagagggtagatacaatgtcaagcattcttaaaaagatttttgaaagatattttttaaaagtcaaagaactg

SEQ ID NO: 730156 - DNA, 541 bp, Homo sapiens
aggatcatggggggggagaaagctgggaacgtttgctgctttgaaagggtgtgtaaacaacaccctccaaaacaaccaagagttccgaggagaaactttggccggatacggtggctcacgcctgtaatctcagctcctcgggaggctcaggggggcagatcacgaggtcaggagtttgagaccagcttggccaacacggtgaaamccccgtctctactcaaaatacaaaaattaatcgggggtggtggcgggcacctgtaactccagctacttaggaggctgaggcaggataatcacttgaacctgggaggtggaggtggccatgagccgagatcgcaccaccgcactccaacctagtaacagggagagtatgtcccagaaaacaaataaataaacaaacaaaaagaaaacggcaagggaaattggaaaatactccagatgaaccacaacgaagatgggtgggatacatctaaagctgtgctcagagggaatgcggcgccagtgaacacccacatttcacacagaaggatctcagcacagc

SEQ ID NO: 730157 - DNA, 670 bp, Homo sapiens
gaggccgacgcctcggtgttcctcggatcccccgggaagggcagaggccgacgcctcggtgctcctcagatcccccgggaagggcagaggctgagggcaggagccgtgctgggtgcagggcaggcctgggggcttcatgccgctgtcctgcgggacgcagagagggctggccgtcggtgtgggggcgcccccrcctgtgcccagcgccctcctgacatcctgactccgctgggacttctgcctacagccctgggagtcaaactccagcctctcagagaaaaggtcagagccaagagccccacagcctggagccaggcagtgacaccctgggcctgtctccccttctgtgtgtggggcgacagcagcatcgccctggtgaagtccccggggacggccagggctccatccccagccgccgccttccacataaatacaggaagactgggccgaggcacttgctgggaggtgctgagcagcctgacacggaaaacccttctgggaagggagggtcgtgcccggcccgagagcttctgctcaccctgcagacagaagcgagccccaccccaggggacaccaggcggcctctggggacatctttggctggcatggagtgggtggaggacagggctgcacccaggatgtccccaggttggcagtgtgaggggagatc

SEQ ID NO: 730158 - DNA, 670 bp, Homo sapiens
gaggccgacgcctcggtgttcctcggatcccccgggaagggcagaggccgacgcctcggtgctcctcagatcccccgggaagggcagaggctgagggcaggagccgtgctgggtgcagggcaggcctgggggcttcatgccgctgtcctgcgggacgcagagagggctggccgtcggtgtgggggcgcccccacctgtgcccagcgccctcctgacatcctgactccgctgggacttctgcctacagccctgggagtcaaactccagcctctcagagaaaaggtcagagccaagagccccacagcctggagccaggcagtgacaccctgggccygtctccccttctgtgtgtggggcgacagcagcatcgccctggtgaagtccccggggacggccagggctccatccccagccgccgccttccacataaatacaggaagactgggccgaggcacttgctgggaggtgctgagcagcctgacacggaaaacccttctgggaagggagggtcgtgcccggcccgagagcttctgctcaccctgcagacagaagcgagccccaccccaggggacaccaggcggcctctggggacatctttggctggcatggagtgggtggaggacagggctgcacccaggatgtccccaggttggcagtgtgaggggagatc

SEQ ID NO: 730159 - DNA, 670 bp, Homo sapiens
gaggccgacgcctcggtgttcctcggatcccccgggaagggcagaggccgacgcctcggtgctcctcagatcccccgggaagggcagaggctgagggcaggagccgtgctgggtgcagggcaggcctgggggcttcatgccgctgtcctgcgggacgcagagagggctggccgtcggtgtgggggcgcccccacctgtgcccagcgccctcctgacatcctgactccgctgggacttctgcctacagccctgggagtcaaactccagcctctcagagaaaaggtcagagccaagagccccacagcctggagccaggcagtgacaccctgggcctgtctccccttctgtgygtggggcgacagcagcatcgccctggtgaagtccccggggacggccagggctccatccccagccgccgccttccacataaatacaggaagactgggccgaggcacttgctgggaggtgctgagcagcctgacacggaaaacccttctgggaagggagggtcgtgcccggcccgagagcttctgctcaccctgcagacagaagcgagccccaccccaggggacaccaggcggcctctggggacatctttggctggcatggagtgggtggaggacagggctgcacccaggatgtccccaggttggcagtgtgaggggagatc

SEQ ID NO: 730160 - DNA, 670 bp, Homo sapiens
gaggccgacgcctcggtgttcctcggatcccccgggaagggcagaggccgacgcctcggtgctcctcagatcccccgggaagggcagaggctgagggcaggagccgtgctgggtgcagggcaggcctgggggcttcatgccgctgtcctgcgggacgcagagagggctggccgtcggtgtgggggcgcccccacctgtgcccagcgccctcctgacatcctgactccgctgggacttctgcctacagccctgggagtcaaactccagcctctcagagaaaaggtcagagccaagagccccacagcctggagccaggcagtgacaccctgggcctgtctccccttctgtgtgtggggcgacagcagcatcgccctggtgaagtccccggggacggccagggctccatccccagccgccgccttccacataaatacaggaagactgggccgaggcacttgctgggaggtgctgagcagcctgacacrgaaaacccttctgggaagggagggtcgtgcccggcccgagagcttctgctcaccctgcagacagaagcgagccccaccccaggggacaccaggcggcctctggggacatctttggctggcatggagtgggtggaggacagggctgcacccaggatgtccccaggttggcagtgtgaggggagatc

SEQ ID NO: 730161 - DNA, 534 bp, Homo sapiens
tacaccatttatcaatcaatggccatttagattttttctactttttggttattgtgagtagtactatgaatattcatgtataagcttttacatgggcatgttttcatttgtcgttggtacatatctacaagtggaattgctagatcacatggtaacagtatgtataactttttgaggaatagcctcactgttttccacagcagctaaaatcattttacattctcaccarcaacatgcgtgggttccaagttctcaatatccttgctaacatttgtcattatatattttttatcattgccatcctagtttttgtgaagtagtttctcattgtggttttcattgcatttattttgtgtttgtgcatctatctttattatttttaattttttattgataataattgtacatatttatggggtatagtatggtatttttatacgtgtatatagtgtgcagtgatcaaatgaagataattggcatattcatcacctcaaacagttatcatttctttatgttgggaacagtcaaaatcct

SEQ ID NO: 730162 - DNA, 637 bp, Homo sapiens
gagcaaaacgggcgtggtagcgggctcctgtagtcccaactactctactcgggaggctgaggcaggagaatggcctgaactcaggaggcggagcttgcagtgagccgagatcaagccactgcactccagcctgggtgacaaacaacaacaacaacaacaaaaaagcaaaacaaaaaaaacagctgagcaaaagacaaaaccactctttatttggcacacaaaatatttctctttagtagtcatcaaaaaaatgatagctattttgaaaatacttggcattgggccatttgatgatttatgagtaaaaaacaaaacataatccctctcatttccaccaatggagtatgatctcgttaggtgggattttccatttatcttggcagaagtatcattaatttagtctgtttattccagtaatcttaactagtttacaagtctrcaacattacacctttgattagctctgtgaaaaagatgttttgaagtgaaaggatctcccattctgtctatatttggcagccttaactctataaaaatgtccattttaccacttcttttatatgctcctgcagctgctttctctcgtcttcccactgtgagatattaaaaatctggtgggagttttctccaagtttatc

SEQ ID NO: 730163 - DNA, 637 bp, Homo sapiens
gagcaaaacgggcgtggtagcgggctcctgtagtcccaactactctactcgggaggctgaggcaggagaatggcctgaactcaggaggcggagcttgcagtgagccgagatcaagccactgcactccagcctgggtgacaaacaacaacaacaacaacaaaaaagcaaaacaaaaaaaacagctgagcaaaagacaaaaccactctttatttggcacacaaaatatttctctttagtagtcatcaaaaaaatgatagctattttgaaaatacttggcattgggccatttgatgatttatgagtaaaaaacaaaacataatccctctcatttccaccaatggagtatgatctcgttaggtgggattttccatttatcttggcagaagtatcattaatttagtctgtttattccagtaatcttaactagtttacaagtctacaacattrcacctttgattagctctgtgaaaaagatgttttgaagtgaaaggatctcccattctgtctatatttggcagccttaactctataaaaatgtccattttaccacttcttttatatgctcctgcagctgctttctctcgtcttcccactgtgagatattaaaaatctggtgggagttttctccaagtttatc

SEQ ID NO: 730164 - DNA, 646 bp, Homo sapiens
gaaaaattttggtgtaacaggcagagattttgccaccaaccatctgtttgtattaattggatttgtgaaatgaaattcctgcatggtttaatgagaataatatgctaaaaacctcgttgaactccatctcatgcagacagacttcaccagacaaaggatgtaaaacccctgctattcctcagcactctgggccttgtaattagtgacatgcatggcaacaacacacccagcatgcctgtgcttttcactttgggttgtatagttgcaaatgaaaaataggacccatattttgtcaataaaatttatatttggggaaatataaattattataacttataaatattaaccattccagggcataagactctgcaaaatgacctaattcacaaacattttcagtctttaataaatttatgatggataattttaagtagtttaccatattagaaatttataatgtcaggcaatacatttttaatagtaaaaatgtgttatttctgagataatgsgacatattgttccttagcataaaggcctagatccagtagttatcatcacaaaaataataatcacaataatcacatgtattatatgactttcatgctacggagttttatgatcaatatgtaacagataatctgttttc

SEQ ID NO: 730165 - DNA, 609 bp, Homo sapiens
tatttactattttattagaacaaggcacttctaggtacatgcctgtgtattttatgctttttgttgatgagataaatgagatgtttactttttgaagattgtaattttttttttggtagttgttagaaaagcaatttctctttggagatgtagccttaatcttgttactcaaattccatgtcagttctaatagtattttaaaattatttcttggatttgcaaataatgaatgactgcctccattttcttaaggttctataaatgtggtattgatttcctctatggcaaaatacttatttacaatagtcaacaatctttccaagtagtmatgtgtttacatgtctgtgtctaaaattttattaataatttctaacatttctgcattgtggtccagtgatgtggtttgtcaaatatattgatatatttgagcatgttccatttacaaggaagatgtacttcctgtttagtaggtacaagtttgatatgtactattaatttttccttactagttaaatatcagaagaccaatttcattcactcattcattcacctgctttatctgtcaaagacaaaataaattatggtaaaatctccccaggttagttgcta

SEQ ID NO: 730166 - DNA, 607 bp, Homo sapiens
actcgcagagtctctgaggtatctgggacagagcaggcccccagtaggtgttcactgaattaagtgaatgaattatggggtgtgcccaagccagtctttcttctctcacttttcttaatggtcattattaatcaatggtatttctcttatcttagtacctctggaaagatcaaactagtgagtaaatgtagaattaatatgaattttgccacacataatgaaataaaattaatatttcagcgataacacaactgcaacctcaaaatgatgtgtatctatttctatgtttggcttgattcgtgtcagaaaagataacctgagatagtaggctgtcattagtgagtaaatgaattaacaagtgctaattaataatttcatgattcattcccaaaacctttttgtgccagtccttaatattgtaccagatrtttctggttctccatcttccaggcatgtggtagccctgttcaccttaggcgtggtcatgtgatctgcactggccagtggaataagtggaagtgatgtgtgttacctctaggttgaagtttatgaggccattcaccacattatcttcccacaccaaagtgatcaggaaagcatgggtcaa

SEQ ID NO: 730167 - DNA, 537 bp, Homo sapiens
aaacctttttgtgccagtccttaatattgtaccagatgtttctggttctccatcttccaggcatgtggtagccctgttcaccttaggcgtggtcatgtgatctgcactggccagtggaataagtggaagtgatgtgtrttacctctaggttgaagtttatgaggccattcaccacattatcttcccacaccaaagtgatcaggaaagcatgggtcaagctgaagcttccatcagcatgagtttcttataagcaggccttccctacccacccagattagacatgtagtgtgaatgagaaaagaaagttttatcagattaagtcaatgagatttgaggggctatttgttaccacagcataatttagcctgtcctgactgacacatgttcattcgcaaacctgggctttgtgctaggcatagtggaagtcaatactaataaaatatgcatctttatttcaaaggaatttacattcaataggagaggcatgcgtataaaaaagtaccactcagactataagcccaaaatcaaacatttatg

SEQ ID NO: 730168 - DNA, 537 bp, Homo sapiens
aaacctttttgtgccagtccttaatattgtaccagatgtttctggttctccatcttccaggcatgtggtagccctgttcaccttaggcgtggtcatgtgatctgcactggccagtggaataagtggaagtgatgtgtgttacctctaggttgaagtttatgaggccattcaccacattatcttcccacaccaaagtgatcaggaaagcatgggtcaagctgaagcttccatcagcatgagtttcttataagcaggccttccctacccacccagattagacatgtagtgtgaatgagaaaagaaagttttatcagattaagtcartgagatttgaggggctatttgttaccacagcataatttagcctgtcctgactgacacatgttcattcgcaaacctgggctttgtgctaggcatagtggaagtcaatactaataaaatatgcatctttatttcaaaggaatttacattcaataggagaggcatgcgtataaaaaagtaccactcagactataagcccaaaatcaaacatttatg

SEQ ID NO: 730169 - DNA, 537 bp, Homo sapiens
aaacctttttgtgccagtccttaatattgtaccagatgtttctggttctccatcttccaggcatgtggtagccctgttcaccttaggcgtggtcatgtgatctgcactggccagtggaataagtggaagtgatgtgtgttacctctaggttgaagtttatgaggccattcaccacattatcttcccacaccaaagtgatcaggaaagcatgggtcaagctgaagcttccatcagcatgagtttcttataagcaggccttccctacccacccagattagacatgtagtgtgaatgagaaaagaaagttttatcagattaagtcaatgagatttgaggggctatttgttaccacagcataatttagcctgtcctgactgacacatgttcattcgcaaacckgggctttgtgctaggcatagtggaagtcaatactaataaaatatgcatctttatttcaaaggaatttacattcaataggagaggcatgcgtataaaaaagtaccactcagactataagcccaaaatcaaacatttatg

SEQ ID NO: 730170 - DNA, 613 bp, Homo sapiens
cggcctagcactaagataaattaaaggaaactgaaatacttatccatctgggaatgtcacttcaatcacaaggaaactgcttggaagaagagcttggtttgaagcaagatcaatggttaactccaagtcaccaaattttaaacatctgaatacmgtccccacttgagaagatggttgggtgcagtgctacatggcggttaggtaagaaatgctaaacgcacctatactttgtaatgttattgttaataaccataggctaaatgaaatcgcatcatttaatcttcttaacaacctgaagagagaggtatttttattatcactattttaaaggtgagaaaaccaggacttaagggagttatgtaaattatagaagctcacttaatagcaagcagcacagctatgattttaaccaaggtctttctgaacagatcatgccattaatgatatactgacttcaaagtcccaaatgagaacaatcattttttttaaaactaaaattatgtttaaaatattgagagctctaaaagtcatgaaaaaatctatttgtctggaacttggatatttatcaagttaactctcataaaaagaaaacttcacaataatttagcaaaat

SEQ ID NO: 730171 - DNA, 454 bp, Homo sapiens
ccgctccagaaacagatgctggtgttttgcttcctgtatagcctgcagaactgagagcaaattaaacctcttttcttacaaattatgcagtctcagatatttatttttagcaaggcaagaacggcttaatacaataaggaacttaaatttgwccaaaagcattaaagtacctcctcatgtctaccgtgccctaccccaaggtccagttcattcacttggaggatccaatgatcactctcaaagcctgtataatatacatctattttaagccactgtcctcacttccacactccattacaaacttgaagaaaacagacactccacaacaccgaagcacttttgcaaccagttcttcatgcttgaatatttttcaaatccttgtttccctgcctctatcattgttatttgcttctttttcaccttcatttgatctttggatttgacactaggccat

SEQ ID NO: 730172 - DNA, 490 bp, Homo sapiens
actgatgagtgtcactcgccgcagggttcttctgcccataaggaattatgatttctgtccaacctacatcttttctttgatgttaacaacactaaccaaaagggtagaatggatactcatgtttgtactttatgatctgggcattttgggatctattttatggtattagcatggaggttaggaaatacaacatttaatttgatattttcactcaattatctgatgccactgattcatctgactgtattcatacagctgacatstgtggcactaattctcagagctggcttcatcaaaatagccattgaatgcatcttttagggagcatcaacactgtgctaagaaaatcttggatgtttagccaatgagcgtaaaggtaattaaatattttattaactttgtatataagagctcaaagcactttcacatacatttttccttcatactctttatgtgcttgtattggcagaaagaggacaaagtagctgta

SEQ ID NO: 730173 - DNA, 597 bp, Homo sapiens
ataaaaagaacacctatatcaaaatattcttgtggaactaaaattagataaaacatataaaagtgtctagctaggagtaaatgttcaataaatattgattctcacagtggtttttaatattaaatgtcatgtgacttgcccccaaatatctggctggtgactggcaaagytgggactgaaccatttccttaaggcatacaagccattcatttttcttctaggccccttcttgtcttttcctccaacaatcagagctaaaccatccttcttcatacaatatggagataatacagtgaaatagttatgaacataccttaggggtaggataaaacctgggtttcaaactaaattctgatattctctttctgggacactgggtaagttactgaatgtttctgaatctcagtctcttcatctgtaaaatgaggataaagataatgggtaccaacctcaaagagatgtagtaaggataaaagacattatgtcaagtacttggaacaggtcatggcatgaataaggtcaataaatagtatctatcttaattatcaacttttcccccacgtgctaagtggcagaagttctccacattgtctcctc

SEQ ID NO: 730174 - DNA, 613 bp, Homo sapiens
agagctaatgtcaaccgcctttaagggttttgatgacagaataatttactgtgtgtaatgtacccagcagtaatggggttttacccattgttatttcctttaatggtattttgagtattgtacagaactggtgcagtaaaaacatttccttctcaagtagctgctaccttctaaaggcaggacaaacytccagtgaaattcatctctcacatcactcatatacagcgacataaactgctcagctcacttttcaggattcagtagaatgctggacccatattttcctccttgtgctaaaacattctgcagatttagtaccatgtaaaggcatacagaaaatcaatccaggcaattgcttctttactttctgatcagttcctcccagtttatccccagctttgaatgtacttcatctcttctatgtagaccattatcctctctgcccgcacagtcctatcataaaaaaaaggttcaaagcacttcacacacataaaaaggcttgttattaaaatttctcttctgtcctccctaatttgatattttctgaataaaatcagagagagatttctatgaaatttatgtatgagaaacattttgattttaaattcttaca

SEQ ID NO: 730175 - DNA, 453 bp, Homo sapiens
gcatacagtgagaacacagttatctgcatggtctctcacagaaaatttaacatggctgagcctgtcagttctcccaaactattaataagtgtaagctaatttttcttcagatattactatgcattggatgctgttctgtgtactttacagatrttaactcaattaatattcacaacacattggtgaggtaagtactattattatcctaattttatatacgatcaaactgaggcatggagaggtgaaacaacttgctgaatcttatagagctgtaaagtggaatcaggacttggccctagatagtcagactgtagagcctgtaatcttaacctccatacttagaactttcttaactgtgaagattaaaagagactattgaaacaccaataacattgttccccaatccctgtaggagcacagaatagcttagtttgccttcttcccctacagact

SEQ ID NO: 730176 - DNA, 618 bp, Homo sapiens
ctctaaggtatatattatcatgatccttattttacagttaagacattaaggcacagagaggttaggtgacttgcccaggtcatgcagttgataaaggctgatgttagtacttgaaatcagggaactctgaagcctgtgttctgaatcactgcttttactttgggagtagtgcttgaagagctcaccttctaataaaggcgaatgggtacatacaattttaatatagtaggataaatataatcaaacaactatatgcaaygtgcaggaatcctatagaaaaggaactattaatattatttgtgggaataatcttggtatgggaagaaaggcagcttacagagtcagtgacaccttggtaaagcactgaggataaagagagcccttccaggtgggcaaagtggggatggtcattcacagctgagggaagagtctagcaaatataagagatttgctactacaacatgaattcatagagctgcagatactagttatgataaatttttaaatggggtgggagtgggtgaagtgttcaagagatgagaatagagactgacaacaacaaagacagttgggtcttttcagccagagtacgatgttttggccattaaagggtaaagt

SEQ ID NO: 730177 - DNA, 576 bp, Homo sapiens
agttaacaagatttaaatgctgatatgaagttaataaatcttatgtcacatgataaaggaaaaggaaataaaatgaagatattttcttagtacacgtgtatacatacacaaacatgtttttaacaaaataaggaagaaatactcatgacagttacagtccttatttctacagctggtcatgtggtcatagcgggtattgatgactaccttcttctaccacccattctgtattccctttgccttcagcaagcagctaagcaggtcatggtttttttyttggtggagtgaccaaaccttcatttctgaggggtctggaacatttgtaatcctggctggattgagctgttgtagtttcccgttgaccttaatcacaagacatggtaatactaagagacatcctaatggatcttctgtattccacgcatcctcttccttccgttatggagtagtagactgatttcatcttgatagtcgagatcagtcaccccagccaacactgtaactccttttttagcccattgacttaaaggtaggaggagcttaaatgtccaggtggcaatcttaatttccagttta

SEQ ID NO: 730178 - DNA, 576 bp, Homo sapiens
agttaacaagatttaaatgctgatatgaagttaataaatcttatgtcacatgataaaggaaaaggaaataaaatgaagatattttcttagtacacgtgtatacatacacaaacatgtttttaacaaaataaggaagaaatactcatgacagttacagtccttatttctacagctggtcatgtggtcatagcgggtattgatgactaccttcttctaccacccattctgtattccctttgccttcagcaagcagctaagcaggtcatggtttttttcttggtggagtgaccaaaccttcatttytgaggggtctggaacatttgtaatcctggctggattgagctgttgtagtttcccgttgaccttaatcacaagacatggtaatactaagagacatcctaatggatcttctgtattccacgcatcctcttccttccgttatggagtagtagactgatttcatcttgatagtcgagatcagtcaccccagccaacactgtaactccttttttagcccattgacttaaaggtaggaggagcttaaatgtccaggtggcaatcttaatttccagttta

SEQ ID NO: 730179 - DNA, 588 bp, Homo sapiens
accttgaaactagttctttagcaaaattaaaatatcagtacctcctttgaagagttctaacagaataacattttgaaaagcactgccacatattatatttcgttaatactgtttcttcattattcagaagacattgtctaagtcatagaagaaatttggacaaatgaatgacacaaccagagcttttccttattgacaaattacctaaaagatttggtgtgatttggttttcccttacttggtatttctgaaatgccaaactcaatttcctattcctctatatgtcaaccaygtacatgatgtcaacattagcctcttctttatacatatgccacaagatggagtatccaaacctaaacattcaaaatagaaacctgaaaaagttatgaggtcatggagccagacagccttggttggatgctgccttttccatgcaatagttatgtgaccttgtaatgccattgaacatctctgtgcctagtggttgatgctataagaattagataagataatgtatgtcaagtacttaacacagacttgacacatagtaaatgcttcatatatattagctattatgttcccattgaa

SEQ ID NO: 730180 - DNA, 613 bp, Homo sapiens
ggagtcctccagaaaataaaacagacgttcacttttaaagaaaaaaggacaaatcagaagaagggcgattacaaaagttgtttgtcaaaaatgtttattgggacgaggcagggcaagatggctgaatagaagcctccaccagttgtcctctccacaggaacaccaaattaaacaactatttatgcagaaaagcaccctcataagaaccaaaaatcaggtgagcaatcacagtacctggttttaacttcacatcgctaaaagaggcactgaagagggtggaaaagataatcttgaattgtcgacaccacccctcctccatcccctgagcagcagccatgtgatacatagagagrgaatctgtatacatgggagagggagaatgcagtgattgtgggactttgcattggaatgcagtgccgcccacgccagccagaactcagtctgcacccatggaggaagcactgggtccagccttaaccaaaaaagaatcacccatcccagtggctggaacttgagtttcggcaagccttgccactgtgggctgaagtactctggggtactaaataaacctgaacagctatctatgccacaaggactacaactcctaggcaag

SEQ ID NO: 730181 - DNA, 613 bp, Homo sapiens
ggagtcctccagaaaataaaacagacgttcacttttaaagaaaaaaggacaaatcagaagaagggcgattacaaaagttgtttgtcaaaaatgtttattgggacgaggcagggcaagatggctgaatagaagcctccaccagttgtcctctccacaggaacaccaaattaaacaactatttatgcagaaaagcaccctcataagaaccaaaaatcaggtgagcaatcacagtacctggttttaacttcacatcgctaaaagaggcactgaagagggtggaaaagataatcttgaattgtcgacaccacccctcctccatcccctgagcagcagccatgtgatacatagagaggraatctgtatacatgggagagggagaatgcagtgattgtgggactttgcattggaatgcagtgccgcccacgccagccagaactcagtctgcacccatggaggaagcactgggtccagccttaaccaaaaaagaatcacccatcccagtggctggaacttgagtttcggcaagccttgccactgtgggctgaagtactctggggtactaaataaacctgaacagctatctatgccacaaggactacaactcctaggcaag

SEQ ID NO: 730182 - DNA, 613 bp, Homo sapiens
ggagtcctccagaaaataaaacagacgttcacttttaaagaaaaaaggacaaatcagaagaagggcgattacaaaagttgtttgtcaaaaatgtttattgggacgaggcagggcaagatggctgaatagaagcctccaccagttgtcctctccacaggaacaccaaattaaacaactatttatgcagaaaagcaccctcataagaaccaaaaatcaggtgagcaatcacagtacctggttttaacttcacatcgctaaaagaggcactgaagagggtggaaaagataatcttgaattgtcgacaccacccctcctccatcccctgagcagcagccatgtgatacatagagagggaatctgtatacatgggagagggagaatgcagtgaytgtgggactttgcattggaatgcagtgccgcccacgccagccagaactcagtctgcacccatggaggaagcactgggtccagccttaaccaaaaaagaatcacccatcccagtggctggaacttgagtttcggcaagccttgccactgtgggctgaagtactctggggtactaaataaacctgaacagctatctatgccacaaggactacaactcctaggcaag

SEQ ID NO: 730183 - DNA, 605 bp, Homo sapiens
gaaagaaggaatcctccctaaatcattttatgaagccagtatcaccctaataccaaaaccaggaaaggacataaccaaaaaagaaaactacaggccaaaatccctgatgaacatagatgcaaaaatccttaacaaaatactagctaactgaatccaacaatatatcaaaaagataatccaccatgatcaagtgggtttcataccaatgatgcagggatggttcaacctatgcaagtcaataaatgygatacaccgcataaacagaattaaaaacaaaaatcacatgatcatctcaatagatgcagaaaaagcatttgataaaatccagcatcactttatgactaaaactctcagcaaaattggcatacaagggacatacctcaatgtaataaaagccatctatgacaaacccacagccaacataatattgaatggggaaaagttgaaagcattccctctgagaagtggaacaagacaaggatgcctactctcaccacacctcttcagcatactattggatgtcctagccagagcaatcagacaagagaaagaaataaaagacaagtcaaactgttgctggaagagaaagtcaaactgtcactgtt

SEQ ID NO: 730184 - DNA, 552 bp, Homo sapiens
aaagttcagcacattcctcaaagctgctctcacttccctgcctggctgagtcaggaaggaaaagggcttcgttgctaagacaactccatccaaggccttccacattgcctgccctctgcttaaaccctctgggattgcttggaaaattacaaacctaaactataaatgcctcttcttcacttaccttttccagaaacaccacttagatatcgctttctagcaaccattttatttctgttaccagtttcaccaccccagactctccctttctaaggaaacctggacttcccagtcaaattggattttattttctgatattttcagacttcatttactattattctatttgtttgaaaacgattctaagaagcagatagggaaaragaaaggatgcttctgatctaatatattgctcaagtctaggtgctatgaggcatacaagtaccaaatctacactcatttccttgttaaaacatatgacgccatatattgagtaatagcaatattatatactagcatctggatttcaacaaagtgtttggcaaagtttca

SEQ ID NO: 730185 - DNA, 552 bp, Homo sapiens
aaagttcagcacattcctcaaagctgctctcacttccctgcctggctgagtcaggaaggaaaagggcttcgttgctaagacaactccatccaaggccttccacattgcctgccctctgcttaaaccctctgggattgcttggaaaattacaaacctaaactataaatgcctcttcttcacttaccttttccagaaacaccacttagatatcgctttctagcaaccattttatttctgttaccagtttcaccaccccagactctccctttctaaggaaacctggacttcccagtcaaattggattttattttctgatattttcagacttcatttactattattctatttgtttgaaaacgattctaagaagcagatagggaaagaraaaggatgcttctgatctaatatattgctcaagtctaggtgctatgaggcatacaagtaccaaatctacactcatttccttgttaaaacatatgacgccatatattgagtaatagcaatattatatactagcatctggatttcaacaaagtgtttggcaaagtttca

SEQ ID NO: 730186 - DNA, 635 bp, Homo sapiens
tatagaaatatacatgatcacgctgtaaaacaatcccagttaccaagttctattctctcttatgtctaagtcactgtcttagactatagtttatgctatgtgaagtcaactctttgcagccacaagacagcctttagttctgtgctctactatactaaattcatggtatttagttatgaaattctggacttttgacaatcctctagcagaaaagccatgggtttccatatgccctcgaatatagcacttctgaaactttactgtgtatatgaatcacctaaaaaccttctgagaaatattcttagttcacatttcaaagggctccgtgcaaacaaagcagcaatggctggaaattattcggcctttgttgtttccctgtttctacctctgctcagtgacaaaaaactaaagaacatacatattgtccttaatgtatgactgcaactattaacactaggtaaattataatccatagtccagtctagtgtttgtaaakaaatccccattctaactggctagtctccctgctatgatgtaatcttttcttgtgtgtcattccagtcccttacagtaatttcctaatttcaggggaaaattgagtttgcctctcaaaacaaagctgatacatggtattg

SEQ ID NO: 730187 - DNA, 507 bp, Homo sapiens
atatgttaggccacagtacaagtctcaataaattttaaaaaattggaatcatatcaagtatcttctcaaatcacagcagaataaaactacaaatcggccgggcgcagtggctcacgcctgtaatcccagcactttgggaggccgaggcgggtggatcatgaggtcaggagatcgagaccatcctggctaacaaggtgaaaccccgtctctactaaaaatacaaaaaattaggcgggcgcctgtagtcccagctactcgggaggctgaggcaggagaatggcgtgaacccgggaagyggagcttgcagtgagccgagattgcgccactgcagtccgcagtccggcctgggcaacagagcgagactccgtctcaaaaagaaaaaaaaaaaaaaaaaaactacaaatcaataccaggtggaactttgtaaactatacaaatacatggaaattaaacaacgtgctcctgatgaatctttgggtcaatgatgaaatgaagatggaaattata

SEQ ID NO: 730188 - DNA, 613 bp, Homo sapiens
aagcagccgcctcagggaggcagattgtaatcaggacccataggagtagcagggagcccatgtgtttctgtgcagtttgctgaagccagtcagaacatcctgagtctgacttatcacccttctctggcctgctggggttcctgaaccaagtagtttaacttgccaagccttagtttctgcagttataaaatggtggtatgaatgaatgaaacaaggtatccgcaacactgaaatggaacataatagggcctgaacagaggacagttatgaatatttccatacaaaatgcaatttyatgcccttcatcaatggtcattttctctcattttacttttgaggactagatttgccaaagtccctctggggccaacccagtacaccactgagaagccctttgaaaaagccagctttatcatcgttttgtttttatttcttgatatttggaaagttttcttccttctgcttctatgtgtcctctgcctaactagtcatggtgactccttggatagtattctccatggtttcttgtaaaatattgatgcttaccttgcaatcttgcagcttttagcatgaattattttgctgattataatcaggcctctaggaataaaca

SEQ ID NO: 730189 - DNA, 613 bp, Homo sapiens
aagcagccgcctcagggaggcagattgtaatcaggacccataggagtagcagggagcccatgtgtttctgtgcagtttgctgaagccagtcagaacatcctgagtctgacttatcacccttctctggcctgctggggttcctgaaccaagtagtttaacttgccaagccttagtttctgcagttataaaatggtggtatgaatgaatgaaacaaggtatccgcaacactgaaatggaacataatagggcctgaacagaggacagttatgaatatttccatacaaaatgcaatttcatgcccttcatcaatggtcattttctctcattttacttttgaggactagatttgccaaagtccctctggggccaacccagtacaccactgagaagccctttgaaaaagccagctttatcatcgttttgtttttatttcttgatatttggaaagttttcttccttctgyttctatgtgtcctctgcctaactagtcatggtgactccttggatagtattctccatggtttcttgtaaaatattgatgcttaccttgcaatcttgcagcttttagcatgaattattttgctgattataatcaggcctctaggaataaaca

SEQ ID NO: 730190 - DNA, 486 bp, Homo sapiens
acatggttttgccatgttgctcaggttggtctggaactcctgagctcaagtgatcctcccacctcggcctcccaaagtgctgggatcataggcaggagccactgtggcaggccagtttgcatgttttacagcttactataaatggactcatacagcatatactctttttaaaaatcttactttttccactcagcataataattttgggattcacttaygttgcatgtatcaatagtttattcttttaaattgttgaatagtatcttaagataaacaaatgcaatttgtttatccatttttctgttgatgaatgtttgggctgtttccagtttttgactatacaagtgaaattgctaatggacatttccgtacaagtttgtgtatggacatccacttgaaattctcttgggtaaacttctaagagaggagtggttggatcatatggtaggtgtatgtctagcttcttaagatcactacatactgttt

SEQ ID NO: 730191 - DNA, 486 bp, Homo sapiens
acatggttttgccatgttgctcaggttggtctggaactcctgagctcaagtgatcctcccacctcggcctcccaaagtgctgggatcataggcaggagccactgtggcaggccagtttgcatgttttacagcttactataaatggactcatacagcatatactctttttaaaaatcttactttttccactcagcataataattttgggattcacttatgttgcatgtatcaatagtttattcttttaaattgttgaatagtatcttaagataaacaaatgcaatttgtttatccatttttctgttgatgaatgtttgggctgtttccagtttttgactatrcaagtgaaattgctaatggacatttccgtacaagtttgtgtatggacatccacttgaaattctcttgggtaaacttctaagagaggagtggttggatcatatggtaggtgtatgtctagcttcttaagatcactacatactgttt

SEQ ID NO: 730192 - DNA, 552 bp, Homo sapiens
cggatgattgggtgttagatcccggtgggggctgcaagactggtgccaggtgatgagatcctggacatattccaaaggtgtgagaggagcctggaggcttcccgatactgcactggggatgactcctgcagattttccwccagggcctcccacttcctcctggacacccccttacctcaaacatcccgctcttcctgaaggaccctcatcctagagaaaggccctgtgagcagagctgccctggctaccagagtgactgggagcagttcctcgtgcagagccctcctctcaagcctccctccaagacactactcctcaccccctgccaccccagcagatccagtcctcacctcgacagggtggcggcaagtttccaggtgcccctcccatatgtccacacatgaggtgtgcgcaggactctgacgggagccttgggctgggccgtcaccagccaccggaggacaccctgctccccagactgatacacgagggcatctgaacctgattacctctgccaccacatcctctcccacatgtgcgagcagccactgc

SEQ ID NO: 730193 - DNA, 552 bp, Homo sapiens
cggatgattgggtgttagatcccggtgggggctgcaagactggtgccaggtgatgagatcctggacatattccaaaggtgtgagaggagcctggaggcttcccgatactgcactggggatgactcctgcagattttcctccagggcctcccacttcctcctggacacccccttacctcaaacatcccgctcttcctgaaggaccctcatcctagagaaaggccctgtgagcagagctgccctggctaccagagtgactgggagcagttcctcgtgcagagccctcctctcaagcctccctccaagacactactcctcaccccctgccaccccagcagatccagtcctcacctcgacagggtggcggcaagtttccaggtgcccctcccatatgtccacacatsaggtgtgcgcaggactctgacgggagccttgggctgggccgtcaccagccaccggaggacaccctgctccccagactgatacacgagggcatctgaacctgattacctctgccaccacatcctctcccacatgtgcgagcagccactgc

SEQ ID NO: 730194 - DNA, 577 bp, Homo sapiens
ttccctcctcccccatctcctctattttcttttaaggaatttgtattaatcagatattggattttctgaactcatttttaaccacttaagagtgtacagttgggctgggtgcagtggctcacgcctgtaatcccagcactttgggaggctgaggcaggcagatcacaaggtcaggagatcgagaccatcctggctaacacagtgaaaccccatctctactaaaaatacaaaaaattagtcgggcatggtgaaaattagccgggcgtggtggtggacgcctgtagtcccagctacttgggaggctgaggcaggacaatggcgtgaacccrggaggcagagcttgcagtgagccgagatcgtgccactgcactccagcctgggccacagagcaagactctgtctcaaaaaaaaaaaaagagtgtacagttaagtggcattattaagtaccttcacattagttccataacaaccatcaccaccatccatctccagaacttttcatcttaccaaacaaactccgtatccattaaacattacctcccaatttttctctcctcccagcccctggcaaccacaa

SEQ ID NO: 730195 - DNA, 639 bp, Homo sapiens
tgtatacaagatacatgtatacaacatgtaatgatcaaatcagggtaattagctcatccatcacctcaaacttttatcatttattggttggaaacattcaaaatcctctcttctagctatttgaaatatgtaataaattattgttacctatacgtcactcttcagggctagagaatattaaaacttattccttctatgtagctgtaattttgtgtccattaatccacctttccctatctccattccacttttctcagcctctagtcaccacaattctcctctttacttctatgagctccacatttttaattcctgtgtatgagtaagaacatgtgatgtttgagattaaggttttattatgagcagaaacttagagccaaactaaccatgagactatgagctcttccagtagsatgaatagtgtccctcaaaaattcatgtccacctggtacctcagaatgtgaccctattgggaaacagggtattttgtagatataattaaggatctcaagaagaaatcatcctaaatttaggatgatgtcctaaatctagcagctgttctccctataaaaagagaagaagatgaagtcaaagagacacagacagaagaaggccctgcatagatggagatagaaagtg

SEQ ID NO: 730196 - DNA, 586 bp, Homo sapiens
ggaggcggaggttgcagtgagttgagattgtgccactgcactccagcctgggtgacagaacgagactctgtctcaaaaaaacaacaacaaaaccccctagaacccatgcttcatacgcatgaccctagcacttcttaagtttaatatgcacgcagatgacacggggatctgttaaaatgcagattctgaaacaccaggtctgaggtggggcctgaggtgctacatttctagaaagctcccaggtggtggcacatgatgccactggtttcagaccacacactgaatgacaactgtggtatcctgtttccacttcgggtttttttttgggggggtcacttcccaccagcttgaagtcatctccttgcccatccctcaaatgaggactccctccagacacacagccagtgaacccagatagagctggaccccacccacccctccatggrctgggtcccagctgtgtacatacatggcaggggagagccgatgggagggacttgggcgtcacagcgcccagagggcccctggtagccctgcctggcaggcacttaatgctgactctccccacggccctcgttgctcctgc

SEQ ID NO: 730197 - DNA, 539 bp, Homo sapiens
gtaagattctcccaaacctgatcatgtctgtgccgttcatttggaaacattttatgtcctcttcctgtggttgttcttagcccatccttggcatcttgaaatgttttcaaattgtttatgttgcagatcttggcttcgttaaggagagaacatgtcttgcatgggaataacttgygcaaaattatttcacactcagcaaggagcttaaaatgaagtcaaaaaaagcttctgagcagccatgtaggttttacaaagtccacatgccaaaactcatgcactttagacgcctgatcaccagacagcccaacactctttcagaacctgtttactcttattctaggtcaatggcttcatatatcatatagtgtcttcctatatgatagtaatgacatcttaggttcaatccattgaaaaaatgataagaaatttcccatgaaattaacaagatctttaaacaaattatttcgtaaatcacagtgcatttgcatatgtgaaagactttagacttattcagtcctcaagcaatgttgccttgcaga

SEQ ID NO: 730198 - DNA, 617 bp, Homo sapiens
ttgaagatattctcaaatggctgtgggatcaaaggacatggatgaagtgctcatggtaactgagcaagttcctgtttgacttgctacctttacctcaactcctgggatggccctcaaataattaattcagacaggatcaatgcttctcaaartgtgttcccccgaccggcagcatcagtatcaaggaaatttgttaggaatgcacattgttaggccatcttcagacctactgatttagaaactctggaagtggagcctagtcatctgcattctaacaagcctttcaggtaattctgatgttctttcaagatgagaacctctgtaatagatcaacctcccaaagtacaactggtgattagaatgaattggagcacatcttacatgtagataagtaactacacataatataggtggaaaactcaattttgccaatataggagaaattgtcttggcattattctcttatgcgtattcctgatgagagtgaggtgaaggtttcctgggccttttgtaaggatacattatcttttcacttcaaatcatcttgaacagcttatctgtctcttctccatatccactactgacccagtctgatttattgactgtaccttcctccc

SEQ ID NO: 730199 - DNA, 535 bp, Homo sapiens
cacaaattagaaggcatatcttttataatgaatgccctactgaatgaataccattatgaacgagcatgaacttgtagccaaatggatctgaggtcaaatcccagacactcagtactgtggcttctgtgacctcagacaagttacttaacctatctgtcagtttcctcatctgtaacctgcccctttggaagtgacagctaaaaattccttgagttcagacaggagattattacaggatcatttaaatagaagtaagaattatacttttgaaaaaacttccagtagttgtttcataactcatcaaaataggtttatccgccctgtaccatatgttatacagtgaagatataaggtacaccattttatagtatggtgcttcagttmagtttgtagaaatgtgtaaaactgagaaccaagccatacccttggctaaacactattcagtaggactctgccacatttctgcctcataatggatttttgtttttttcaatggtttttgatgtgatttccatttcaacatcagtaagagtaa

SEQ ID NO: 730200 - DNA, 542 bp, Homo sapiens
cactttaaatgggaaaatggcaaaatggaattttcaggaaaaatgcaaccagactgtcaaggtgattttagatattgtcatacatggaaaacttggagtaactcatgatttgactccctccccctcaaaaatgttttatcagttatccaaatttccatgaatgacaccactattcacccaaatgtcaaaaagcctaagagtctttcaggatctctttcctttcttcacctctctgaattaaatayaaatactattaccaattgtaatattaatgctaatgcaattattgctaatagtagctaaaattcaccaagtatttatgttctgtcagactctatcctaggagcttcacattctctcaatctccataacaattttaccttccatctttgatgaatttgagacttagagctattaatgtagttgcacatagtcataaaaatggtaaagtcaggatttacacccaagtttgttagatttcacaacctgactcaagtcccgtcatgtctgtctctaaaaatgtcttatctctgaccacttct

SEQ ID NO: 730201 - DNA, 562 bp, Homo sapiens
acaatatcacaaccaggatattgacattgatatagtcaagatacagaacatttccatcacgacaaggatccctcctgtagcccttctgtagtatagccatgctcactttcctcccacctccggtacctccttaagccctggaaatcactaatctgttcttcgtctctctaatttgtcatktcaacaatgttatatacatataattgtgcagtatataacctttcaggattgtcttttttcactcagcaaaattcttcaaattgtggaaacaggcacattcctccatagatcaatagtttgttcctttttattgctgaacatcattccttggtatgaacgtacccctgtttatttaagcattcacccatgcaaaaacatctaggttattcttgtctactataaataaggccactataaatattccactacaggtttttgtgtaaactaagtcttcatttctttgggataaatgccaggagtgcaattgctgggccatatgatagttacaatttcagttcttcaagaaaattctaaacgttttctagagtagttatagcatttc

SEQ ID NO: 730202 - DNA, 562 bp, Homo sapiens
acaatatcacaaccaggatattgacattgatatagtcaagatacagaacatttccatcacgacaaggatccctcctgtagcccttctgtagtatagccatgctcactttcctcccacctccggtacctccttaagccctggaaatcactaatctgttcttcgtctctctaatttgtcatgtcaacaatgttatatacatataattgtgcagtatataacctttcaggattgtcttttttcactcagcaaaattcttcaaattgtggaaacaggcacattcctccatagatcaatagtttgttcctttttattgctgaacatcattccttggtatgaacgtacccctgtttatttaagcattcacccatkcaaaaacatctaggttattcttgtctactataaataaggccactataaatattccactacaggtttttgtgtaaactaagtcttcatttctttgggataaatgccaggagtgcaattgctgggccatatgatagttacaatttcagttcttcaagaaaattctaaacgttttctagagtagttatagcatttc

SEQ ID NO: 730203 - DNA, 562 bp, Homo sapiens
acaatatcacaaccaggatattgacattgatatagtcaagatacagaacatttccatcacgacaaggatccctcctgtagcccttctgtagtatagccatgctcactttcctcccacctccggtacctccttaagccctggaaatcactaatctgttcttcgtctctctaatttgtcatgtcaacaatgttatatacatataattgtgcagtatataacctttcaggattgtcttttttcactcagcaaaattcttcaaattgtggaaacaggcacattcctccatagatcaatagtttgttcctttttattgctgaacatcattccttggtatgaacgtacccctgtttatttaagcattcacccatgcaaaaacatctaggttattcttgtctactataaataargccactataaatattccactacaggtttttgtgtaaactaagtcttcatttctttgggataaatgccaggagtgcaattgctgggccatatgatagttacaatttcagttcttcaagaaaattctaaacgttttctagagtagttatagcatttc

SEQ ID NO: 730204 - DNA, 546 bp, Homo sapiens
acccttccccactggaggcatggccccttcaggggagcagtgagaagctttgccagctgcaagtcccctggatcagctcacacctcagaacatcttgtccccagtgagctggcaggggcgccggcccagggcggggggcgctgctgtatctaaccggrtcgattgtgcataaccgtctaggccggttcgtggaatgttcgtggggccccctgcccctccctcagcctccccccgcatccccccaagaaaggaaaattatttttcgtattgtaaactttaaacatgaaaaagctgtttttaatttagcagaaactggcttgaatcttcactttgtgaacgtttgtgtccttcagaggcagaatatgcctgcgcacactcgcacatgctcatgcacacacctgcacacgcatgccgcaacacgcacattcacatggccgtgctcgtgcacgcctgcacacgcatgcttgcccatacccacgcattgcagcgcgttcacacgctcacccgcacacagtgaaacacaagctcacacatatgcacacacac

SEQ ID NO: 730205 - DNA, 519 bp, Homo sapiens
tagaaatacagatgcctgcctgggtgtgatagctcacgcctgtaatcccaccactttgggaggcgaggtgggtggatcacgaggtcaggagttgagatcggcctggccaacatggtgaaaccccagtctctactaaaaatacaaaaattagctgggcgtggtggtgtgcacctgtaatcccagctactcaggaggctgaggcaggagaatagcttgaacccgggaggcggaggttgcagtaagccaagatcatgccattgcactccagcctgggcaacagagtgagactccatctcaaaaaaaatttwaaaaaaggctgggcgcagtggctcatgcctgtaaccccaacactttgggaggtcaaggcaggcagatcactaggtcatgagatcgagaccttcctggccaacatggcaaaaccctgtctctagtaaaaacacaaaaattggccgggcatagtggcacacgcatgtagtcctagctacttgggaggctgaggcaggagaatcacttgaaccg

SEQ ID NO: 730206 - DNA, 605 bp, Homo sapiens
atcatagttcattctgtctaagcagagccactatatgtgattgtgttgggctctcagggccttggggtacctggctgaggctgagtgaggttgagtcatctcacagcctgtcctctgcaggctgaacccatccaaaggtgccatatgccaccaaggcatgcacctgtaggcttggccacccaggtagagcctgggtaacctaaggtgtaccctctcctctttcctgcttacstcacatggtaaatgtgtctgttgttactaacaagaaaaaggaatcaggaacagggattgtctccaggaatgagccaagtgatggagtttcttatagaaaatactattcagttttaatttgtgtagttgattttcagatagtcataagtaaatattaaatgtttataaaaatgcaaataattcctcatggtttaaaaattgaacttcaaacctctcacaaattaaatataaacaattaatagagtggtatcttggggtaaggataaagcagaatcttttggttttttttaaataaaaaatagaatgtaaaattttaaaaaggggcaacagtaatgacaagggaaaatacatggtgatactgaaaaacagtgctt

SEQ ID NO: 730207 - DNA, 611 bp, Homo sapiens
tgcctggtcccttccccaagaggactttacataaatagagtcatacaccatgtgtattttttggtgtctgcctttttcactcaacactatgtttgtgaggtctcatgatttattgcataatacttgaattttatttattttattgtgttataatattgtagaaatttaccacaaactatttctacattatactattgatgggcatttgggctgtttacagttcgggggctatgataaacaatgttgctatgaagattccagtacatttctccaacacacacttgcgtgcatttttgtgtggtatatatctaagagtggaattgctggatcgaagagttggcataggtgcagttgtagaattctgtcarcggtttttaaaagcggttgtgtgtaccaatttactgtctattaaagtataggattgtcgcttcatattcctgccaatacttggttttgggggctctaattttaatctttacgatggatatgtagaggcatgtgtggtctaatttgatttaccttattgctaatggggttgagactttttcacgtctctactgaccatttggatatcttctttagagaagtatctgttcatatctcctgtgtat

SEQ ID NO: 730208 - DNA, 601 bp, Homo sapiens
atctcctgtgtatattttcactaagctgtttgtctttttcttattgagctttagtgttctttacctattctggatataaagcatttgttggttacagatgttacaaaagtcacagctttcactggcttgatttttcactctcttaatcacatactgtatyttaatgaaaagaagttcttaatttcagtgtaatcaaaattattaatctattccttataattagtactgctcttttggttctgattaagaaatatttgtctctccaatatcatgaagctgttcttctatgttactttatagttgttttattgcttcatcttttatacataaatatgtctgcagtatacttgtaattgtttcttgtgtacaatctgaaattattttttcccacaccgatatttaactctcccagcactattccctgaaaaggccatccgtttccactgatcttggcaacacttttttgagaaatcaagtgtccgtacatgcatgggcctgattctgggcttttcattctgtcctaattagtctatttgtttatcctttcattggcaccaaattgtgctaactattataactctgtaatattgatacctccaat

SEQ ID NO: 730209 - DNA, 610 bp, Homo sapiens
ctcaggtccctggccctcccctttcctctgtgctctcagcagctgaccttgtcttttcctttactgagagtagaggcacctcttacaaatactctggcctctgcctggactgactgggctaaattgtctccgaagatggccaccaaccattcctcccacctgtctgcatgcaggctgctcctcccgtcagaagatggagactgcttccttgcccttsaatccaagctggctcatgacttgcttcaatgaataggaaatggcagaagtgatgctctgaggcttctgggcctagactttaagaggtgttgcccctttcctttttccctcttgggatccagcctaccacatagagaagtttgggttgacaactaaatgtgagagagagacagacagagagaagagggagagctgattcagctagaccttagtcattccagccatcctagctgaagcactagcatgtgaaagaagccaccttctaacctatcaatcagagcccccaattttactgacctcagtcaacaccatgtggaacagaactaccccagggagcccaaccaacccatacaatcatgagaaattaaaaactgatgttgtagcctcctgagtt

SEQ ID NO: 730210 - DNA, 632 bp, Homo sapiens
ttgcaacttaacataattgttaccagttacctaaaatgagcaaagaaaccagagtcctgatatcatttttatacagaggcagtgatggtggggacaaaaaattgtattttaattgtatatatctatacctacacacacatataattttataacagaattttaaaaaatcttttagaaacacagtytcattctgttgcctaggctggactgcagtggtgctatcatagttcaccacaacctcgaactcctgggcttaagtgatcctaccatctcagccttccgggtagctaggactatatgtgtgtgccaccatggctggataatttttctttttttgtagagacgggctctcgttatgttgccaggctggtcttgaactcctggcctctagcaatcctcttgccttggcctcctgaagtgctgagattgcaggcatgggccaccatgcccggccaacagtatattttaaacagtactgtctgacgcttgctttacttacagcacatctatttctaaatctagatatcctgtacatttaaaaaattatgacgtactcatataatttgatatcctccactttaagataaacccacatgtaagaatgtgcagagatcctatacaagtttgtgtca

SEQ ID NO: 730211 - DNA, 625 bp, Homo sapiens
attcactatgaagctgtgaataaatcaaagacttgtcttgctgtgtgctatagaatcaccaatgcaacataataaagcttaagtgggcagcatcaaggccactggaaaatattcttgagcctgctcacctctattacatccccatccatcctatgaaaccacataaaaattctaacacattaatattcctagtttatgcccacaattctcagaaccctcatttggggcctttgactaatgcatagttgtttgaacaataaaaattgatttttttagttcacaatagagctttgtgtgagcaagtgcacgtgcttttcattcaaacataaatagccccacttagttgtgaatgaaatcagcatttattgtactaatagttcacaaaatgaattaaacatacctagagttgaacaagctttattcctaccttcaaccacgatgtctctcctttctcaacctctayctcaaaaggatacttaaaaataaattctggaatcataagaaataagagtgagcaatataggtttatctattgcaaccttagtaaacatgaataacacctcattagacattaaatcaccagtctttattcctctgcctgtgaactggtttcatatcacactca

SEQ ID NO: 730212 - DNA, 643 bp, Homo sapiens
ccacatgtatccagtgtctctcacattcagtacacacacacacacacacacacacacacccctaccttagagattcggcatttatcattgtgaagaactgtcctacaaaatacagaggctttgaatacctgtggtccacactccctaaatgccagtagtagccccagttgctgtcaaaccttcttaggttctccaatgtccccctagagaggctgtgctaccccagaatgagaaccaccagctggatccgtgttgggaatttgccctcactcttcagggcagtggttttcaaacttgagtgcacaatggaatcacctatctcaaaaccccttatccccgggcaccatcaccagaaagtctcatgtgattggtctaagctatgtctttagattttaaccactgaaaggttaaaaactgccgcagatgattctaatgtgtggctgaygtcaaccttccccatgggtctgggactccgcgatggctgacgggccagcatctcttctgcctggtgtgcaggctggcacagctcgagccagcagctgccttggagtcaggaccaacgttccgctcagttccccagtgcccccacactggatctgacatccacttggctattccgcaccatgccccctgcctgccaaga

SEQ ID NO: 730213 - DNA, 653 bp, Homo sapiens
tactcctccggaccactctaagaggtaggtgcttattattaagcccattttacagctgaggaaactgaggcccagaccacctcaataacttgcctaagctcacatgctagtaagcagcagagtgatactgaagcctggcagcatggctcagagtcacgagggctgcactgtgtatgagatctcccctctgcagcactttgcactggccactgtgccttctgggcagaggcacatttcctgattttcctttttgactgcaagctcctccagggcatagacccagagtgtctggctctcactgagtccccagagaagtcagttcttgacttgtagtasggtcttgcaaggcagaggtactgtctggttcgaacttctgggcactgattctgctttatcctctcagaggaggaaggatccttgccgacgctgagtttacacaagaatcagaaagagtaacatttgtaatagtcactgaaatgaaagcaaatagactgctagtgtgagttatttgcagtgaggctacaagggcagagacatggcaaggaaaaaggtctctagatcagttcagaccgtggcaaacagagtgttccattactgactctggggccagaggatgctctactgagacctgctgcttctgctccccactgcat

SEQ ID NO: 730214 - DNA, 642 bp, Homo sapiens
tctgaaaattcagagggcattctcccctctgtccatcccccagctcacacttcattgcacacattgaggtcatgcatagtggaagaagatatattttgaaaaggaaaagaaaagcaaaaatgttgaaataaaagaagaaaaagtaaaaccatctagaaatcctgggtaacatggacagagaaaagaagagtcatgcaggattttggaagtttgggcttaacagtcaagggaatggaaaggagagattcaggaattagctgcattctgcatagaatcaattgagaaggggttagagagagagaggattttaagatagtttgctgcattagggacayacttccctcagagactgtgtaaagatttgaattatggatcgtgactttatgatgtcttcactatgtgtctctgaatatgatccagtgtcaaaattcatcacagatggactcacttgtattttggggacagttactcactctaaggaggccttctccccaggctgggttcctacatgttcctttcctgtccttgacctctacaagtcctcatctactgatccatattctcctccccaaaaatacaaacttgaatcacttattcttgccccaggcacactagaattttgcaaaaatccttattatttga

SEQ ID NO: 730215 - DNA, 589 bp, Homo sapiens
acatggacagagaaaagaagagtcatgcaggattttggaagtttgggcttaacagtcaagggaatggaaaggagagattcaggaattagctgcattctgcatagaatcaattgagaaggggttagagagagagaggattttaagatagtttgctgcattagggacatacttccctcagagactgtgtaaagatttgaattatggatcgtgactttatgatgtcttcactatgtgtctctgaatatgatccagtgtcawaattcatcacagatggactcacttgtattttggggacagttactcactctaaggaggccttctccccaggctgggttcctacatgttcctttcctgtccttgacctctacaagtcctcatctactgatccatattctcctccccaaaaatacaaacttgaatcacttattcttgccccaggcacactagaattttgcaaaaatccttattatttgagaggactggcttcccttcttcccactttcagaaactcttttcctccaaactgatcccaatttcccatactagtaaccagcttcaaggtggtagccaggagaaggggagatggtaa

SEQ ID NO: 730216 - DNA, 620 bp, Homo sapiens
ccaaaggcttgctttgtcttaaagttgggattagcaagggcacgtgtcactctgtaaaagcctagttttcctagaaggcacaagaagtatagaggattggaaaacatgcaaggatgtggcattccacatgctccaaagggcytatattagagccttaaactctcttccaattcttagccagcaatgtcgattagatgggtaacttgaagacagccaaaaccacacaatttccatcaaaaggcaattcactgctttcataacagtggggatggctaccggtagttaaaaaggcagaagtggctcatccatctctgggaataatttatatgacttggatgacatttaatttaacacaggtcacccaaaaggatggtgatttaatgccccagctttttttttttttcagtgctgcgttgctgtcattaggtgagtttcacctcatacttctttgtttttatttgaagagaaatctgtttgaaagacataattgtaaactatcacttttccagctgtaggcagggaataaaacccccaaggtgaaacatctgaccttgaaactcagagtgaataagcctctgtgctcctagcaaggggaatgaaggtagatttgtgaattaaaa

SEQ ID NO: 730217 - DNA, 642 bp, Homo sapiens
acattcctatggcctacctagtttgttctctaatccatttggcttgacctagaagtagcaagtcagttccaatgaattgagatagggaatctcactgcactatttgttttccagtgtttgtaaaggaaaaaagtcagggaatgagccaggattatgcttcggaatcccgaggccwctggctcttgctctttattctccttcgtcaatgatacaaggataccttgtaatcgctctgtctccacctcagccacatatgttttaatatttagtatttgcattggctaggaaagcatcatttccactgctaatctatctgtgtagtcatggccaagattttctttgttaattcatatagaaatcaatataggctggtgcagtggctcatgcttgtaataccagaactttgggaggtagaggcaggtggatgacttgagctcaggagtttgagaccagcctgggcaacatggtaaaaccctgtctctactaaaaatataaaaattagctgggcatggtggctcatgcctgtggtcccagttactggggaggctgaggtgggaggatctcttgagccaaggagatagaagctgcaataagctgtgatcacgccactgcactccagcctgggcaacagaatgagaccct

SEQ ID NO: 730218 - DNA, 563 bp, Homo sapiens
ccagcaatccaattattggatatacactctcaggaaaatgaatcattctaccaaaaggacacatgaacccgtatgttcactgcaatgctactcacaatagcaaaaacatggaatcaacccaggtgcccatcaacagtggccttggtatttaaaatggaataccatggaatactatgtagccatatataccatggtacatatataccatggaatactatgtagccataaagaagaatgaaatyacatcttacgccgcaatatggatgcagctggaggccattttcctaagtaaactaatccacaaacagaaaaccaaataccatgtgttctcacttataagtgagagctaaacattgggtacacatgtacataatgatgggaacaatagacaagggggactactatagaaaggtggggcaaagactgaaagactacctattgggtaccatgctcactatgttgattatgggctcaatcataccccaaaccttagcatcacgcaatgtaccttcgtaacaaacctgcacatgtaccctctaatcctaaaataaaagttgaaaaag

SEQ ID NO: 730219 - DNA, 563 bp, Homo sapiens
ccagcaatccaattattggatatacactctcaggaaaatgaatcattctaccaaaaggacacatgaacccgtatgttcactgcaatgctactcacaatagcaaaaacatggaatcaacccaggtgcccatcaacagtggccttggtatttaaaatggaataccatggaatactatgtagccatatataccatggtacatatataccatggaatactatgtagccataaagaagaatgaaatcacatyttacgccgcaatatggatgcagctggaggccattttcctaagtaaactaatccacaaacagaaaaccaaataccatgtgttctcacttataagtgagagctaaacattgggtacacatgtacataatgatgggaacaatagacaagggggactactatagaaaggtggggcaaagactgaaagactacctattgggtaccatgctcactatgttgattatgggctcaatcataccccaaaccttagcatcacgcaatgtaccttcgtaacaaacctgcacatgtaccctctaatcctaaaataaaagttgaaaaag

SEQ ID NO: 730220 - DNA, 575 bp, Homo sapiens
aagttttctctgtagcgtgcaatgctgtcggatagcattttacccacagtggaacttctttggaaattggagtcaatcttctcaaaacctgctgctattttatcaattaagtttatgtaatattcaaaatcctttgttgcatttcaacatttgctgcttcactttgcgcttttatgttacagagacagcgtctttccctaaacctcatgaccaacctctgctagcttccaacttttcttctgcagcttcctcacctccctcagccttcatagacttgaagagagttagcgccttgacctgcattaggctttggcttgagagaatgtcatggctggtttggtcttctatccaaaccactcaaaccttctsactatcatcaacaaagctgtttcactttcttatcatgtttgtgtttgttgcagtagcacttttaatttccttcaagaacttttcctttgcattcacaacttggctaactatttggcacaagaggcctagcttttggcccatctcaggttttgacatgccttcttcactaaatgtaatcaattctagcttttaatttaaagtgagag

SEQ ID NO: 730221 - DNA, 437 bp, Homo sapiens
cttacataacagccttttattttattttgttttatttatttatttatttatttttgagacagagtttcgctcttgttgcccaggctggagtgcaatggcgtgatcacggttcactgcaacctccgcctcccggttcaagcgattctcctgcctcagcctcccgagtagctgggattacaggcgcccagcaccacgcctggctaattttgtattcttagtagagatagggtttctycatgttggtcaggctggtctcgaactcctgacctcaggtgatccgcctgccttggcctcccaaagtgctgggattacaggcatgagccactgcacccagcctacataacagcttaatcaactgtttcttgttgttgttgttgtttgtttgtttgagacggagtctcactctgttgctcaggctggagtgcagtacagtggcc

SEQ ID NO: 730222 - DNA, 494 bp, Homo sapiens
tgtttccactactgttttcctccttctgttccagagtccaatccaggatcccacgctgcaccgactgcaatgtctccttggcctcctcccgtctgtgacagttccttagcctttcctgctctttcatgaccttcacactttggaagagtcctggtcaggtactttatagaatatccctcaatatgggtttgtctgatgttttcccatgattagactgagggtatgcacatcgggcaagaaaaccacagagctggctgggtgcagaggctcacacctgtaatcccagcacattgggaggccaaggcaggaggatcacttgagctcaggagtttgagaccagcctgggcaacacagcragaccctatctctgccaaaaaattaaaaacttcgctgggcatggcagtgtgtgcctgtagttccagcgactcaggaggctgaggcaggagggtcacctgagcccaggaggtcaaggctgcagtgagctatgattgtgc

SEQ ID NO: 730223 - DNA, 589 bp, Homo sapiens
agagggtattactatgattttttatagattaaaaaaaagcccaaaattatactgtgtatagatgatcagtagacgtggtattaaaaactttctacacttgacctttaatttacttctaaattcatgagttttagggaaacggacatggaatgctttattgagttaatctcttaactgtcatggttcaaatttaagaaaaaaaaaatatcaaccattctcatattgatcagattttaatccaatcctttataacaattattatttaaagataaattaaacttgatcaggacayagaaagtataaccaggttaaacaactccaatttattttgactttcctcatggacaaagataatcacaattgcaatcaagctgtgttctaaggtggtggcctgaaaatatatttattttcctgtagaactaccttaaaaagataatgcttaaccacttagaagagcccacaaaatccaacttaatcaataatgtggtgaactaatactaacagaagctctgacctcccaagagaaagcaaatgatgggctctgtgccaaggtgaggaggtggagaggctcctgaataaggcactctgg

SEQ ID NO: 730224 - DNA, 608 bp, Homo sapiens
gcttgatgtggcctaaaaagaccctcaaatcattagtttccatttttgtgttaccaagtaatgtgcaaagcatatttgccccatttgtatggcccaacctggctgcccacctagggaaagatcaagggtgtttgttcatacrttgctatgaaataaagctgtctctgcctaacaaagtagggggtgccaaagggcctgtttatctttggccatactgaatgtttcagttaaagagccacattctcttagccctttgcacattatcttccttatccttagaatacccttccttgcttactttcttgcgcagctctttatctcttaggactcggcttcaatgctcccttttaaggaaagcctttcttaactccaggcagcaggaaagaatggaaaccatcttggagtcacacaggtttgtgaaacgatctcacctctgtatcaacagccttgacttagtaggatccggcactttggaatccctgaaggctggctccatgctctggtcagggcaggagtactttaaatcaggtatgcagggggatgggcaagcccttactgaagaagtgtagctgttttttttttttttttatttttttgagacggagtct

SEQ ID NO: 730225 - DNA, 621 bp, Homo sapiens
agtatgcgtactgaggtctggaagcagcacagaaatgaaagagtgggagaaggaacatgattccctttgtggggcagggcacaggtggccatgctctctgcacaggacacaatgagggcctctgagagagaagagaaagtgttggaggcctgyagaaggtgagcatttctatggagattctttagggaggcctagtttgtggcacgaggggccatgtgggtcccaggagagaatgaagcaggaggctgatttgggttcaaagtagagaggttaaaaatgtccctgtctcagtctagattgtctataccagcagaccaggtaggaaaggaggcagggatttgggctgacattctctaagaataaaagcatacatttggctgagtgttccttgtgtactgtctgggagcctgaatgcaacagaagacagtgagatgaggcatttcagcagcaggaggtggccactaaagtggggagtttagattctctttaaaattttctgattttcctggatgatacacgtaagcattcaaatcctgttccgggaccattcagatagaaaacaaacagaaacttctggaataagatgtggggtatggtggttacaagcacaggctttggaat

SEQ ID NO: 730226 - DNA, 358 bp, Homo sapiens
aatttcataaaacagatattctttaaaacaacaagaatgtaaagagaaacaggactgctcaaaaataataactatgaacttgggaatataaaatacatatctacatattaatatttgagtatttagctttaatgtggttaagttttttaaaaatcacagcaagcatttgcaaataastattccaaatgctccaaagttttctaatacactgaaccaaaaccattttactctattttaaaagatttctgtaaatattggattaggaactatgattattattctcaggatacctatgacatggatgagcaagacacatatgaaacaggtttggaataacaccatagtgtttgtggctagg

SEQ ID NO: 730227 - DNA, 451 bp, Homo sapiens
cccaaaaggggcccctccctctccatgcgcacacagaacttttcgctcacccaaaagtcccttctgtctgatcttttcccatcatctttcttccctctacttactactccctctagaacagtggattttaaatatrctacacctcagggaccaaaagaaaaaagttaagcaagcagggttccaagtgctcctccccaacttcaacaagaatgtgccttttacttcctgggattccaaagtaagggatactgtataaaaggatcaccattgctgaagtttaaaaccactgctctaaaagagttttctgccttaatgtgctccttttccaaaatttcccttcccagcccatgattcccacttcttcacgtattcttctaattcctcttttcctgcctatgctactttccaaggcctcaatccttacatccatttatcttcttcttttctacca

SEQ ID NO: 730228 - DNA, 541 bp, Homo sapiens
ttaactatttttttttcaacttacatcgaggtgacaggcatcttttatacagaaggtaatatttagatgtcataatttctagtggggcagaagaactaattaaatgcatgtcaataatgataatgatgatggcataagcaaaggatartttttggttgctgattattcgtgagatactatgctatgtgctttatatagattgtctcagtgacagctcacaaaatttggagggagctacacttctatactcactttatagataagaaccttgaggttttagagatgttcactgactcagaatcatacgggaagtgtgtgactcaagcccagctctcatagttacctctagatttcagtgcattcagatttcaaagacaggagtggtcaatgagggctggagtagtccagaaagaaaagtattgatgaacttcatcatatatttcagaaattgatttttgaatcaaaaatctctgggccacactgtttggatccttcaactgggcaagagagggcacccgcagtggttgtgcatggaaggtca

SEQ ID NO: 730229 - DNA, 621 bp, Homo sapiens
tgtgtgtgtgtgtgtgtgtgtgtgtgtgtctgcatgtgcatgtatgtgtgtgtgtgtgtgtgtgtttctttgtcaggggagagatggcctggagagaaaaagagtataaatgtcacaaacaggtcatattcccatggcataaagtgtgaacgtcctcttcaagttgttgatttgggttttcggatggggtgggatagcagagtgtagtgggaaaggggtgggaccaacagtgaaagggtcagtacataaagagggagaagatgaccaacaaaaatataaaagcagcaaatatcatataatgtgatcgtaattatgtaaaattatgtaacatgtgagtgcgtaaaaacaccgagttgtccgtgtagctrtgtagctgccgaattgttaagagtgtccatgctatatctttaagtgagcaaagcaagttgctgcgtaatacatagaggatgcatctccttcggaagacacagacaagtcaaaatcctgagatacacaaactcccccctttccaaatgcccagcttccttatttcagatggtaagcagagacaataaaaagtgtcaaatgatgagaaaatttatattgaggtgtgctatgctccaggttaaatgaacactaaac

SEQ ID NO: 730230 - DNA, 651 bp, Homo sapiens
ggcggtttgattttctttgaacagaagtcagtgttgtgttttctgcatggcatgcatatgtgctacctctggggtaagatgatgcctaccaaagtggcagaccacgaggaatggatacaagtggagagacactggagctggctcgaactgggtgctttatccttgtgtctgtcatgtactgctgagctgtgggaaagctgagattaattacaggaaatggaggtacatcaaaggcaaggaacaggcagctcagagctcctggctgaggagaccaagttgagacacaaatggggatcatgtagaagccaaccatggcagtggtcaaaatggaatgaactgaagccagttggaagaaggtgagcaagttggagtctaacgtgtcaaagagtggccacctgtcaaggaattcaggggctgcattcccaccctggagggaaaaagaagktcaggaaagcaatgcaatgaataatattaaaaacatagatattactgcttttgtaacttaatcaaatgctagcagggagagaaaagaatgagaaagagaaaagagatatgcatcatgaaagatagaaaacggtagaaagagaataagagaggaaggctggaagagagggaatgaaggaagcaagaagacaaaacattaacttaaaa

SEQ ID NO: 730231 - DNA, 663 bp, Homo sapiens
tgccatgtgccaggcaatgttctaaaagcttcacaggcattaaatgtacttcacctttgtaatcattctgtgagactcatccttttactattctttacaagaaaaggaaactgaggctcagagagagtaagtaacatgcccaaggccactcagcgggtaaccaggagagatgagacttatgcccagggaggacttgctgttgacttctctcctctacggcctttcacaatatctctttgtaattattaataattagcaataatataaaccattagtaataatataaacaagaactttctatgcaacattcatttaatcctcaaaatcaccctataaattaagcattatgattattatcatcctcattttcgagatgacaaaatcgcattccaaaagaggttgagyaaattggccaaagcaatatagcttgaaagtgatgccaaatccaggtcactgcctgcttttgtaaataaagttttattggcacagagccacacccatttgcttacaaattatctatggctacttcctctcaacagcagcagagttgagtggttgttgcatggtctgcaaagcctaaaatatttactatttggccctttacagaaaaagtttgctaacctcctaacaatcacgtgttatgcccactccctggctgtgtct

SEQ ID NO: 730232 - DNA, 603 bp, Homo sapiens
gttccataattcgggaaatggggtagtgcttgttttatgggccccagtacttcagttctctagctatgccctttgccggctaacttacttgtatcttcctactctgactgtaggcttgactgtgccacgttgtctactgggatgttagcaagtgtgatgcaaacaaaaacttgaaaaatgcttacctgaatggacttgttcargcttttaccctcagccattgatgtaagaagaaaatgcctaggttagcctgctccacaattacacaggtgtgatatgggaccaagttgtcctagccatcatagttgaggctgtcctagatcagccaaccgatagtcaatcccctaaacatgtcagtgagtccagtccagacaagcagaggctgtaatccctcatggaagctgatcatacgtttattgaagaggaccaactgagatcagcccagctctagcccaggtcatctgtactccacagactggtgagctaaaaaaatgttaaagtttatggcactgagatttggaggttttggttatggagcactgtcctgtcaatagataactgacacggatgagaatatttacttcatagaagttgctttgaaaa

SEQ ID NO: 730233 - DNA, 441 bp, Homo sapiens
aaattagctgggcgtggtgcccggtgcctgtaatcccagctacttgggaggctgaggcagggaaaattgcttgaacctgggaggcgcaggtttcagtgagcagagatccggccactgcactccagcctgggcgacagagggagactctgtctcaaaaaagcaaaacaaacaacaaaagtctttcaaagccgaaaggttcttaggcactgtcttaaagcctagmgctccagctgaagctggtgcctgagtccagatggtgttgaagaaggagcagggcccagcgggcaccactctcagaagtcgggctcaggtgtctcctgcctccgaacccaagaagacccaagaagacagagttcctcaggctcccagtgtccctaggaagtggcaaccttgactcttggccagagttcagagtcctggttattaacaccaataaacctt

SEQ ID NO: 730234 - DNA, 619 bp, Homo sapiens
tgcctgtaatcccagctatacaagaggctgaggcaggagaatcacttgatctgggacgtggaggttgcagcaagccaagatcgtgccactgcactccagcctgggtgacagagtgagactctgtctcaaaaaaaaaaaaaaagaattcaggcakagagaggataggatcagcttatttctgctctatgatgtctggagccacagctggggtgccttgaaaggatgaagatggctgggacggctcacacagggacatatgtctggagctttagttctggctatgggctggttcctatggtccttcctcatacggcatctattagctgaaatgcccatgatgtcttctttaatcacaggtctggttcctggactgggatggctggaatatttgggaactggctgggtacctctctcttgcctcatggcttcttcatgtgactagcttgggctctctcacagcatggcaatctcagggtagaacttctgatattgtgtctagcctttctcagagctagtgttgcaagagacaaggcagaagctccgagtcttcttaaaaggcttcttgaaagtcctgtgtcatcccttctactacatactgttggttatataggaccagccc

SEQ ID NO: 730235 - DNA, 545 bp, Homo sapiens
cccgggttcacaccattctcctgcctcagtctcccgagtagctgggactacaggcgcctgccaccacgcccggctaattttttgtatttttggtagagacggggtttccccgtgttagccaggatggtctcgatctcctgacctcgtgatccgcccgccttggcctcccaaagtgctgggattacaggcgtgagccaccgggcccggccgaggcaggtatttttattgtccccattttacagatgcagaacctgagcccagggaacttaaactcctcacttaagatcatgctatggattgaaatgtgtccttccaaaattcgtgttggattcgtgttgaagccctaacgtgcaatatgactgcatttggaaatrtggcctctaaggaatcaaggctaaatgaaatcagaagggtggaccttgatctgatagaattagtgtcattataaaaagagacaccaaagagctctctctgtctctctctcaaccgtgtgaggacacagcaagaaggcagctgttggctagccagaaagagtggtctcacca

SEQ ID NO: 730236 - DNA, 605 bp, Homo sapiens
ttcaggctgaaacaaaatggttcaagatggaaagtggtgtctatgtgaaggaaggaaggaagctgatagtggtaaatgtataaaaaagtatcgatattatttttagtataattaactgaggcaaaatgattacaatgtattttggtgtttaaaatatatgtagaattaaactgataataggaaatgtgaaagtaagatgcataatagcaaaaaggaaggaaaaagaggagtatactgttttaaggagcttacattatatataaagtggtataaataatttgtaaggaggctgtaataagttaaaaatacatactgtaaatgctagacaatccattaaaaatataaagcaagaattatagctaataagcaagtaaagaagacactggaatagtaaaaagtgtactcagtccaacagaagccagagaaaaagacacaaaggaattaaraagagatggaacaaatagaaaacaaattcagtatggccaaaattatattatgtttaagtggactaaggacattggttaaaagagagattgtcaggctaaagaaaacgaaaaatctcacagtattcaaagagctttaaaaatacattggttaaaataaaa

SEQ ID NO: 730237 - DNA, 577 bp, Homo sapiens
ttaccattttaaaacttagtttgagatgctgatgtaaaatataattatgataaaaattagctagataaccatatccttttaagtgtttattttcccacttattacagtattggcaatttaatatcttacaacagaattagaaaaaaaacatcttatacacacattttatactgccctgtgatactttacttgctcttaatatattcttatgaagtaraatactgctattattattcctctttgctgttgaagataaattttgcatgaatctgtttccaatattctgtgctttgaacttactctcatttaattcatgaatatgctgaaagattagaaagctctttctggctataaaatcgatgatatgaagtcagaaatgatgcgatccttgaaattctgtccatccactttatttatgaactgcaaaggaaaataatatccaaaagcccagaaatattttggcattgaaatgaatatgcaccccattaacatagagataatcgaaaactgttgactaaacacaatggagcagagttggaagaggagatctattcaagcacaaatcatataggagttg

SEQ ID NO: 730238 - DNA, 407 bp, Homo sapiens
aaggttctatttttttctcctctgagctgaagttcctgtgtagagtgagacctcatagtagagtggaagttggaaacatttgtggagatacaggcacttaagcaaaaatcagagaagagctgcaacttctactggctctgacctgaggccagctgtacacatcacaaaaccccagggtaatgtcctctagctccaacyatgttgttgcatatgacaggacctcattctttttatggctgaataatattcctctgcatatgtaccacattttctttattcgtttacccactgagggacatttgggttgattccatatcctggctattgtgagtagtgcttcaataaacatgagattgcagatatctcttcaatatactgatttcctatcttttggaattatttccagc

SEQ ID NO: 730239 - DNA, 584 bp, Homo sapiens
ttcctggctgaaagccacactcggttaaccaggaaaaagcccttggcacgagaagactcagtggcctgagggactgagccttggttgttgggcatgtgctgcataagccatccatgtgtgacagtagagtgtagtccagccactgtgggacatgggtgctgaaagaccacatggagaggaacagtgagtgctgacaagggctagccttgatcactttggagacaccccctgtgtcttctagatgtcagactttccaaatctgtctgctatcctccaaacgtgcattttcaagagcaatggaaaaaggattggacttgatggaatgcagcaagagtcctaggtctgttactacctacctatgaccttaagaaactccttcacccctcagaacccttacagctttctttctgattctatcmtgagttactctactccaagctgagacttttctgcttagatctatcccttcctcctaaacccccaacctccatttctcctggtgtctttctttacacacccctcagcatacacacacacctagccacaggaaccaatgagttaatatttgaggagttggttttctt

SEQ ID NO: 730240 - DNA, 491 bp, Homo sapiens
ccttgaaattttttttaatctgatctgtgaaatccagaagtctgggaatgtcaggagacgtctggtggcattctgtaggtgggagtgtcacggtgtcgtaggaagttcaggaatctgaagtctgtgtcccagccatcctctgttccagacatgctgggtgacagtaggcaaggaatttctatttctgggtttcacttttctagtctctaaaattsagagagcagctttaaagaatcctgagccgacgagggcatgaaggacatggaaagcctgagaggaaagccaaggagtcaggcaggtggacttcccggaggaggggacctggggagctgctctgggcaggctctttgtgaagggagagcagccctgctcagtttctccgtggaaagtctcagggttaccatctccgcctcaaatttttcaaaaagaaacagaaatcatggtttttatgttaaatctctccgttcataaatattagcaaccgctttaat

SEQ ID NO: 730241 - DNA, 628 bp, Homo sapiens
tcactagccatttatcattgtgtttgggtctttcttttcataaagaaaatgagttgtctcctatagtaatgtctctcaaaagtgagaaaacagactgagaattcgagaaaaataagagagagcatctttctttacagtgatgaagatattctaaaatattcayatttattgaacaatttagtgttactttccttgtctctggtcagcacctgagttttctacaccattttggagactttctaatacagtctagtatctgttagtctagtaatatgaactacctaatacagacttaatcagtgcagtttaatgaatcagctgattcaaaacaagattgggcaaaatgagaaccacagcttgctaagcccccagctgcactgtgggtagccatttccaacaagaaaacagttaggtaaaagaagcttttactgtgtctcccccttggaggccttttctcagtatttccatagaaagccaatttctcatttctccattggcccaagactttcaggtaaacacagagtctattgaaatgctgtgaattcccccataaaagctgatgtcctcatccatccatttctatggcccacccctggctttttaaacacgagaacaatcttaagcagtt

SEQ ID NO: 730242 - DNA, 505 bp, Homo sapiens
cagagcttccatgtcctctccaagtgctctatcctcccagcacctccatgtgttcaccaacccagaagctctccaaccccatactggatagatatttatggaggcttcattacataggcatgatttattaaagtattggcctttggtgatttgcccagcctccaggccctcttccctcatcaggagatagasggaagggctgaaaattccaatcctccaattacaaggttggctcccttggcaaccagcccccacccctaaggcaatccaggagaacccagccattagtcacattagcatacaaaatgacatgtcacctcagagattccaagggttttaacagttgtgtgccaggaaactgggcagaaaccacatacatatttcttatcttatcaaactaccccttgaagtactctatttgtcccaagacctctagaagtgtaattttctgtggtctagaagcattcatattatcagttcattattagtgatctgtgtatacctg

SEQ ID NO: 730243 - DNA, 657 bp, Homo sapiens
caaatatttactcccattctgtaagttgtctgtttactctgttgatagtttcttttgctgtgcagaagttcttaagtttaattagatctcatttgtcaatttttgtttttcttgtgattccttttggtgtctttgtcatgaaatatttgcccattcctatgtccaggatggtattgcctaggttgtcttccagggtttttataatttggggttttacatttaagtctttaatccacgctgggttactttttgtatagggtgtaagaaaggggtccagctccagtctgcatatggctagtcagttatcccagcaccattggttaaatagggagtcttttccccattgcttgtttttctcagctttgtcaaagatcagatggtcatacatgtgtggcctgatttcygagctctctattctgtttcattggcctatgatatggtttggctgtgtgtccccacccaaatcttatatcaaattgtaatacccaagtgtcaagggagggatgagatgggaggtgattggatcatgggggtggtctcctccatgctgttctcatgatactgaggaggttctcacaagatctggttgtttgacaagtgtctggcatttcccctgctctctctctctctctcctgctgtcatgtaagacacacctt

SEQ ID NO: 730244 - DNA, 657 bp, Homo sapiens
caaatatttactcccattctgtaagttgtctgtttactctgttgatagtttcttttgctgtgcagaagttcttaagtttaattagatctcatttgtcaatttttgtttttcttgtgattccttttggtgtctttgtcatgaaatatttgcccattcctatgtccaggatggtattgcctaggttgtcttccagggtttttataatttggggttttacatttaagtctttaatccacgctgggttactttttgtatagggtgtaagaaaggggtccagctccagtctgcatatggctagtcagttatcccagcaccattggttaaatagggagtcttttccccattgcttgtttttctcagctttgtcaaagatcagatggtcatacatgtgtggcctgatttccgagctctctattctgtttcattggcctatgatatggtttggctgtgtgtccccacccaaatcttatatcaaattgtaatmcccaagtgtcaagggagggatgagatgggaggtgattggatcatgggggtggtctcctccatgctgttctcatgatactgaggaggttctcacaagatctggttgtttgacaagtgtctggcatttcccctgctctctctctctctctcctgctgtcatgtaagacacacctt

SEQ ID NO: 730245 - DNA, 620 bp, Homo sapiens
ttgctacctcttgtgctaagctgctgccatactgttgtcctaatgaccacaccctccaggatgcagaggtggttttatcttttaggagccatcagggccgtggatgtggcatgccatccacctctgtgagtaagtgcaccacacctgtcagcatgcacagtgggtccgtatagaggcgcgagtcctcttcaccctccagctgagaggattctgtatctagtttactccgtgcagcatcctgatgatgacaagaggagctggaagtgtttctgagacacaattcataagtttctgacagcagggcctggttaaacgaaccatggagctgtcttgctgagaacagcactgcccacgggaaagtggacaggtctgtgcgcttgtgaagggaacaggtcacgtacactaaaggggagcgcgggctccagggaggattcctgagtattcccaytcatgtattctctctgaattgagtacccatacacagggtgtctgcaaagttggaaaccaggacacacctacttttaaactgttagttacattttcaaatgctatattcaacgtgttttcaggcgaatacctaggtaatgagtataattattaaattgaaaaaaggtactaaa

SEQ ID NO: 730246 - DNA, 602 bp, Homo sapiens
tacatatttatggggtacatatgaaattttgatacaagcatacaatgtgtgatgatgaaatgaaggtaactgggatatccactacctcaggcatttatcatatatttgtgttaggaatatttcaaattcactcttcaagttattttgaaatatacgataaattattgatgagtatagtcaccttattatgctaccaaacactgtatcttattttttctatataactgtatttttataaccattaactaaccactcttaatcacccactctyacttacctttctcagattctggtaaccatcattctactccttacctctatgagatcagtttttttttagctctcacatataagtgagaacacgcaatatttgtctttgtgtgcctggtatttcacttaaactaatgacctccagttccattcatgtttttgcaaatgatatgattctattcttcgtatggctaaataacattccattgtatgtaggtaccacattttcttattcattcatctgttgatgtacactggggttaattccacatattggctattgtaaatagtgctgctgtaaacatgggagtgaagacacctctctgatatgc

SEQ ID NO: 730247 - DNA, 589 bp, Homo sapiens
ctcaagttagaaaatcatgagagtttagtgaaggaattattttcaaagcgtgcacaggtttgagggaaatcaatgagggaatgtgaggtttcccagggttagtaacaggggagaagatgtttctgtaacccagggttagtaacaggggagaagatgtttctgtaacttgagggtaaaagaggtcatggaaagagtrgttagtagaaattggggagagaactacatggaaaaggattcctgaaaaaaaaaaaaaaaaaaacaactatgaccttaatgaaatgaaacagccaaccactgttaacactgcagggaggaaccaggtaaataaatactctgatctcacttctccacctgctctctagtatcttacttgagcatcccattggtcttactgtaacctaacccaaagggcagtggagtacactgatgccttccatgaagtttatacttcaagtcacaaagcaaggccctgagcaaatggaagatatgtagcacagattttgctggaacatcattctcatgaaactttagtatcataaaagagtttagaaaggaaaaaaaaaggaaaaaagtcatggaaaagctaatt

SEQ ID NO: 730248 - DNA, 589 bp, Homo sapiens
ctcaagttagaaaatcatgagagtttagtgaaggaattattttcaaagcgtgcacaggtttgagggaaatcaatgagggaatgtgaggtttcccagggttagtaacaggggagaagatgtttctgtaacccagggttagtaacaggggagaagatgtttctgtaacttgagggtaaaagaggtcatggaaagagtggttagtagaaattggggagagaactacatggaaaaggattcctgaaaaaaaaaaaaaaaaaaacaactatgaccttaatgaaatgaaacagccaaccactgttaacactgcagggaggaaccaggtaaataaatactctgatctcacttctccacctgctctctagtatcttacttgagcatcccattggtcttactktaacctaacccaaagggcagtggagtacactgatgccttccatgaagtttatacttcaagtcacaaagcaaggccctgagcaaatggaagatatgtagcacagattttgctggaacatcattctcatgaaactttagtatcataaaagagtttagaaaggaaaaaaaaaggaaaaaagtcatggaaaagctaatt

SEQ ID NO: 730249 - DNA, 462 bp, Homo sapiens
gtgacctaacccaatctcactatcaattacatctcttttcctttgcacaatgacacattgatccctctgattacctctaatgctttgcctctatccagttactaccttactccaatacaaaaaggggagagttaatccacagctagagtagttatcaaggcttatgttcaawactggtatgtcttaaggaaaatgatatgaaaaagaatcaaacagatttagattttgcttctgattcaatcatttaaaaaaaatttatcccaagcatcaaggcctgtttcttaaaatgagaaggatgcctactgcaacttttatgcagtaactaatagtcccaaaattttacagtgaatggaataaaaagaagagagacacagagagagaagaacaagttaatttcattattaccaacacaacctgtgccttcaacactactctcctgttttgtttaaggtatttaacctg

SEQ ID NO: 730250 - DNA, 520 bp, Homo sapiens
cagaagaagaaaactttttggaatctcttgtgtggaaaaaaaaaaattgcatctgctgttcaagctaactatttctttgtggcatgtttatcagtaatatgcccctgaccagcaaaattgtgtccttgaaccagggatataaaatgatactattaagggagccaagccaagtctggtcaaagaaagccatttattttcactgacccagctggtcaagtgaatttaagttcagcagcttggctcacttgrgaatcaggcactgccatcatgcctgtaattacagcatgaaagtgatttccaggaatgaatagtgcaaaggaaacagactatccctggcaacactatacttgagtatgggagtgctggaaaggtaaaaaggaagcatatatttttatgtgattcatctaataaaagcaacttccatttgtatcagttttttaatatataacaaaccaccctaaacttagtgaattaacacaataaacattaattatttgcttggaattctataaattggctg

SEQ ID NO: 730251 - DNA, 604 bp, Homo sapiens
attttacaaacacttcttaggtgcctggtattaagtcttgtcctgggtacctaggttatagcggttaacaaaacagagtaaatctctgttttcatggagctgagaggagagaatacaacctgaataataatataaaacgtgggaaagtttatttagagttgtrggtttccaaccttgcataaaaatcacctttgatacttaaaaatcatatagttttcaaggagtcagccatgggtattctaagtctatgtaacttttatatgggagccaattcttttcattttttacctgctccctaggcaattttgatgaacttggttttgggaacatattttgagaaaaaagaaatgtggacttttaacatttttgaccatttgcagttttctattttgtttcaagggattatcaaatcacaacaacaacaacaaaataaggtcatgtcaggggacctgaatccagctttttttcccctttgttttcgtgtttgtattttttttttccctgagtatttagaaatgtaaccttgggcaagttacttttcatctcatctctgggcctcatctctgtcattcttagatctgattagacaaaatgacagctaatg

SEQ ID NO: 730252 - DNA, 567 bp, Homo sapiens
gacagaatcttcaggttagaaaactcatagtaaaagcaatatgcatcttcacatagtatatactagtatataatattatagaatcttcaggttagaaaacccatagaaaagcaatatgaattttcactccagtcctcttaccatgatgtttgcattgaagtgtttgtggtcattgattgctttgggcctctaaccacctwcttgtttgtcattttttcttttggaatttgggccccagtccaaacacattgcatcaggcatggtttcctgggtgaggaggagagcaggactatcacctcccttgttccacatactatatctccattgatataacctgagaacttgctagatttttgaaaattacatctcacagctgactaatattgaactatagttaaccaacattccattttctgaatgctgaatctcattctggctgttccataatgaatcattggtgctctgttctcaaggacaaggcatttcatttagttcaataaaattgcatcccaaacaatgtgtaggatttgttccaacattctaaccaaattgagatttgttttgata

SEQ ID NO: 730253 - DNA, 567 bp, Homo sapiens
gacagaatcttcaggttagaaaactcatagtaaaagcaatatgcatcttcacatagtatatactagtatataatattatagaatcttcaggttagaaaacccatagaaaagcaatatgaattttcactccagtcctcttaccatgatgtttgcattgaagtgtttgtggtcattgattgctttgggcctctaaccaccttcttgtttgtcattttttcttttggaatttgggccccagtccaaacacattgcatcaggcatggtttcctgggtgaggaggagagcaggactatcacctcccttgttccacatactatatctccattgatataacctgagaacttgctagatttttgaraattacatctcacagctgactaatattgaactatagttaaccaacattccattttctgaatgctgaatctcattctggctgttccataatgaatcattggtgctctgttctcaaggacaaggcatttcatttagttcaataaaattgcatcccaaacaatgtgtaggatttgttccaacattctaaccaaattgagatttgttttgata

SEQ ID NO: 730254 - DNA, 552 bp, Homo sapiens
tccattttccaacttgagactttgacccaagacagcatgagcaaatgcccagatgtatgtagaacgtggagaaagtcaccgtcatttgcaccattggtgggaccagtggagcccagggaaagcccagagtcagttttctgtattagattgcccaggacagcatttttctttcagatttgtctagacattttcaggatctttcccaatcaggcatgattttgtaaagcaaagaccttgttgacttcatcccactgagctggaagagaaggtcttctaaggcagaaagaaaaagagaaaaaaaggaraagagagaacgtttctttgcctagatgtaaaacagaaagttcataaggagcttaactctgctttcgccttgttttgcacctgcctgagggagtggtttagacggggacaagtagtgtgaaaacagagctagttagtaaatgcaagagctggggtttggaccccaatttttacagccaaaacaaaacaaacaaacaaacaaacaaagaccaatgcactttcctcctaagcacaatgcagtattttttc

SEQ ID NO: 730255 - DNA, 574 bp, Homo sapiens
ctctcagttagtaagtgataagtctgcagaagaaaccctggtccgtccaactccaaggaattcacaaccctattctgtttcatcaaatacaggttttctttctctaggtgggttatgttgaaatggtgaaccaggctgaagccacaggttgactgagttctaaatccagaagcacagctagaggctcctgtggaatgagagggactaaaattgcttcaagtgcagtggattactggggttagactcacttctaaaaatgaaacactgaagtggggctttctttttttctttgtttttgagacaggatctcactstgtcacccaggctggagtgcagtggcacaatcttggctcactgcaacttcctcctcctaggttcaggcaattctcccacatcagcctccccagcagctgggactacaggcgcgtgccaccacgccaggctaatttttgtattttttggtacagacagggtttcgccatgttggccaggctggtcttgaactcttgacctcaggtcatctgtaaggtggagcttactaggaaagaacgttgaaaaacagctgctgatgata

SEQ ID NO: 730256 - DNA, 502 bp, Homo sapiens
acaaattaatgagatggaaggatttgtcttgagttggaactaggtcttctaaaagggcagtcagtgtcctgctcatctgatcacccatgttcatattcctgccacattgttttggcccacagcttcgatgagacctagagaatcacttccttttcaaccatacagccaccgstggggccaaccactccctacgtttgtataatgctgtatggttttcaaagcaagtagcacaattcctatttggtagataaggcaattgaggcatattaaatgacttgccctatgaatgatataactgggacttctgattcctaatctaggactctttttgttacaccagacagcctctcaggaaattagaacaaaaaaatgacatattgcaaaattaagtcaaagaataaattaaccccattggaaagtccaaggagaccttcagacaaatgtgtatcagaatttcaatggtatttggcagagttggcctaatggaagtgtggacaccctg

SEQ ID NO: 730257 - DNA, 613 bp, Homo sapiens
ataaataaaaattgcaaagatccttcataaataataaaatattctcatgctattaaaataaaacaaacacatgaagactaaccaatcatctatttttataagtttatcattagtgagccaccagattatagactttttttaaagatgcaattttaatcaacattgactttatttcccttttaaattaagcaggctgtatgtgctaggctccaaatctctgtttagctataataaagagagtaaaatatgcacatacaaaatacgtgcatatttagagattagagattcttgcacattggcttttgtctaccttggctcacaatttcagaaagcccagagcagacaggtgcagtgggctatagactgctattgcttctccaagtgttctgaagaattgtaaacgtaaacaagtatacaagaatagagagygacattttaaaggtaacatttgcacgtattttaatcctttatatttaaagaaaacagccgtgccactgccaatgtgacttactaccacttatgcagagtggctgaaatgaaactttcgagccagatttgattttcgtttttagcccacacttgatctccacatggcagctctggccaccatttc

SEQ ID NO: 730258 - DNA, 613 bp, Homo sapiens
ataaataaaaattgcaaagatccttcataaataataaaatattctcatgctattaaaataaaacaaacacatgaagactaaccaatcatctatttttataagtttatcattagtgagccaccagattatagactttttttaaagatgcaattttaatcaacattgactttatttcccttttaaattaagcaggctgtatgtgctaggctccaaatctctgtttagctataataaagagagtaaaatatgcacatacaaaatacgtgcatatttagagattagagattcttgcacattggcttttgtctaccttggctcacaatttcagaaagcccagagcagacaggtgcagtgggctatagactgctattgcttctccaagtgttctgaagaattgtaaacgtaaacaagtatacaagaatagagagtgmcattttaaaggtaacatttgcacgtattttaatcctttatatttaaagaaaacagccgtgccactgccaatgtgacttactaccacttatgcagagtggctgaaatgaaactttcgagccagatttgattttcgtttttagcccacacttgatctccacatggcagctctggccaccatttc

SEQ ID NO: 730259 - DNA, 613 bp, Homo sapiens
ataaataaaaattgcaaagatccttcataaataataaaatattctcatgctattaaaataaaacaaacacatgaagactaaccaatcatctatttttataagtttatcattagtgagccaccagattatagactttttttaaagatgcaattttaatcaacattgactttatttcccttttaaattaagcaggctgtatgtgctaggctccaaatctctgtttagctataataaagagagtaaaatatgcacatacaaaatacgtgcatatttagagattagagattcttgcacattggcttttgtctaccttggctcacaatttcagaaagcccagagcagacaggtgcagtgggctatagactgctattgcttctccaagtgttctgaagaattgtaaacgtaaacaagtatacaagaatagagagtgacattttaarggtaacatttgcacgtattttaatcctttatatttaaagaaaacagccgtgccactgccaatgtgacttactaccacttatgcagagtggctgaaatgaaactttcgagccagatttgattttcgtttttagcccacacttgatctccacatggcagctctggccaccatttc

SEQ ID NO: 730260 - DNA, 665 bp, Homo sapiens
ttgtggctctgggctcctctggatcctcagagtcctgtccattcagccagtggatggagcgagtgaaaatcaagcacgggaggtttgtatgggccaggctgggaagtggtgttcatgacttccacttcatacttcattggccagaaccaggccacagggccacacctaagtggcgaggtgttacagtaggtagctagtcagacatgaacagggcaggagagggcttccctttccccaccaggaatgtcaggtgatggttaactgtctctctaaaataataattggtcacagccgacaccagggaaaggccgtctcccaacagataggaaaacctgaaaccggtgatcagcagcttcccaatacgatctcaggagttgagtgagtgggctcacgcatgtgcsctaagaggcaaaatggcagcatttaactgctatatgatcttcctctaggaaggcctcaagtgagcatgcatacaacttcagtaaacacactgctcccgcagcccctcccaagtgctggcagaactgcacatgctgacagcccacctcaagggaataatcaggggagaagtaccagcaagacctcagaagtatgccaacacagaaaacttgaagtcaaaggtcaaaccatgcacttgatctctcaagttgtctgcttggccctct

SEQ ID NO: 730261 - DNA, 665 bp, Homo sapiens
ttgtggctctgggctcctctggatcctcagagtcctgtccattcagccagtggatggagcgagtgaaaatcaagcacgggaggtttgtatgggccaggctgggaagtggtgttcatgacttccacttcatacttcattggccagaaccaggccacagggccacacctaagtggcgaggtgttacagtaggtagctagtcagacatgaacagggcaggagagggcttccctttccccaccaggaatgtcaggtgatggttaactgtctctctaaaataataattggtcacagccgacaccagggaaaggccgtctcccaacagataggaaaacctgaaaccggtgatcagcagcttcccaatacgatctcaggagttgagtgagtgggctcacgcatgtgccctaagaggcaaaatggyagcatttaactgctatatgatcttcctctaggaaggcctcaagtgagcatgcatacaacttcagtaaacacactgctcccgcagcccctcccaagtgctggcagaactgcacatgctgacagcccacctcaagggaataatcaggggagaagtaccagcaagacctcagaagtatgccaacacagaaaacttgaagtcaaaggtcaaaccatgcacttgatctctcaagttgtctgcttggccctct

SEQ ID NO: 730262 - DNA, 641 bp, Homo sapiens
ctgatggcctcctcttgccacagactccaatgacacttcccctgggaagttctgcaggaaagaagcccatttagctttgtttgattctgtattttccaagttcacttgactacgaacattttattctatgtggagtcctaataagggaaggggagttaggctggtgggagcaggggaaagtaaaaagaaaaagaagataagctttaaggctgcctttcttcatggtccaggacacgtagccctcctgcacgaataaytcacaatcttcctgcactgacttatcaccagatcctcggctgatagaaaaatgcaagttagctcactgcaatcttggtgttatcagtacagcacatagccctctctagcacaagcaccatcttataaaatccccagcaaacttttgtctccttgcagtcagctcctctgttgctgatctgcccattgcacccttgcaacgtattttcatactttctcctataattctgcctttttttttcacttacaattgtcttggtaaattcctttacccatgtgccaccagccccagctagtcgctacctgcaacattctttatcatactttttactacccattggagtaagctttggagaatactattttagtgtccaggttacttaaaa

SEQ ID NO: 730263 - DNA, 655 bp, Homo sapiens
tccaattcaattcaaaaaccctgatgttgccaaatagaaacgtacgcccttattcattctcaagtagaatgaaataaaattgtctataaaatatttatcagctctaggttagtgtttgaattataatatctcctgcaggctttaaaatgtcctctctctgcttatttcattattgagtaggcagacaaaattttttacttaatgcagtgactataatgtgtttactgggattaatttacacacccttgaggattaatttaattcctttatgatagcaatttttcctgggatatttttcccccaaggggtcacatccaaatttattagactgttatatgggccacaattatttgggtgtaactgaataatttatgtccatgtttgccaagcctggcygcccatcagagttacctggggaatgtcttaaaaatatagatttccacgtccttccccagatccagtgaagcagagtacaacccgagaattcttgcatttaaagatgctccctagcgatttaggtgtagcagcctagttagtggacgagggtttgggaactgatcaatatagtttagtttcgtgtgattttagggtaaaatgttattgctattagctgtagaattttctgttgctaacaccacatgcccttgtcgctttt

SEQ ID NO: 730264 - DNA, 551 bp, Homo sapiens
ggtgcctgtagtcccagctactcgggaggctgaggcaggagaatggcgtgaacccaggaggtggagcttgcaatgagccgagattgcgccactgcactccagcctgggtgacagtgagaggctccgtctcaaaaaaaaaaaaaaaagaaggaatatgatacctgagatagtttaaaataatggaggtattgataaccataaaggttggttccaggactgtagggttgatcatttaaaagcataggacataaggaaaatctcagctatgttgatttagtattccattggaggtggagcttgcaatgagccgagattgcgccmctgcactccagcctgggtgacagtgagaggctccgtctcaaaaaaaaaaaaaaaaagaaggaatatgatacctgagatagtttaaaataatggaggtattgataaccataaaggttggttccaggactgtagggttgatcatttaaaagcataggacataaggaaaatctcagctatgttgatttagtattccattggaggtggagcttgcaatgagccgagattgcgcc

SEQ ID NO: 730265 - DNA, 634 bp, Homo sapiens
gagggaggaagagtatgatactacttccaatatcgcaggcagtgtacaccacactgcgatattgttcctaatatcgagaagggcaaaggatgatattactcccaatatcgaaggtggtgtactctcccccttgatattgtttctaatatccaggggggagaggatgatattactcccaatatagcagggggtgtacacttcctttgtgatgttttttctaatatccaacggggcagaggataatattactcccaatgtcgcaggggtgtccaccccccactgtaatatytttcctaatatccaggggaaatgaggatgatattgctccaatatcgcagaaggtgtattcctccctgtaatatttgttcttatgtccaggtggaagagaaaatgacattactcccaatattgcaggttgtgtgcaacctccgtgatgctgttcctaatattcaaagcgggagagaatgacattactgccaatatcacagggggtgtacaacccccactgtgatattgttcctaatattcagaatgggagaggatgatattactcccaatattgcagggggggtaacaccccctgtgatattgtatttaatatccaggtagggagaggatgatattactcccaata

SEQ ID NO: 730266 - DNA, 630 bp, Homo sapiens
atgaatacccaaagcgacattgggagtaatattatcctctcttcccctgaatactacaaggaatgtcacagaggggtgtacccccgctgagatattgggagtaatttcatcctctcccctcttggatatttcgaacaatatcacaagacagtgaccaccccctgtgatatttgcatttatatcatcctcttcacccctaaatattatgaaaaatatcacagaggggtgtacaacccttgsgatattgggagtaatattatcctctcccctccctggaaattacaaacaatattacggtggtggtgtacatcctttgtgatattgagaataatagaaatttctccatcttggatattaggaacaatatcacaaggggggctgtacaccccctgcgatattggaagtaatactattctctcttcctttggatgttaggaacaatatcacaagggcgtatgcacttcctgcgatattagaagtaatatcatcctctcctaccctggatatcaggaacaatatgacaaaaggagtgtacaccttctgtgatattgggagtaatttcatcgtctccacccctggatattaggaaaaatatcaaaaaaaagttttcaccccctgcgatattgggag

SEQ ID NO: 730267 - DNA, 644 bp, Homo sapiens
gattatgtcattttcaaacaaagttttatttcttcctttctaatctagatgtctttttttcttgcctaattgccctaaatagaaccgccagtactagctagaggtgttgttgaataggtgtgataagatcacacatccttctcttgttccttcttctaggaggaaagctttcagttttgtatatgtcttttatgtttacctatgtcattacctttgcaactgttctttatttcttcatatgatctcttactagcattctttcatttcagtctgtaggacttctcttagtattttctgtagggcagttatgctaayaataaattctctcagtttttattatctagaattgtctcaattcctccttcatttttgaaggatacttttgctggttgtagaatccttgactgacagcccttttctttctgcattttgagtatatcgttccagtgtcttctggcctccatggttttgaggagatatcagctgttaaacttattgaggatcctttgtccttaatgagttgcttttctcttgctactttcaagattctctcttaagttgttgttgttttatctggtctttgacttttgacagtttgatcatcatgtacctaagtatggatgtctttgagtttatcctacttg

SEQ ID NO: 730268 - DNA, 621 bp, Homo sapiens
attcaagggcaggaaggatccagcaatggagaaagatgtaggctgggaggctaagccagtctagtctgttcacatttttctgcctgcttttattctggctgcactgacagctgattagattgtgcccacccagattgagggtgggtctgcctttcccagtccactgactcaaatgttaatctcctttgacaacaccctcacagacacacccaggaacaatactttgcatccttcaatccagtcaagttgacactcaatattaacaatcacaatagattacagacttaaatgcaagacatgacactttgaactagtagaagaaaatatttgggaaacacttcagaacattggtctgggcaaagattttttgggtaagacctcaaaagcacaggcaacaaaaacaaayagacaaatgtgatcatatgaatctaaaaagcttctgcacaagaaagaaacaaatcaacaaagtgaagagacaacctacagaatgagaaaaaatatttgcaaattatccatctgacaagggattagtaactggaatatataaagaactttactcaatagcaaaaaaaaaaaaaaaaaaaaaacaaaaaaaaaaaaaccaaaatcattctattaaaa

SEQ ID NO: 730269 - DNA, 538 bp, Homo sapiens
attaaaaaatgctcaacatcactaatcatccaggaaatgcaagtcaaaaccatggtaagatatcatctcactgctgctaacatgtgtaattctttttatacattgttggattcgatttgatattttgttgaggattttgcatctaggtttgtgagcaatattaatctgtataattttttgtttcttaatttcttcttttttttcttctttctcttttctttgatttcttgtaatgtctctgtctgtatgtggcattagggtaccgctggcctcataaaatgagttayggaatattccccctgcttctgtctttcaaaagacacagaagaaaattggtataatttcttccttaaatgtttggtaggattcatcagtgagccaactggggtcttggctttctgttttggaaggttattaatgattgtttaatagatataggcctatttggattatctactagcactttccttttcttcctttctttccccttctcatatcttttggatagatggaaggtgaatgatggtatataaatgtg

SEQ ID NO: 730270 - DNA, 529 bp, Homo sapiens
ctctgtgtccccacccaaatctcaccttgaattgtaatatgaattgtaatccccacgtgttgggggaaggacctcatgggaggtgattagattacgggagcagttcccccatgctgttttcgtgacagtgagtgagttctcctgagatctgatggttttataaagggctttccccccctttccttggcgtgtctccttcctgacgtcatgtgaaaaaggatgtctttgcttccctttccgccatgataatatgtttcctgaagcctccccagccctgcagaactgtgagtcaaacctctttcctttataaattacccagtcttgggcrtgtccttagagcagcatgagaacaaactaatactattgtaaattaaagaaaagttattagaggtggcacatgcctgtagccccagctactgggaaggctgaggcaggaggatcacttgagcccaggaggttaaggctgcagtgggctgtgttcatgccactgaactccagcctgggcaacagagaaagatcctgtctcaaa

SEQ ID NO: 730271 - DNA, 529 bp, Homo sapiens
ctctgtgtccccacccaaatctcaccttgaattgtaatatgaattgtaatccccacgtgttgggggaaggacctcatgggaggtgattagattacgggagcagttcccccatgctgttttcgtgacagtgagtgagttctcctgagatctgatggttttataaagggctttccccccctttccttggcgtgtctccttcctgacgtcatgtgaaaaaggatgtctttgcttccctttccgccatgataatatgtttcctgaagcctccccagccctgcagaactgtgagtcaaacctctttcctttataaattacccagtcttgggcatgtccttagagcagcatgagaacaaactaatactaytgtaaattaaagaaaagttattagaggtggcacatgcctgtagccccagctactgggaaggctgaggcaggaggatcacttgagcccaggaggttaaggctgcagtgggctgtgttcatgccactgaactccagcctgggcaacagagaaagatcctgtctcaaa

SEQ ID NO: 730272 - DNA, 577 bp, Homo sapiens
cattgcctaggctggagtgcagtgggtgatctcagctcactgcaacctccacttcctgagttcaagcaattctcctgcctcagcctcctgagtagctggaattacaagcgtgcaccaccacgtccggctcatttttgtatttttagtagacatgaggtttcactatgttggccaggctggtatcaaactcctgacctcaggtgatctgcctgcctctgcctcccgaagtgctgggattacaggtgtgagccaccacgcctggcccatatgtcaatcattctttcatgtacttggtctgtcttggtcctactgtgtgtctaaccttgtgacaagcgctgatgacgcagacctgaagacatgaaacagacacaatccctgccctctgagaccttacaaccaagtgagcaagacagccaccaacccacccccrgaagtgacagtaaagataagtcagttccctggggtcagggatggcttcctggaggaggtgacctctgaccagtgcctgaatcaatgcagaaaaacatgcaggtggaagggacagcatgagcaaatacctggaggtggcgtgggagtg

SEQ ID NO: 730273 - DNA, 615 bp, Homo sapiens
cttcctccccctaatatttattgagcaggctcagagaggttaagtgacttgtccaaaatcacgcagcttggctacatcctggggctagcccacagaaatatacacacagtgacagcccccatggagcctatattctagtagggagagttagacaaaaagaagtaacagacaaactcaatgtaaactgtactaaatgtcatagaaaaccaatgagagatcaaggttgtgacatttgggggtacactaggtgctaagaagtgcccagccatgggaagaacattatcggcagaaggatctgcaagtgcaaaggcactgaggtaggaaagaatgtggctggctccaggaacttgagaacagcatggcgtaatacagtgagcaaatggaggaatagtagaaggtgaaggcacggaaatcacacatctacaccacatgggacctcacggtttygggtgaggaaggtagattgttccaaaggaaatgggaagtcatcattggagggtttcatcttaagagtggcttaatccagtttacattttcagttcaggccaggagttggggaatgggtgggatcagcaggggtcacagtcccttggtgcttaaaaagtagatgcattt

SEQ ID NO: 730274 - DNA, 524 bp, Homo sapiens
ctatggactcgctctgaattctttcttgcatgagattcaagaaccctcttttggggtctgcatctggacccctttcaggtaacactttcttggtttgtgtccttccctgcctcagttccccactaccttagcagggtttcccgggattacttcctaaatcaactatttgaatccttgtatggggaacccaaacccagacgrcaagtttcttaacctcttgcatcctggttcctctggatgggtgaattccaggagttaacagagacacagcactcacagcagtgtctggaggtatgtttggttaatacataaaaaataaagagacaaagaaactttatttatacaaaactccaccccttctgttccactctcctcagcaaacacagataacaggtgatgaaactaaaacacacagacgagcattactcaacccaaggttcccgccttccctagcacctgaggtctgggccaacatgcagggtaactggtgccttatgcctgctgtctggattgcccggcccaca

SEQ ID NO: 730275 - DNA, 601 bp, Homo sapiens
tgactttccaagatttttgttagtttctcctttgatccttacagtaaaacatctttgctgtgaagttgaacttaggaatcacagtcacaccacatttacctatgtgtgatttatacagttgggtcactaagtaggaagaaaacatacattccaaaaacaagaatttagatgaaaaatgaatttgagaawagaagtagaatatcaacttttgacatagtgttgaagcttttggttatgagggatggggctgacaagtcactcgtacttttacatttttaattaatgtgctcattaggaaaaaaattggaaaattcagaaaaataaaaggaaaaagttacccacaatcctatcattctaagatagataaccactgtttattaacattttggtgcatttccttccagtttcttttttttatatacttgaggtcatagtatgtgaacaactttatagcttgttttgtaccctcaacatttaacaggagataaataaggcctttaaaattatttgaggtttgacggttatttgcttcacaaaacagaaagtggaatgttcttagcacttttttgaagataccttcaccctagtgacttcatctaca

SEQ ID NO: 730276 - DNA, 628 bp, Homo sapiens
agtagtagcaagacacacaagaacgagccccagggtagcagattgctggcagagagtcacagggccttcctagtggtcatccatgcttcatgcccctcctgcatgcgggccagctccaagttgtttcaaacctttgtctttttaaggtcctagttttgcmtgaatcttattttctattaaagaaacaactcagaattactggacttgaaacttgtaggccaaatgcaaatttgaggaaatggaaggtcaaatacgctgacaaattcataattttaagtggaggatgccaaagggaaaaaaaaaagttctatcttttcaactaaaaatattataccactctctggagatcagggattgcatgctttggggctctgaattacaggtatctagctatcacattttaaaatggaagtgttcagttcattcagtattaattgaaaataatttttcaatgtattgaaaaaataactagattttacaggaaaacaaaaatgaataataatgatctttacccttctcagtgcctttactcagtagaggaagatggatgtacaagttgtagaatcataggcaagttaatttaaaagcaaggaaggagaaagtagttctggcaagagacagaataatg

SEQ ID NO: 730277 - DNA, 602 bp, Homo sapiens
tttttatgatttctcacttcccacacaggccattgggtctggcaagagctgggaccttgctgaaaaatgtgaaggctcagattattttatttatttttatttatttatttatttatttatttatttatttatttatttatttttgagacagagtcttgctttgtcgcccaggctggcgtgcagtggcgcaatcttgactcactgcaagctctgcctcccaggttcatgccattctcctgcctcagcctcccaagtagctgggactacaggcgcccaccatcactcctggctaattttttttttgtatttttagtagagacggggtttcaccgtgttagccaggatggtctcgatctcctgacctygtgatacgcccgccttggcctcccaaagtgctgggattacaggcgtgagccaccgcgcctggccagattatttttaaaggtgcttattatgataggtggacctcagtttccttatctgtaaaatagaggtcatacccctatttgtggcactgttgtgatggttggagattgaatatatagagatatatgagtatgactgagcatggtggctattgcatcatttcttcaccgcccgcc

SEQ ID NO: 730278 - DNA, 602 bp, Homo sapiens
tttttatgatttctcacttcccacacaggccattgggtctggcaagagctgggaccttgctgaaaaatgtgaaggctcagattattttatttatttttatttatttatttatttatttatttatttatttatttatttatttttgagacagagtcttgctttgtcgcccaggctggcgtgcagtggcgcaatcttgactcactgcaagctctgcctcccaggttcatgccattctcctgcctcagcctcccaagtagctgggactacaggcgcccaccatcactcctggctaattttttttttgtatttttagtagagacggggtttcaccgtgttagccaggatggtctcgatctcctgacctcgtgatmcgcccgccttggcctcccaaagtgctgggattacaggcgtgagccaccgcgcctggccagattatttttaaaggtgcttattatgataggtggacctcagtttccttatctgtaaaatagaggtcatacccctatttgtggcactgttgtgatggttggagattgaatatatagagatatatgagtatgactgagcatggtggctattgcatcatttcttcaccgcccgcc

SEQ ID NO: 730279 - DNA, 688 bp, Homo sapiens
atcacatctgctttgtttctgattatatctatcacttctttagtagttagacacttattttccatctctaacaagaataaataagccattttgtttataacccccagttaactcaccaactgtttagtgttttgacacatttgtttttttgtttcacttgattttttttttttttttttttttttttttttgagacaaggcttcgctcagtcacccaractggagtacagtggtgtgatcttggctcactgcagcctcaacttcctgggctcaagcgatcctcagcctcttgaatagctgggactaacaggtgtgtgccaccacgtcctgctaatttatttttattttttgtagaaatgggggtctcactatgttactcaagcttgtcttgaactcctgggatcaagcaatcctcctgcctcagcctcccaaagtgctgggattacaggcatgagccatcgtggctggctttcaccctacctcttatctgtctgtcttatctatccatctatcatctaactccatttctgttgttttgttttgcttgaaccattttcagtagatgaaagacatcttgacctttctcccataaatacttgacagtttcctgcccaaatgcagtgccatgatcacccagggatttcacattaattcagcgatgtcatctaagattcagctcataatcaga

SEQ ID NO: 730280 - DNA, 688 bp, Homo sapiens
atcacatctgctttgtttctgattatatctatcacttctttagtagttagacacttattttccatctctaacaagaataaataagccattttgtttataacccccagttaactcaccaactgtttagtgttttgacacatttgtttttttgtttcacttgattttttttttttttttttttttttttttttgagacaaggcttcgctcagtcacccagactggagtacagtggtgtgatcttggctcactgcagcctcaacttcctgggctcaagcgatcctcagcctcttgaatagctgggactaacaggtgtgtgccaccacgtcctgctaatttatttttattttttgtaraaatgggggtctcactatgttactcaagcttgtcttgaactcctgggatcaagcaatcctcctgcctcagcctcccaaagtgctgggattacaggcatgagccatcgtggctggctttcaccctacctcttatctgtctgtcttatctatccatctatcatctaactccatttctgttgttttgttttgcttgaaccattttcagtagatgaaagacatcttgacctttctcccataaatacttgacagtttcctgcccaaatgcagtgccatgatcacccagggatttcacattaattcagcgatgtcatctaagattcagctcataatcaga

SEQ ID NO: 730281 - DNA, 588 bp, Homo sapiens
ttaattataaagcttcaaaaatacttagtaaaaaaacttacagattaactacaagagacttttcaggagaaaaaagccatacaaaagcaaaaaaaaaaaaaaaaatgagaggagagacagaaactatccttgaataacattttaaaggtaagattacttactaacattattttccaaaattacrttgtcaaattagcattgacttcctactaatatcctgaagccatctcactaaaaattatgctttcaaaacaaattaatgagctgaattcattttctataagtgtatgtttggacttacttcgttaatttttttgacatggaattgttagctttcaatgctactgcaaaggcttccttgtattcttctaatttggttgtaacctcttcataagtagttttcattttggagaatttacattccacatctttaagtgtgagttccttcttatttagtgaagccgtattacccttgtttaactgctctaattgtttttcatattgtgtttatttctaaaacaaatgaaaagaatatatttttaaaacaattataacctaattattatatgtttgttgcctttcattttg

SEQ ID NO: 730282 - DNA, 568 bp, Homo sapiens
aaatggtagaacaaaagtcacaatataaaaaaaaagtacattataaagatagtaaaatggaaataattaattataatgaaagtacaaaatcaagcttctgccaaaattagtatcctaaaacatgttatataattcaaccagctacagaataactgttgacatgttaaattccatacatacttgactttccacttgaaataatttcctctttgaggcccgtgtctcttccaaattaatgtgacatcatgtaccttccagtggagactctaacatagttaattttttaagggaatcagccacttcttgttgaagttgtctcacaaccacctgataaaatatttttgttactgmttttataaattgccttattattaaattatgttaataacatttaactctaacatacctactttgaaaattatctcacacacatcaattcgccttcttttcatcacaggtacacatttttatttattactgaattcagtgagggatgcagaatgtgttatcctcctgccaaattggtattctcttatacaacagattcatcccaccattcaatcatctt

SEQ ID NO: 730283 - DNA, 585 bp, Homo sapiens
cagaggcgctcctcacttcccagatgggacagcctggcagaggtgctccccacatcccagacggggcggctgggcagaggcgctcctcacttcctaaacagggtggcggccgggcagaggtgctcctcacttcccagacagggcagccgggcagatgcgctcctcacttcccagacagggcagccgggcagaggtgctcctcacttcctaggtggggtggtggccaggcagaggcgctcctcacttcccacatggggcagctgggcagaggcactccccacatcccagacggggcggtcgggcagaggtgctcctcactttccatttggggcagccgggcagaggygctcctcacttcctcccagacgtggggcggccgggcagtggtgctcctcacctcccagatggggcagccgggcagaggcgctcctcacttcccagacgatgggaggccgggcagagtctctcctcacatcccagacagggcagccagacagaggcgctcctcacatcccagaggatgggcggtcaggcagagacgctcctcacttcctagacggggtggcggctgggcagaggtgctcc

SEQ ID NO: 730284 - DNA, 516 bp, Homo sapiens
ctgcgcccgcagagaacgctgggatgccagcggcgcccgcggaggcctcaccccctacctcggccgctccagggggcgggcctgcatctgggccacctcttttgcatattggcacccacaatccaccgcggctatgaggccagtatraggcggtaaaattacgataagatatgggattttacgtgatcgaagacatcaaagtaagcgtaagcacgaaagttgttctgcaacataccactgtaggaaattatgctaaatatgaaaccgaccataagttatcctaaccaaaagatgatttgattgaagggcttaaaataggtgtgacagtaacccttgagtcgtgctcgcttcggcagcacatatactaaaattggaacgatacagagaagattagcatggcccctgcgcaaggatgacacgcaaattcgtgaagcgttccatatttttgctgtagtctacagctcgtcacctcgtttggcttctcttgcccggatcctgccatgacgtcacagggcc

SEQ ID NO: 730285 - DNA, 582 bp, Homo sapiens
agaagaatcgcttgaacccaggagttggaggttgtggtgtgctgagatcacaccattgcactccagcctgggcaacaaggtcaaaacaccatctcaaagaaaaaataaataaataaaaataaataaacaaataaaattgtgtctttaagcacaaaatcagaatcttagggaaaaaatgcttcgtcaagttgattactttttccctccaaatttaaaatattggctcacagaaagtgttgcaatgagaaccgatggtgaggtcacactagaaagagatcaccccccaggaggaacggaagagytcaatagctgatcagaaaacggtcacttactcttttcttttttttttaaaccacacatatacaagccttccgataagtctaggcctcagagtttgatgactcactaccacctccagaaaaatttaaaaatttaaccatcactacttaaaactctagcaaagccacacgaacacattaagtaaaccgaggaaaaaacggcaagtgggccacacaaggctctccctgcggggataaggctgttaatttgtcgacataacgggattcttttagaagtaaaagg

SEQ ID NO: 730286 - DNA, 437 bp, Homo sapiens
gcatacaacaaacgccattatttattttgatgtgtttccaaaaatcaaaacgttttcaaacacaactaagatataaaatacagcataaaatgagatttagatctgtttcccacataaagcaaaaaaatcttagaaattgttttgccagaatcaattggtagatcccacttatcctcccctccctgcaaaggcatcttcccgaatcaggccctagcccacccagggccaggagaaacaggaacacccactaggacggaggcgctgctggtgcaraactggtgctgactgctcacgtggcctcctttggtccaccctactttccaccaatcagccaaccaaccttgaccacagagaaaccgtgacttggccaaggtcatttgatgggggctgtcatacggcactaacagggagcgaggtgtggaccaagagacagccct

SEQ ID NO: 730287 - DNA, 612 bp, Homo sapiens
tatattatggcttcttcaacctcacctcttatttaaaacaaaacattaccatactgaattatctactactcaactagcaataatgagagggaaatcagtgatacaactcattaacttctcttaaaaggtccccattttatatatcactatttatgactttctctgaagaaaaagtaatactacattttctcaccaaaaatgtccttacaattccatttcatttaaaaaataaatatagagcaaacytcaaaagcagaatttggactatgccttcaataaaaacaaatacaactttaggcaaagtttactggttgccaaagaaaggcaagtcattattataagttgattctacagcttactttaaattattatcttgaacgcttaagatacaggccttacttaacccccacaacttcttggctatgtatataatacccaagttttaacttttataacacctaataaaactactacagtattacttctactaatagttaagaatatatgccaaagtatcctttctggattggcaaataggaacacctaagaaagtacaggaatagctcttgcaatgatgaatgtttttaacaaaaacatgacattgaaattttt

SEQ ID NO: 730288 - DNA, 586 bp, Homo sapiens
gaggagaggataagaccagccaactacaatctcagaaagttagttgctgaagtcagcacagggtgctgagaagacagggtcagcactttgtcctcaaatgccaggctgaggagtttggacttggtccagagagcagacttaagagacccatggaagagttctgagcagagtaamctggaaggacccaagtatccagaactgagggtggaagagattctttgcacacagcccagtcttcttgctgtggcctttgagagacctgccaccctctccagccttactcatcccttcctctcatgctcatatcaaaaccatttgtcccccaaatgtgatgatctaaggggaaatcctcaatcaggctggctggaatggatggataagtgttgtggctactagcccagggagaggtttgggagtctaagtggcccagtttaaggtggacatggtgagaacaatgggcagagctttcaggcctgactgtccccctccaccccccagtcagtcccatccttgggcaggtcactttgagaccaggaaaggcaacactgaggtatgctaaagtgagatcatttgaggattaacatat

SEQ ID NO: 730289 - DNA, 575 bp, Homo sapiens
gagtcctagtttgtttgattctgccaagacacaacccaagaaacctggtacatctctcgtgatcataacatatattcttagtttaagactctcagtctcagaggaaaatcaatgatgaaagtcatgcctaatggcccagtcctttttctttcaacaaagtgtgaatgtattcatgtatggtcatttgttgtacgtaatcatcatcaacctgccagataaacagctaattattttggwtgtgttataagcaaataaacttgcccatgtgcaatttgacaaatagggcccaatcaacagagaaacaattgttccaagcttgcaaactcccaggagtctaatgagcaatggcttactgaatgagcaattgaaaaacaaagaaattacattagtgtggtttctttaggaataaagagcaatccattggctttcatgcctttgtaataaagaaatttgttagctgtggattgggcagtagaaaaagcacacagagaatgcatatacctttaacctgactgtttctgacactacaacacttccggggcacatcctctctcattgccctctgggactacata

SEQ ID NO: 730290 - DNA, 644 bp, Homo sapiens
tatatcaaacttaattctaactatattaaattactaaatacacaattcaagcatttatttattatctatatttgttttttgagaaaggatctcactctgtcacccaggctggagaggaatggtgcaagcttggctcactgcagcctcaatctcctgggctcaartgattctcctatctcaggccccaagtaactgggattacaggcacacaccaccaagcccggctaattgtgtgtgtgtgtgtgtgtgtgtgtgtgtgcatttttcatagtgatggagctttacgatgttgtccaggctggtctcaagctcctgagctcaagcaatccacctgcctcgcctcctaaaatgccaggattacaggtgtgagccaccacgcccagtccaaacatatttttttaaactaaaaagcaaatatacgtaatgaatacatcatggaggggctagacttttctattcatgcaataaaataacataggaaaaattgagagttttgactccagagtattagaaatttttcatacactgaaaaataaaaatcaattcaaagatcaactgaattgatagactacagctctacgtgtgttaacacagtttgagagagctgttttcttaccttttctacaccatgcacacattcagcc

SEQ ID NO: 730291 - DNA, 582 bp, Homo sapiens
actcggaatattaatgcctcccactcatgattattttaatgagatattccataaattctccatcaagccataattccctttatagtacttatttataagggtgtgtttctacaaagtatttttggaaattaaatcattttcctcttcattgcttccaaatggagatttctctcttttaagaagtcagcaagatgaagtcaaaaaatttaacctctcggggtcttattatgctcacttgagtttctkcaacacagggattagcaagtttttctttcaagggcaagctagcaaatattttaggtggtttggaccaccaactccctgctgtagctacttaactttgcttcatacagctaaagcagccatagacaatatataaatgaatggatgggggtgctgagtcccaataatacaggccacaggctgaattgggcacaggggttatagtttgctgactcgtgttctacaaaatcctattcagatgcttttcctagttatctatggaccctctaaacacaggaatctcacaatatcttgtaaagtctttttttgtttatttgtttttaatttgaggatctatct

SEQ ID NO: 730292 - DNA, 582 bp, Homo sapiens
actcggaatattaatgcctcccactcatgattattttaatgagatattccataaattctccatcaagccataattccctttatagtacttatttataagggtgtgtttctacaaagtatttttggaaattaaatcattttcctcttcattgcttccaaatggagatttctctcttttaagaagtcagcaagatgaagtcaaaaaatttaacctctcggggtcttattatgctcacttgagtttctgcaacacagggattagcaagtttttctttcaagggcaagctagcaaatattttaggtggtttggaccaccaastccctgctgtagctacttaactttgcttcatacagctaaagcagccatagacaatatataaatgaatggatgggggtgctgagtcccaataatacaggccacaggctgaattgggcacaggggttatagtttgctgactcgtgttctacaaaatcctattcagatgcttttcctagttatctatggaccctctaaacacaggaatctcacaatatcttgtaaagtctttttttgtttatttgtttttaatttgaggatctatct

SEQ ID NO: 730293 - DNA, 525 bp, Homo sapiens
atgccatgaatgtgggtacaaacctctcctgctgcaccataggcttctggaagcagggattgttcatagctatcattgtgtcagcaaaatctctcaccatgaatgacaccaagcagttatgaacaaatgcctgatgagtggctggaaagttttcattctttactggtttaagaaatattaatttattggtttgtttgtttaaaatatttgttggcactttgcagatgccacttccactgatgtcaccactgccagtgatggtcacctccaccttgttctttaactttgtagtcaacggtgagcacttgggccatgtctccttccagctgtttgcaaagttccaaagacarcagaaaatgttcattttgtgagcactggagagaaaggatttggctataagtgttcctgttttcacagaattattccagggtttatatgccagagtggtgacttcacatgtcatgatgacactggcacaagtccaactactgggagaagtctgatgatgataactccatcctgaag

SEQ ID NO: 730294 - DNA, 503 bp, Homo sapiens
gtctcggctcactgctgggctcaagtgatcctcccacctcagcctccggggtagctgggactataggtgtgcaccaccacacccagctaatttttgtagagatggagttttgccatgttgtccaggctggtcttgaactcctgagctcaagtgatccaactgtcttggcctcccaaagtgctgggattacaggcgtgagccactgtgcctggcctgttttgttaatatgtatgtatttccctgtgctttggaaccaatttttccactttactgacattttgttttctttccttggaaacttaagtctttcaaataatggccagtttctctaacatttctttccmccttaagatccttacagactttgaaaagaaaaaaaaaatacactcataataatcattcttattatcttattatcatttttaccttagtttaatcttatccaaactaggtcgtgacaatttagggaatacttccgaagacttgctctggtattttatttt

SEQ ID NO: 730295 - DNA, 618 bp, Homo sapiens
atacagagagtgaagtattaccttatgtaggaatgttcagtgaccaaaatgggaaaattacaaatatctgttgctttaaattctttaatttttggcaaattgaatattatgcactttttgtatttttattataaataatttgtttcagtactatgacttatttcagtataaatgaaataagttgaggagggttatttaaaatggtaaacatttaaccatctaatggttaattaaaatgaggaattcaagtttgaacataaccattaaagtctttttttttttttttttttttgacagagtctcgctctgtcaccaggctggagtgcagtggtgcgatcttggctcactgcaacctctgcctmccaggttcaagtgattctcctgcctcagcctcctgagtagcttggatgacaggcaggtaccaccatgcctggccaagttttgtatttttagtagagacgggatttcagcatgttggtcaggctggtctcgaactcctgacctcgtgatctacctgcctcggcctcccaaagtgctgggattacaggcatgagccactgcgcctggccccattaaagtcttttaattcaatgaagggttcactcagccttatttgaa

SEQ ID NO: 730296 - DNA, 615 bp, Homo sapiens
ccatggtgcacgctgtcagtggatctaccattcattctggggtctggaggatggtggccctcttctcacagctccactaggcggtgccccagtggggactctgtttgggcgctctgaccccacatttcccttctgtactgccctagcagaagttctctttgagagcccygcccctgcagcaaacttctgcctgggcatccaggcatttccatacatcttctgaaatctaggtggaggttcccaaaccccatttcttgacttctgtgtatttgcaggctcaacaccatgtggaaactgccaaggcttggggcttgcaccctctgaagccacaggcaagttctaccttggcccctttcagccatggctggagcagctgcaatgtagggcaccaagtccctaggctgcacacagcacaaggaccgtgggcccagcccatgaaaccattttttcctcctaggcctccaggcctgtgatgggaggggctgcccagaagacctctgatatgccctggagacgttttccctattgtcttggggattaacatttggctccttgttacttaagcagatttctgcagctggctttaacttctcctcagaaaattggattttcttt

SEQ ID NO: 730297 - DNA, 638 bp, Homo sapiens
tactctgtcctaccataattatacaattaataatgattactattatttaagaagaaaaccacaaataaataaataaatatcaaagttatcccttcaggacatctctccttagtgatatgcttttaacagtagaaaacacaaataatagaatcttggttttggaagaaattttggatatccttgaagaatagagatgagagaaccacatcttgatgaagataaaaatgaacgatgatgcaatggtgcgagaactatgaactgggactatttagtcagatgggaggtgtggaaggtgctgccraaggcaatcacaaagctgttccagaaacaaaatgtatgcctaatggaaaaagctaatggcccaggcattttctaaagctacatcctgctaaaaatcagcgcatctggtaaatggttgacttgtgttcaagacaatttcatttttcaaattttagagacagcaataaattcagttacgaagactgcagagggttgatgaagagaaactgacagaaaccttgggaacatgacattttagaatgtttaacagtcaaaaaagcttgtattgggcataggcattaaggtcactagtgtttgaaaaagttaacagtcaaaaactccaaagaaactagactggc

SEQ ID NO: 730298 - DNA, 638 bp, Homo sapiens
tactctgtcctaccataattatacaattaataatgattactattatttaagaagaaaaccacaaataaataaataaatatcaaagttatcccttcaggacatctctccttagtgatatgcttttaacagtagaaaacacaaataatagaatcttggttttggaagaaattttggatatccttgaagaatagagatgagagaaccacatcttgatgaagataaaaatgaacgatgatgcaatggtgcgagaactatgaactgggactatttagtcagatgggaggtgtggaaggtgctgccaaaggcaatcacaaagctgttccagmaacaaaatgtatgcctaatggaaaaagctaatggcccaggcattttctaaagctacatcctgctaaaaatcagcgcatctggtaaatggttgacttgtgttcaagacaatttcatttttcaaattttagagacagcaataaattcagttacgaagactgcagagggttgatgaagagaaactgacagaaaccttgggaacatgacattttagaatgtttaacagtcaaaaaagcttgtattgggcataggcattaaggtcactagtgtttgaaaaagttaacagtcaaaaactccaaagaaactagactggc

SEQ ID NO: 730299 - DNA, 637 bp, Homo sapiens
cgcagatcttcattgctcttgtatttaattttgttgtatcattctccctctcccctactgaggaggctggggtacctggcttcatagcaagccacactaccatagagttcccaggagtcatgggcaacacttacgattggcaactttcagaggcactctagcctgggcgacagagcaagactcgtctcaaaaaaaaaaaaaaaaaaaaaaaagaaagcaatatgatcacacttgtagattctctgaaccttccttctctagggtttcttccacagattgatgacaagagacaggcctgggaggcaccatgggwctattaaaaacttgattctacctaagatttgatagattaaatttgtgggaaagttgataggcaagtaccaaacagatactcttgagttcgtgggctcagtttttcttaaaatgtatatagaataaaccctttcctttcctgtatgatctcattgtcctttccagaaattatgccttaactacaagtcccttgctgaccaaaacattgcttgctttctgaatcatatttatctagtaatatttattcaacatgataatgctcaggacatgctaccccacaatgtggtaccttggcatttgagaaaagagtagaagcagcaaagtc

SEQ ID NO: 730300 - DNA, 637 bp, Homo sapiens
cgcagatcttcattgctcttgtatttaattttgttgtatcattctccctctcccctactgaggaggctggggtacctggcttcatagcaagccacactaccatagagttcccaggagtcatgggcaacacttacgattggcaactttcagaggcactctagcctgggcgacagagcaagactcgtctcaaaaaaaaaaaaaaaaaaaaaaaagaaagcaatatgatcacacttgtagattctctgaaccttccttctctagggtttcttccacagattgatgacaagagacaggcctgggaggcaccatgggtctattaaaaacttgattctacctragatttgatagattaaatttgtgggaaagttgataggcaagtaccaaacagatactcttgagttcgtgggctcagtttttcttaaaatgtatatagaataaaccctttcctttcctgtatgatctcattgtcctttccagaaattatgccttaactacaagtcccttgctgaccaaaacattgcttgctttctgaatcatatttatctagtaatatttattcaacatgataatgctcaggacatgctaccccacaatgtggtaccttggcatttgagaaaagagtagaagcagcaaagtc

SEQ ID NO: 730301 - DNA, 637 bp, Homo sapiens
cgcagatcttcattgctcttgtatttaattttgttgtatcattctccctctcccctactgaggaggctggggtacctggcttcatagcaagccacactaccatagagttcccaggagtcatgggcaacacttacgattggcaactttcagaggcactctagcctgggcgacagagcaagactcgtctcaaaaaaaaaaaaaaaaaaaaaaaagaaagcaatatgatcacacttgtagattctctgaaccttccttctctagggtttcttccacagattgatgacaagagacaggcctgggaggcaccatgggtctattaaaaacttgattctacctaagatttgatagattaaatttgtgggaaagttgataggcaagtaccaaacagatactcttgagttcrtgggctcagtttttcttaaaatgtatatagaataaaccctttcctttcctgtatgatctcattgtcctttccagaaattatgccttaactacaagtcccttgctgaccaaaacattgcttgctttctgaatcatatttatctagtaatatttattcaacatgataatgctcaggacatgctaccccacaatgtggtaccttggcatttgagaaaagagtagaagcagcaaagtc

SEQ ID NO: 730302 - DNA, 590 bp, Homo sapiens
gactcagaagaataatgtgcaaaatgcttgatgtttactccataccatggaattattaatcatggggtgtgactacaccctggaagtctgggatagaggactggagaggaggcacagagacctggagaatccacttgcggtaagttgtggagtatcggcagcaaaagaggagcttggggttgagagtttgcctgaggttgggaatgaagcgagcaagataaaactttgctgattttcagttgcagcccttgttgaagggaagaggaaaaaaaatccctgtagaatacatatttcataaaccgttattttaaccacmttttatatttcagttacaagttttaagatgaagggcataaggatataggaaaaatatcatgatacattgcttttcttttctgccatttctggtcccatttggaagtcacgatagtccttttctaaaagctgataagtcctttaaaaatgtttaaattgcagttgattgcactgacctaggaatcttctaatatctaattcttgcatgaaaatgtaactagcaagatgactcctgctggcttataatatgcttattacaaaaaagcccacttgtc

SEQ ID NO: 730303 - DNA, 527 bp, Homo sapiens
gggtgtgactacaccctggaagtctgggatagaggactggagaggaggcacagagacctggagaatccacttgcggtaagttgtggagtatcggcagcaaaagaggagcttggggttgagagtttgcctgaggttgggaatgaagcgagcaagataaaactttgctgattttcagttgcagcccttgttgaagggaagaggaaaaaaaatccctgtagaatacatatttcataaaccgttattttaaccaccttttatatttcagttacaagttttaagatgaagggcataaggatataggaaaaatatcatgatacattgcttttcttttytgccatttctggtcccatttggaagtcacgatagtccttttctaaaagctgataagtcctttaaaaatgtttaaattgcagttgattgcactgacctaggaatcttctaatatctaattcttgcatgaaaatgtaactagcaagatgactcctgctggcttataatatgcttattacaaaaaagcccacttgtca

SEQ ID NO: 730304 - DNA, 616 bp, Homo sapiens
tatgtgccacattttctttatccagtctatcattgatgagcatttgggttggttccaagtctttgctattgtgaagagtgccgcaataaacatacatgtgcatgtgtctttatagtagaatgatttataatcctttgggtatatacccagtaatgggattgctgggtcaaatggtatttctggttctagatccttgaggawtcaccacactgtcttccacaatggttgaactaatttacacccccaccaacaatgtagaagtgttcctatttctccacatcctctccagcatctgttgtttcctgactttttaatgatcaccatcaccattctaactggtgtgagatggtatctcattgtggtttgatttgatttgcatttctctaaagaccagtaatgatgatctttttttcatgtttttttggcttcataaatgtcttcttttgagaagtgtctgttcctattcttcacccactttttgatggggttgttgttttttttcttgtaaatttaagttctttgtagattctggatattagtcctttgtcagatggatagattgcaaacatcttctcccattctgtaggttgcctgttcattctgatcatagtttctt

SEQ ID NO: 730305 - DNA, 616 bp, Homo sapiens
tatgtgccacattttctttatccagtctatcattgatgagcatttgggttggttccaagtctttgctattgtgaagagtgccgcaataaacatacatgtgcatgtgtctttatagtagaatgatttataatcctttgggtatatacccagtaatgggattgctgggtcaaatggtatttctggttctagatccttgaggattcaccacactgtcttccacaatggttgaactaatttacacccccaccaacaatgtagaagtgttcctrtttctccacatcctctccagcatctgttgtttcctgactttttaatgatcaccatcaccattctaactggtgtgagatggtatctcattgtggtttgatttgatttgcatttctctaaagaccagtaatgatgatctttttttcatgtttttttggcttcataaatgtcttcttttgagaagtgtctgttcctattcttcacccactttttgatggggttgttgttttttttcttgtaaatttaagttctttgtagattctggatattagtcctttgtcagatggatagattgcaaacatcttctcccattctgtaggttgcctgttcattctgatcatagtttctt

SEQ ID NO: 730306 - DNA, 565 bp, Homo sapiens
acgcctggctaatttttgtatttttaaaatagaggcaggtcttgctatgttgcccaggttggtcttgagctccttggctcaagtgatcctttcatctcaacctcctaaaatgctgggattataggcatgagctgccaagcccagccaacttttttaaagaaatgaacttaaacatcatgagcatatatgttaatgtaatgttacattatttaaatcttaagtaagaatatttatttatccttgccgaattaatggattaaggatatttaacgatcagttactgacccagcaactccacttctaggactctatattagtgaaacagttgagcaagtgcataagtatgtatgttcagtatatgcggcattgtaaatcatgaaaaatctgagacagcttacgaatatattaataagrgaatggataaatgagccaaaggacacctctaaagtggaacactacattgttgtttaaaagttgagctacaaatgtatgtgctgatgtgggcggtgtctttgatatgttgttgagtggaaaaagcagcctgcagcagtgtgtgtagagtgtg

SEQ ID NO: 730307 - DNA, 473 bp, Homo sapiens
gtttaattatttattatatcaaggaatgaatctgtcaagtaaataatgaaatgcgtacatgcagcatatgtaattaggttaggtgcataaatccaaagtgttcactttatagttgtcagtgcaaaatttattaataatgagaaatgttaagtgaagaaaattcttaacacmgtctacctcattagtgtggattacagcaattgttggctgaagaaaaagaaggctacaaatagtcgtggttaggcttcattttcttagttgtcttttaatcgtttaaaagtattagtgaattggagcacattggtttctctttttagaaatgtatgatttgaaacaggagttgtggattcgaatgcatgctgccaacggaataattccacactgaaaaaatacaggcctcagggtttctaaatccaaacaattatttaaggggggaaattcaattaacatttgagaagaaaaaccttctttta

SEQ ID NO: 730308 - DNA, 473 bp, Homo sapiens
gtttaattatttattatatcaaggaatgaatctgtcaagtaaataatgaaatgcgtacatgcagcatatgtaattaggttaggtgcataaatccaaagtgttcactttatagttgtcagtgcaaaatttattaataatgagaaatgttaagtgaagaaaattcttaacaccgtctacctcattagtgyggattacagcaattgttggctgaagaaaaagaaggctacaaatagtcgtggttaggcttcattttcttagttgtcttttaatcgtttaaaagtattagtgaattggagcacattggtttctctttttagaaatgtatgatttgaaacaggagttgtggattcgaatgcatgctgccaacggaataattccacactgaaaaaatacaggcctcagggtttctaaatccaaacaattatttaaggggggaaattcaattaacatttgagaagaaaaaccttctttta

SEQ ID NO: 730309 - DNA, 500 bp, Homo sapiens
gggacagaaagaagcaccttgtcaagtaccttccgtgaaccccaggtttgcctgggctgctggcacaggtgatgaaacagggatttgaggagacctcaggtacctgggaatgagacttgatgggatcgctgagtatgttggcgtggagattacagggacctggttgagtgggtgccaccaactccatattaaagaatctgactcataacctggttrgagttaggtctgtacttcatgttaatcattaataccaatgtatggtctaaggggcaaccaaccagaaacaagataatgagatcccactgtgtcactaactagtctggtaacttccagaaaattctctaaattctagggccttagtttcttcacctatcaaattagaggactgtcattctggctttaaaggtctatgattcacagagatggtattggaatacatcagattttgtgcaagcagttccatgagtgtcttgaaaagaaagggagagtatgatggtacg

SEQ ID NO: 730310 - DNA, 514 bp, Homo sapiens
gcctttccttttagaggctctgcacaatgtctcatctgttaatttataatactagctctccaggaagacctgacaccacttacggataccaaaataccactttgcccagagtccctctttttcacttcgtcagtgtgctggttcacgttttaaatcacgctcatctttcagagacatttggaggagtttaattccagtttgagatgagaggtcttggggtgcgttttaataaatatttgatgggaatgctagccttggggggtcattcttatttacaaaattagagatggcatctcttargaaagcttaacttcgtggaagaggcggtgtttataaatgcgcacagcactctcatgcacggggtggccgccacttttcagaacacagtagttatccacggttccatttttagaagcagtgattaaattgcagagcactgctgtgtgataccaattacaataaccattgtcgattcaattgtctttttttttaatggaaagcaaaattcactttt

SEQ ID NO: 730311 - DNA, 573 bp, Homo sapiens
tttaagacgagagaaattgctgcaggtttgtatgctgatgggattgatatgacagaggagcaaacaatgaagaatgtatgcttcacaggtcagggggtaggggaagaagttctgaaacagcatcctgggggcggtgagggggaagccctggtgcacaggaggggctcggcctggatagcagtgggagatctgctggcagagtcggcgggaggcagggcggacaggcacaggtaggcaggggcagaagcgccaggagtgtgcactggagtccaggccagcagmggagagcagaacagaagcagaggtgctggaaggttgagaagagaggaaaaggtacaaatagtcatcccacaactaaggaagtgaatgggccagggaaagacagttgggtttctgggaagtagcgagtgcccatgtgaaggaagagacagtctatgtaaaatgaaggaaagttacaaagtttaaagtgaattaaaatgtaaacttcaaacatattttgaaatgtaaagtgaattcactgtaaaatgatttaaattctttagtgacatgattcctcttttctgaaacttccac

SEQ ID NO: 730312 - DNA, 633 bp, Homo sapiens
ggattagctttttgatgtgctgttggatttggtttgcaagtattttgttgaggagttttgcattgatgttcatcaagaacattggcctgaaattttcttttttattgtgtctctgccagcttttggtatcaaggtgatgctggcctcatatactgagttgcaaagaagtccctcctcctcaattttttgtaatagtttccgtaggaatggtaccagctcttctttgtacatatggtagaattcagctgtgaatccatcaggtcctgtgctttttttggttggtaggctatttattactgattcaatttgggggcttattattgatctgttcaggcataggcrgaaaattgaagttggactccttccttacaccatatacagaaatcaactcaagatggattaaaggcttaaatgtaaaaccaaaactataaaaccctatgagacaacctaggcaataccatcttggacgtaggaatgggcaaaggtttcctgacaaagacaccaaaagcaatcacaacaaaaccaaatactgacaaatggggtataattaaactaaagggcttcttcacagcaaaagaaataaactatcaacagggtaaacagacaacctacagaatgggagaaaatatttgc

SEQ ID NO: 730313 - DNA, 554 bp, Homo sapiens
atcagtcttagaaatatgatcattaagtacttttacaaaaatattttgaggctttaaaagttcggttttcgaatgtttgtatacattttgatacctcattttgaaaagttttaaaaaactgtgctaagaccatttaagcttttctctgcaaatagtcttgaatatttccattacaatgattcctgctgggtgggaattaacccacatttagattattgaagagtgcacttttcattagttgtattatctcttgattcttctgcttaaacggaattggattttgcaccttttctttacagcttcagtgagaacagtaaattacctcttcaagatgtttcagtgagggccaaatgttccattatatcccaggsgattaataagaaactctgcattcacagctgtctgtattataagtcattggatctaataaatattgctgtactgtatatccattataaaggtgatttttcagctaagctgtcataatattataatatgattatcctatattcaatgatcaaattatcagtttgatttttttgaaattacaaatt

SEQ ID NO: 730314 - DNA, 582 bp, Homo sapiens
taacaaccaccataaagaagacacaagccaggatcagcaaatacagtagaaaacagaaacacacctccaataattccagatattgcaattacattattagatacaggttgtatacaacaacaaaaacctatgctttccattgaatattgtgaatagtgctgcagtatatacaacagaatactrtttattgatgaaagagaacaaaatcctgtcacttgcaacaacatggatgtacctggaggaccttgtgataggtgaaataagcctggcacaaaaagacaaatgcaacatgatctcgctcataaatgaagtctaaaaaagttgatctcctcaaattagaaaatagaatggtggttaccagaggctagagtagttagtggggaggaaggaatggggagataatggtcaaaagattgtttgaccaacatctaaacattttactttacaatctcctaatgtaaagcgatgttgagaacattttcatcaaacttatttgtcatctctatattacctttggtgacatgtctgctcagatttttttaatttaaattaatagattttgtatattctttaattgggttg

SEQ ID NO: 730315 - DNA, 525 bp, Homo sapiens
tcatcattaagtacaatgttagttgtcaggattttttttcctagattttttaaattatgttgagaaaataacctgctgtattcctactttgctgagaaatatcacgagtgggtgttggatttggtcagttgcttttttgcatctattcatataatcttgtgagttttttctaccctgtagatgtgctaaattwtattaactaattattaaatgttgaaccagccttgcatacctgggtcaagatgtataattttttatacagtcttggactttttatacagtcttggtatctgatattttgttgaggatttttgcatctctgttcatgaaaataatggtgtattgttttcttgtaatgtctttggttttggtattaaagtaatatagtcctcactgaatgagttaaaaagtattctctcttccagtatcttctgaaaaagattataagagttggtataatttcttccttaaacatcttgtagaagtcaccactgcttccatctgggtctagtgtttttgttttcg

SEQ ID NO: 730316 - DNA, 582 bp, Homo sapiens
tcttcatgctatcaccatggtcttaactgccatcatttcttggctggaccatgcgtttactttcattccattgtcaagtatgacctcaagtgatcgttttagaatatagattatttcactctctcatttaaaaccatcccatggaatttcaacatgttgaaattataataaaaataattgctatggcctataagactatkagtgacttggcaatggctatctcttaaattccagccacactagcctttttgttgcctctcaagagagactgttcttaccttatttcatttgcacacactatatcttctatcctgaaatctcttttcatagtcatttagatggataattctctcagtttacttctctttaaacattacctcctcaaagtggactgtcccaaacaatgtttagtttttctttattttgagacagggtctatgtcactcaggctgaagttcagtggcataatcacagctcactgcagccctgccacaggtatataccaccacacccagttaattttttaagatgttttatagagatgaagtctgttgcccaggctggtcttgaattcctgggctc

SEQ ID NO: 730317 - DNA, 582 bp, Homo sapiens
tcttcatgctatcaccatggtcttaactgccatcatttcttggctggaccatgcgtttactttcattccattgtcaagtatgacctcaagtgatcgttttagaatatagattatttcactctctcatttaaaaccatcccatggaatttcaacatgttgaaattataataaaaataattgctatggcctataagactattagtgacttggcaatggctatctcttaaattccagccacactagcctttttgttgcctctcaagagagactgttcttaccttatttcrtttgcacacactatatcttctatcctgaaatctcttttcatagtcatttagatggataattctctcagtttacttctctttaaacattacctcctcaaagtggactgtcccaaacaatgtttagtttttctttattttgagacagggtctatgtcactcaggctgaagttcagtggcataatcacagctcactgcagccctgccacaggtatataccaccacacccagttaattttttaagatgttttatagagatgaagtctgttgcccaggctggtcttgaattcctgggctc

SEQ ID NO: 730318 - DNA, 582 bp, Homo sapiens
tcttcatgctatcaccatggtcttaactgccatcatttcttggctggaccatgcgtttactttcattccattgtcaagtatgacctcaagtgatcgttttagaatatagattatttcactctctcatttaaaaccatcccatggaatttcaacatgttgaaattataataaaaataattgctatggcctataagactattagtgacttggcaatggctatctcttaaattccagccacactagcctttttgttgcctctcaagagagactgttcttaccttatttcatttgcacacactatatcttctatcctgaaatctcttttcatagtcatttagatggataattctctcagtttacttctctttaaacattacctcctcaaagtggactgtcccaaacaatgtttagtttttctttattttgagacaggstctatgtcactcaggctgaagttcagtggcataatcacagctcactgcagccctgccacaggtatataccaccacacccagttaattttttaagatgttttatagagatgaagtctgttgcccaggctggtcttgaattcctgggctc

SEQ ID NO: 730319 - DNA, 583 bp, Homo sapiens
ctcttcatgctatcaccatggtcttaactgccatcatttcttggctggaccatgcgtttactttcattccattgtcaagtatgacctcaagtgatcgttttagaatatagattatttcactctctcatttaaaaccatcccatggaatttcaacatgttgaaattataataaaaataattgctatggcctataagactattagtgacttggcaatggctatctcttaaattccagccacactagcctttttgttgcctctcaagagagactgttcttaccttatttcatttgcacacactatatcttctatcctgaaatctcttttcatagtcatttagatggataattctctcagtttacttctctttaaacattacctcctcaaagtggactgtcccaaacaatgtttagtttttctttattttgagacagggtctatgtcactcaggctgaagttcagtggcataatcacagctcactgcagccctgccacaggtatataccaccacacccagttaattttttaagatgttttrtagagatgaagtctgttgcccaggctggtcttgaattcctgggctc

SEQ ID NO: 730320 - DNA, 633 bp, Homo sapiens
caaatgtatttgtattttacatatcagtataaaattgggaagaaatgcacaacgatctcttaaattttcycctcaaagtatttgttcataccttaaacatttgattttaaaacatttttctccttaacttaagtagtctaaaacttgaaatggatctataacaataatggtggcatctggaagacatttttagcaacagacaaagccaaaagtcaatggaatgcaacatgtggataaaatattataactttagctatgtggttaggtatttaaatgccctttggcagttgatgcctttcttttgatatgcaaccttagaaagctaatgctattactgcactgatatatccaaaatatttacatcttgacatctatcatcggatgtcattactttccaagacttcaactagatggtattgtatgtgatgagagtagttctttcatttacttaaattttattatatttgtgaattaaaccccttgaatgtccacaaattatatggtatttgttaaaaaactttgggtaaataattcaggaaataggtttattctatgttatgaaagtcaaatgcagggtatcagagtaaatttaaaccactagaccataacgaaataaaatgcaaatatgctgtc

SEQ ID NO: 730321 - DNA, 563 bp, Homo sapiens
tccctaaatccatagttgtcttgtggagatcgtaaacacctgcagccatttccaagaactatacttttgagttaaggcctccaaactagaaaatatatggatttctgatcaaactgtcattctaagtttgtacatttttggccactcttgcttcaaatataagcwataataggtaaaatacctaagggaaaaatcagaatgacatagttttcttttacaaaacaaaaaaaaaaaaatcaaagtaccatgaacaaacaaggaaaactacagaatacaaagtacatgagtgtatataacataattatcacatatatgttagataatagcaatgttacatgtaatggacaataagatatactgaaatggtaattcataaagccgttctagtccagttttattataacttaatgtgtccttttggtgaaagggatttttactagaccgtctgtccaagtcttaaactagagagcattgtctgtgtttttttttttcttttttctttttttctttttttttattattattatacttttaagttttagggtacatgtgcacattgtgca

SEQ ID NO: 730322 - DNA, 563 bp, Homo sapiens
tccctaaatccatagttgtcttgtggagatcgtaaacacctgcagccatttccaagaactatacttttgagttaaggcctccaaactagaaaatatatggatttctgatcaaactgtcattctaagtttgtacatttttggccactcttgcttcaaatataagcaataataggtaamatacctaagggaaaaatcagaatgacatagttttcttttacaaaacaaaaaaaaaaaaatcaaagtaccatgaacaaacaaggaaaactacagaatacaaagtacatgagtgtatataacataattatcacatatatgttagataatagcaatgttacatgtaatggacaataagatatactgaaatggtaattcataaagccgttctagtccagttttattataacttaatgtgtccttttggtgaaagggatttttactagaccgtctgtccaagtcttaaactagagagcattgtctgtgtttttttttttcttttttctttttttctttttttttattattattatacttttaagttttagggtacatgtgcacattgtgca

SEQ ID NO: 730323 - DNA, 563 bp, Homo sapiens
tccctaaatccatagttgtcttgtggagatcgtaaacacctgcagccatttccaagaactatacttttgagttaaggcctccaaactagaaaatatatggatttctgatcaaactgtcattctaagtttgtacatttttggccactcttgcttcaaatataagcaataataggtaaaatacctaagggaaaaatcagaatgacatagttttcttttacaaaacaaaaaaaaaaaaatcaaagtaccatgaacaaacaaggaaaactacagaatacaaagtacatgwgtgtatataacataattatcacatatatgttagataatagcaatgttacatgtaatggacaataagatatactgaaatggtaattcataaagccgttctagtccagttttattataacttaatgtgtccttttggtgaaagggatttttactagaccgtctgtccaagtcttaaactagagagcattgtctgtgtttttttttttcttttttctttttttctttttttttattattattatacttttaagttttagggtacatgtgcacattgtgca

SEQ ID NO: 730324 - DNA, 626 bp, Homo sapiens
agcagctgtcctccccaggtggctgagcggaggtggcccaagcaaggggctgtcaggctgggggtgacattctgcattttctccctctcgaggaaagggactggcttaagtcccacctcatttgtctttggccactctcctcttaagcaacttccttcctgaatgtggacctttctggagcctcattattttgagattgatttttctcctttgcaaaaactgcttggagagcttttcaccaaggcatgccttggaagctaccagccgacggtagtgactgcagcagcccccctggcagggaccctctaagcgatgggggtgactgcccccactcagtccagcaggcatgtgggtgcaggaggtgggatgagggaggcaatgrtgggcctggagggctagtgcttgtgttagcagctggggccttgtttacagagaaatgtgggcttgttccctgggagctcctccttttacaggagcaaacaccgaggcccaggggagggcacctgtgtgaagttacacagccgactggtggacagatggacgctttaagctgagaaccccattctctgcagcgcatttgggtgggccggaaatagtcgcgaccgatatgggacaggttggccgag

SEQ ID NO: 730325 - DNA, 612 bp, Homo sapiens
tcctagcctggaccatatgggcatttggcccatctccccacctcctccgtgagcccagtggctgcccacgtcaatgcccagcaggcctctggtgcctccctcacatccctgtctagaagggaagtttccaggaagccactgaaggccagacagggtcctggctctgcatgctcccaagagcctgagaggctgccctaggtcacacacaggggacccaggctagctgacctcacaccttgctctcccgcctggcctggggagcagtgagatcactgtcaggattaggattaggattaggaacagcaaaagcgattagagtttgtcctcctcttcctggggtgcatctgggcaaaggtttccaggtcagagatgctcaatgtctgtcccatggggcaccggtgaccagcagcaacccctgctcagacctcacatggcatggcccctgacttggtttcccctgggtgggcagccctkacagccttcttccccaggccagacttctcagtagggagagtccctggtggtcaggcagggcctggactccccaggtggggctgccccagggcggagaccccccttgtctgtcgagctttgtggttctcactctgcttg

SEQ ID NO: 730326 - DNA, 528 bp, Homo sapiens
aaacagaatattttttcaaccaattaatatttcagcagagaactgggaaatgttagcaggtaataaaagcaataaaaatagccaaatggagattctagaagttaaaaatatgtttggatattaaaaaaaaaatcaaagaacaaaatacactggaagsgtttcacacttaaaaggacatggcaaagaaaaagtaagtttaaaagaaagagtaagttaatctgaaaatacatcagtaaaaattaacaactgtaataaacaagacattttaaaaatgaatagagttggggcattacttgtatagctcccccctttactatcactgccttctaattcctgccactctagggtttaccattgagtaaaggtcatattcctgacctttcatcttttcatatctccttcaaactgtatgcttatcttagggcaggcacaagatttaatagattttattcatttcattggtgcacagagaatttgtagttatcagaattttggtttcaagggtcctcctcctgttcaattagtttt

SEQ ID NO: 730327 - DNA, 597 bp, Homo sapiens
ttgggaggtaatctaagtgagcacattgaaggagtgaacaagtgaggactaaaagggagagaagccagtaaaagttgcattaataagtgggttgctgttatggaaaactcctcagttctttccaggacctctaagagattctgtaaaaatatttcaccatgagaggaataaatagagctatatarctactcactcctgctattccttggtggagaggaaatcctggtggcagtaacttcctgccaagtagagtcccagggccaaaacgtggcccaaggtaaagagaggcagaaagctgtgggtgtgaataaaatctgcacgccaatgacttcaaaggtggactgagggaggtgggaggggaactcactgtctcatctacaatgtatatgtaaaaacctaaagcaaaagagagcaatgctaagatggattttagtttttaaaaatggagagagcatttgtcagaagttataaaagacgtttatcagctctgattttcccaatgtcaccatctctatcaacttagagatactggaagtacttgcagttttgatggataacaaatcctctctaaagaaaaaatgctctcaaacactctct

SEQ ID NO: 730328 - DNA, 673 bp, Homo sapiens
aaagctctgcaaaagatagaacaaacttatgcatctcaaacaatagaagtttcttatctcattcctgtgacagtccaaagtgggtattcctggtcagtgggaagctcacagcacaaagtgattctgggagcaggactctcccactttgtggctctgctttccccaaattgctcattaccattagtaacagccagcaggacagataagagaatggaagaaccatagtgtttttttgagacttggccaggagttagtgattcacatcatttccactcattttttgattaataagaactggtcaaaggagatacctagatgcaaattggggttgggggtgggattaggggtcctgggaaatgtagtatggcagggacaccggtacacaargggacttttagaggccaactagtcatctttgtcccaggccataagcagaaccttcagcaaacaaaacccaagaggtagtgagatgaacagtggtgagtgagttagaaatggacattcacttaacaagcagacacagaaatattgagtgagccttctcagcctaacctttaaatattggtgtttgaagagtcccctcctagcttgctttctgcttagagcagagttattacatgcttatatgcattaatctggggaaattatcaaagaattttgtgacttgaccaag

SEQ ID NO: 730329 - DNA, 615 bp, Homo sapiens
ctgcatgtccaaataaaataatacccattttttgtataataaactaaagcttatcaaatagcttcccttaaggttgaaggaaaaaaaataaagaaaaaaaatccaactgtaagtgaccttcaaataacctaagcattgtgttggcaagtttagtaagactatgttctccaaaagtttacagaagtgacattgtcatcagtatgtctactgaaaaaggagtgagtgatagaaaccactacgtttaaaaaaatcattwagttagaattatgatcgtgtattggggtttatgcaggatcttgcacgaagaaaataagcaagttgcaaccctctttcttttactttcaacgacaaaggtcatgccaagggtttggaatcctattgctgctattaagagctctttctatgcattaaacttgtctcaccaaagcaggtgtttgacatatgaggggcctggctgcagtactatcaatagtttcattacaggggacttactctccaaacatacctttcctgtggacagaatttaatttgaaccatcttttctagagggtagttgtttgtgattattttcttgaaataagtaaaaagtttaaatagaggtgatatgcaactcca

SEQ ID NO: 730330 - DNA, 628 bp, Homo sapiens
tgctccaactgacagattattattgagaaggatgtaagggaaagcctgtttttattaataccttttcacaaatactagcctcaaggtattagaataaaatgcaatgtgtgagtttaagtgttgaataatatgctaggttgctgtaaaggaatatgcttaacaaagtatttcccctttgaaatattattattttttccccaggaaaccagccggacagtaaagaaatgttcttcttttttaccaaattacagaattcatttatgtcytgtgggcaaaggtaaacacacagtaatcatagctcagaatcttctcattcaagaaatgcccatcaagcaccctaatgatgtcttgtttatgttgatgatttattgttttcttcgaacacgtctgaaatattttacaattcagctggttctggcggtttccaagcattttcccagcctcagagaggagtacttgccccgccttctgcagagctggctgacaaaggcagtgtcctggcctttggccaggcgcttgtctctagcatgctcctcacatttctgatttgcgcagggagtactgagcactgcaacctcaaaagcatattagactgcaaaactccattcaagtgaatgctgttctagca

SEQ ID NO: 730331 - DNA, 569 bp, Homo sapiens
cttcttcccaaatcatcatttttaatatagatacaactattgtgatgcccagccagttctgtacagattctggcttcaaatttcacctggtctgttcattccttcgcttccttccattcttagcaatgtgacaataaataaatcattaaatggataacctgataaattaaccactactaaattgccatattccgtgaaattaattcagagcaataaatcttgatgatattgagatttttagtagtagtartagtataggctttttgcttaccacagtcagtctttagacaaatcttgaattacactatatagagaaaggaggcctttcataattgtacaagtcgatgattccctccttgcaatgttagaattttcccgttcttgttgttagttaccattatcaaaggttacattgctatcctcatcttatatttttcaactgtcaaagatgcttaataggtagtgtatcatcaaaccaaaatatatttctacatagcaaaaatggagaaagactataatctattgagcacagataaaaatgtgtagctcaacctaacaacatcaattcc

SEQ ID NO: 730332 - DNA, 569 bp, Homo sapiens
cttcttcccaaatcatcatttttaatatagatacaactattgtgatgcccagccagttctgtacagattctggcttcaaatttcacctggtctgttcattccttcgcttccttccattcttagcaatgtgacaataaataaatcattaaatggataacctgataaattaaccactactaaattgccatattccgtgaaattaattcagagcaataaatcttgatgatattgagatttttagtagtagtaatagtataggctttttgcttaccacagtcagtctttagacaaatcttgaattacactatatagagaaaggaggcctttcataattgtacamgtcgatgattccctccttgcaatgttagaattttcccgttcttgttgttagttaccattatcaaaggttacattgctatcctcatcttatatttttcaactgtcaaagatgcttaataggtagtgtatcatcaaaccaaaatatatttctacatagcaaaaatggagaaagactataatctattgagcacagataaaaatgtgtagctcaacctaacaacatcaattcc

SEQ ID NO: 730333 - DNA, 569 bp, Homo sapiens
cttcttcccaaatcatcatttttaatatagatacaactattgtgatgcccagccagttctgtacagattctggcttcaaatttcacctggtctgttcattccttcgcttccttccattcttagcaatgtgacaataaataaatcattaaatggataacctgataaattaaccactactaaattgccatattccgtgaaattaattcagagcaataaatcttgatgatattgagatttttagtagtagtaatagtataggctttttgcttaccacagtcagtctttagacaaatcttgaattacactatatagagaaaggaggcctttcataattgtacaagtcgatgmttccctccttgcaatgttagaattttcccgttcttgttgttagttaccattatcaaaggttacattgctatcctcatcttatatttttcaactgtcaaagatgcttaataggtagtgtatcatcaaaccaaaatatatttctacatagcaaaaatggagaaagactataatctattgagcacagataaaaatgtgtagctcaacctaacaacatcaattcc

SEQ ID NO: 730334 - DNA, 587 bp, Homo sapiens
acgagaactgtcaaggatggaaggtggggagacacacatgtcaaggatggaaggctgggagaaagtggtggtactatctgtggcatgtgctccgttcagcggggctcacttcagaaaatgcagctgaaacacttctgaggtgctaaagcaaattgttataatgtcactgcmtatggtgctgttgaggctttatagccacagagcgcccatagtctctggaagtcattctgcattctcacataaactcgtccccgccagcaagctccattctccacagaaaaaggcctttcaataatgaacagccgtctgttccacagagcacaggaaaaacatgataaaccaagtcacacagccttggctgtaaacatattcttacacaagatttctccaactccatataaagaaaaaaacaagctattaaccacttgcagaacaacaacaaaaaatgcattgggtttcctgcaattaagctgcaatgttttacagtgcaattttatttataactgaaaaagagtaaataagtaaatatataaaacgtcgaacagacccctcccgccaaaggctttttctgcaaattaacttagcag

SEQ ID NO: 730335 - DNA, 600 bp, Homo sapiens
cagcaccttgggaggctgaggcaggaggatcactagaggtcaggagttcaagaccagcctggccaatatggcaaaaacccacctctactaaaaatacaaaaattagctgggtggtgttgatgcgcacctgtattcccagctacttgggaggcagagrtcagagaatctcttgaacctgaaaggtggaggttgcagtgagctgagatcacaccactgcactccagcctgagtgatagagtgagactttctctcaaaaaaaaaaaaaaaattgagatcatattgcttatgcagttttgaaactggattttctcgtgtaacaagataattgtggttagtgcctacaaagcagtccattgcttgaaatggtcattatttatttattggtgattgactttaggtttatttgcagacacatggatccacgattccttgacctacaaactaagtaagattaatctggtaaatactgaaaggaaaaaacagtggtataatggtaaagtggggcagggaaggtcctgatatgtagcatttgccaatgtcactggtgtaaatactcccaccatggctgatttcaaggtaacagtttagcaaacagcttgc

SEQ ID NO: 730336 - DNA, 594 bp, Homo sapiens
tatagtcttttcctccctgatctaggatccaatccatgatcatacattgcatttagttgtcatgtgtttagtttccctttatctggaacaactttatagcctttcttaaccttgacatttttgaaaaatatgggccagttatttaatataatactaattttggtttaatatttcatcaygatgaaacttaggttatgaattttgccaggaatactatagaatttaaatatccttctcaatactggtgatctttcattatttggttaaggtattgtccaccaggttttactgatataaaattaatattttccctttgtaattaataagtaatttgtagggagatactttgagaccatgtaaatatcttgttctttatcagactttcacctggtattttagtatctattaatgatcttctaactccataattccttctatattgattagaatttttctgtaagagctatcttttctttctccccaatttgtttatttattcattgatatttatcattgtagactcatggattcccgttttagtcaatggattacagtctatttttataatcattttgatactcagattgtatcaga

SEQ ID NO: 730337 - DNA, 594 bp, Homo sapiens
tatagtcttttcctccctgatctaggatccaatccatgatcatacattgcatttagttgtcatgtgtttagtttccctttatctggaacaactttatagcctttcttaaccttgacatttttgaaaaatatgggccagttatttaatataatactaattttggtttaatatttcatcacgatgaaacttaggttatgaattttgccaggaatactatagaatttaaatatccttctcaatactggtgatctttcattatttggttaaggtattgtccaccaggttttactgatataaaattaatattttccctttgtaattaataagtaatttgtagggagatactttgagaccatgtaaatatcttgttctttatcagactttcacctggtattttagtatctattaatgatcttctaactccataattccttctatattgattagaatttttytgtaagagctatcttttctttctccccaatttgtttatttattcattgatatttatcattgtagactcatggattcccgttttagtcaatggattacagtctatttttataatcattttgatactcagattgtatcaga

SEQ ID NO: 730338 - DNA, 607 bp, Homo sapiens
attgctaatataatctgagctaataaaaaacacaacaatagcaatatacatagaatccaattcattaatctcacacatctttctgtgtttcactcttttggttttaagctagattttcatgaagtcagtaagtcttattcatatattttttagaaataacaataacattcagcagtatacttaatagcttataaatcaaatgtctcttttaaatggtaaaaactaaactcattcttagcatattacsataagcaagaaccaaattcaatattcagattaccatatttggacgattataaatgagaattttgtctggtttgtgttgtcctatttttagcgcttcttctacaagtggtacgtactctaccctccttccaggttcaatgccaaatgatgctgtaacaaccaccttgggctacaattaaaaaataataatggagagaaagctttaacaatgttaattaggtaatcacaatattttagttgcagactggcaattcaacatttgtaaagaaatgtctgaatgtttctgttttctattgaatggtctgaaaaccagtaaaccctttgtaattgttagagacttgatcacttctacacaaatctc

SEQ ID NO: 730339 - DNA, 604 bp, Homo sapiens
atctccaataatttataataattttttctcattctaaatatatattcatgttcaccaaatattacattatattattttcttaaaaaggctcccaaatgattaaagtttcaagccccacaaagcctagacctgcccctgtccttaagatacactttatactctttacctgccaacttgttaagtcwttcttcaagacaaacacaggtgtaggcaaaatgtatccctggtgggaaccacagcttatgttaacctctcttttcagtacattctggacatgcctcaaatgttcagctatagtcagtgttcataaatctctattactgcacagtaagctctataaggccaagtttggatgtcatttatttttgtgtttcctatacctagcacagtgcttggcatgtcatgagctttcagtaaacgtttgcggaactcattaatttgcagaaaaataagtcctcatatttttaagtacattgtttcttcaccaagaaatccaaagcaaaagagacacataataaattattcggaaggcagataattgacccaaagtattgcatgtattcctgaattctgatttctagttataatacatttcatctaggaa

SEQ ID NO: 730340 - DNA, 531 bp, Homo sapiens
gtttacattaaggttcactcttgtgtcctacagttctatggattttgccaaacataacatgtcatgtatccaccattacagcaccatgcagaatagttttgagataggaggtggggcttgactcagggccagattgaagactggctggcatgagcaccagcaccatgaacagtttactcattccctggcaatgacccagttaccacccttcttctagaaatttctgaataacctgcccttaatttgcacgtatttaaaagtgggtatgaatgtgactatagaagtgcccygagctgctgctctccaggcactgcctatggggtggccctgctctgcagggacagtcacagaactgtaaccctgctgcctcaataaacctttttcttcctcctctagctcacccttgaattccttcctggacgaagccaagagccttcccggacggtgtcccagttttggggctcccctgccctgcaagagtttcactaccttaaaatcccctatgcctcacctgttcatccctctctgagt

SEQ ID NO: 730341 - DNA, 571 bp, Homo sapiens
catcagatagaaccgagtttgagacctagttctcctatttcctggctctgtggccttggcaagttccttctgctttgagctcagcctgctcatcagtaatgataataacattagtgactattagtgatcacttactaggtgctgggcactatgccatgtgctttgcatatctgttaattaactctcacaacaatccctkgaagtaagttcttatactttttcttttttttaaagataggatcttgctctgtcatccaggctggagttcagtggcacaatcatagctcactgcagccttgaagtcctgggctcaagcaatcctcctgactcagcctcctgagtagctgggactacaggtgcatgccacatgtcaccacatctggctaatttttttgtaaagacaagggagtctcactatattgctcaggctggtctcgaactcctggcctcaagcaatcctctgatctcagcttgccaaagtgctgggattacaggtgcgaaccacaacgcttggccaatccttataattcttatcttactgtattagcttgctggggctgccataacaaaa

SEQ ID NO: 730342 - DNA, 621 bp, Homo sapiens
actatgcccagcctgttatttttcaagatagctccacaatcaagcctgttctcttactcccatttattatgacattttcattcttgtgggtttagttaagtggtctttcccacttctatttttttattgtttttatggtggtaaaagtatatataacataagatttgtaattttaattggtttttaacatataattcagtggaattaatcacattcacaatgccatgtaatcattgcctctacctatttagaaaactttttcattatctcaaacataaacttcatacccattatgcagtaatgcctcattattcctttccccaggccctggtaaccactttttgtctgtatgatttctgaatttgaaattatgcagtatttttttgtgtctggcttctttcaattagcacttttttttttcgagacagagtcttgctttgttgcccaggctggagtgcagtggsacgatcacggctcactctagccttgactttctgagctcagcccatcctcctgcctcagcctcctgagtagctgggactacaggtgcttaccaccatacctggttactttttttttttttggtctattttggagagacagggtctcaccatgttgctg

SEQ ID NO: 730343 - DNA, 608 bp, Homo sapiens
cgggtctagtttcctcatctgtaaaagggagatcataaatagcacctatccttctaaggctattgtaagaatcaattgaaatctacatgtgaagtgcttagaacagtatgtagaatacatcatatgctcaataagcagtaattattgctattattaacgttatcttccagaaaaagaaaaacaagacacagagaggaagctacaattgagtcttgtccttcactttcataaggctggcctctaaaataaatgccttcttcatgaaaagtgactgcaaaaggttgtccactggcagagaggggcttcaaggaagcttgctgctagggctctgggtgggggaaaaaakaaaatcccctgtgagaaactgggaccccgatcctgtgctagatgtggatgtgaagtccaaatttacagtatctgcatggtgaggaaatcccagactgttaaattaatgcataatctagcctgggaattagtgaaactcttggagtccaggtagaaatgaagtgaaaacttggtcccaagggtaatatttctccaacccagggcacaaggaacttccacaggaaaagcaaagacaacaaaatctccacaaaccccaaagatga

SEQ ID NO: 730344 - DNA, 612 bp, Homo sapiens
aaccagaacaggaattaagatgttttaaaacaatagtgagttacaaaagtcactccttaagcatatttgatgagctttctacctctactacagatgatgtgctttgatgaaatagtgtgcttgctgaaagaaatgatggtttcagatgtgtaaattrcacaagagaggtttacaaggccatcacgcctgacccatctgaattgtttcctgcagaggacacaagcctttggaaggacacttcatgggcagggaggaccttcctaaacaggagcccagacagcatacttgaaaggtgattaaagaaaatttcttttgtaagttaccttcaagaaggaaaaggaactgcctggcttatgaggccaagtaaatgggctaatcagaaatcagacacttaaagcacaaaaggaaaagaaaggagattaagcaaggcaagaagagatgagtctggggtaaattggcacttccgcagtgtacgaggagtgtggctgacacccagtagagggaatgaccagctaggtcacctggtaaggctgttggtgagtttcagtcgagcctccaaggtgctgaggcacatgaaacacgggcaagtgtcatccgtgttagacagacagg

SEQ ID NO: 730345 - DNA, 612 bp, Homo sapiens
aaccagaacaggaattaagatgttttaaaacaatagtgagttacaaaagtcactccttaagcatatttgatgagctttctacctctactacagatgatgtgctttgatgaaatagtgtgcttgctgaaagaaatgatggtttcagatgtgtaaattgcacaagagaggtttacaaggccatcacgcctgacccatctgaattgtttcctgcagaggacacaagcctttggaaggacacttcatgggcagggaggaccttcctaaacaggagcccagacagcatacttgaaaggtgattaaagaaaatttcttttgtaagttaccttcaagaaggaaaaggaactgcctggcttatgaggccaartaaatgggctaatcagaaatcagacacttaaagcacaaaaggaaaagaaaggagattaagcaaggcaagaagagatgagtctggggtaaattggcacttccgcagtgtacgaggagtgtggctgacacccagtagagggaatgaccagctaggtcacctggtaaggctgttggtgagtttcagtcgagcctccaaggtgctgaggcacatgaaacacgggcaagtgtcatccgtgttagacagacagg

SEQ ID NO: 730346 - DNA, 545 bp, Homo sapiens
gtcacctggtaaggctgttggtgagtttcagtcgagcctccaaggtgctgaggcacatgaaacacgggcaagtgtcatccgtgttagacagacagggtaataaacaacgaaggcaaaggcacagatttggaaacaccttctgagtctcgcraagttgtcaaactatttccaatttcactctactaagtgttcacatgagaatgctgatgtgtgggctggagttcccagcaacgtcatcttttcctgaggcatgctcagtggatcccggccaggaggtctgctccacagagcttggagcggatgatacacttccccacgtgattgcaaagcagtggtggcttctgtcttatatttatacaaccaacaggaataacctattttagagaaaacaggcaaagaagggagctgagggtagtaattttgtagcctactctgtaatttagtctggtactctttgccgaaagagaaaatagttcctctgttaacagacagtggaggatgagagaaggaaggatcaaacaatttgggccccggtcctagaattt

SEQ ID NO: 730347 - DNA, 548 bp, Homo sapiens
ttggtcccatttatgaatgcaacaggaaactgtaggatcctaactgacaatacactttccgatcattagctagtgtgatttttgcatccattgaaattggttgtcaaaataaatttctattgtgaaagatacagtatttgtgtttggcatttaaaaatacatggaattgcagtttattatttccagtagcacccrcactacacgtgaagatctgtagacataagggttggtgaagtataaaatgcgagtttaccggatgcttttgtttcacctagcattaagcagttcctctgactgtagtgaaaacaaggatgaagaaataagtgaagaaagtgatattgaagaaaagactgaagtggtataaagtttttattgtaaaaactttctctttgttatatattttagtggtaaaaattcacagtgaaatactccagttgtgaattgttttctaaagatacatcttttaaaccaataatgtaaatttttatttgacatttaaagaaaaacaacccttatttatagtcgccgtatgagtctctcagtggctc

SEQ ID NO: 730348 - DNA, 539 bp, Homo sapiens
cacatgtcagcagtacaatgatcagatccttgttttgaagagttcaatctgatggtgtgggccaacatgtttggaggagggaaggaaatgaaaagtgtgtgtcctggtggttttcttttttcctgggtaagctaagtcatcattcactttcatatggctctggcagattttaccaagtgaagaccccagcatagagaacttaggtgggatgatgagcagctctcccattttggggaagacggtagtgggtggggtgaagagagcacagsccggggagggtggaaggggcaggtttgaattgagtcccctcactggctgtttgtgttagttgcagaggtttcttaggagcctccttcttttgcaggtgtgggatggacggaaggcaggcctagctagtagtattaaatgggaatgttcacacagggcctgcaaactttggccttcagtaaaagttacttctcttcttgctctgcgatgtcaccacttttcctccctcagttaccgagcatgctctgttcttttttgagggggcagggagg

SEQ ID NO: 730349 - DNA, 645 bp, Homo sapiens
cagcctggccaacatagtgaaacccagtctctactggtgcatgcctgtagtcgcagctactggggaggctgaggcaggagaatcgcttgaacatgggaggttgcattgagctgagatcgtgccaccgcactctagcctgggcaacagggtgagactctctctctctcaaaaaaaaaaaaaaaaaaaaaaaaaaaaaaaaaaaaaaaaaaaaaaaacccaacaggtctgatttctgactttattcggtcaggcttttattacatgaaaagccatgtggttgtacgtgtatcaaactgcaggtgccctaacctgctcctccaaacaaattattgcgcttagggccctctaagtcttcttttttgggagctgtaraatcaccaacacctctgcgcctttgcctgtccactcttttctgcctcatgaaggcatcactttccttcttctccttagaaatggcagtcatctttgaagatcaagtttaaatgttctctggacagtgaagcctttcaaggccccccaaagcacagtgaatcatcacccgcccctctctgttccctcattctgctgatcttctgtattccccctatcagttaactcacctgtcccctcattagactatgagctctttagcctctctgcattcct

SEQ ID NO: 730350 - DNA, 609 bp, Homo sapiens
cccctctgtttttcttagtctgtccttggttccagtgcttcgcgagaaaatccaacatggaggccagagcaaggccccctccctgctgtgtgcgggcagctccggctttggggttgggaatcaaaaccagggcccacgtgtacgtcgggagccatctgcgctccaccctgaccaggacggagccgcactcgggcgtctgggggaaagcccacggcgcggctttcttgcacgaagttgggtttgccgtgtaagcctccccatgcgaatgctcagaagaacacaggtgtcacrtggccttgggaccaaccctgatctgcagcgtgggcctgttgtggtctgagtgagggtcctggcttttccttctgcttgggcagccttccgagggtcttgcaagaggagatggcgtggcagctggctcagcctcccctcccccagcccggagtgcaggcaggagggggtgtggcgggggaagtgttcggctagggggtgaaggcccgggcaagctcacccttcagtgttgatttaaagggatggggaaggtcaggaagtagagccggagaaatggagtcaactgtgttttccttagagaaataattcatggggcctaga

SEQ ID NO: 730351 - DNA, 631 bp, Homo sapiens
gtccacaagccgcagggtgtctgctgcacccacgataatggattatctccagcaacacaaggatcctggaccagagaataaagcagcagtggcgctcccagctctttagcatcttaagctcctgaattagcacctcaaacctgcattgaatgagaatgttaatgtctggccacttagggctgaggagatcagagtgttcactggggaggcaattgtcagttcagtaaaaggctggggatttgggggctgtccttagacggagtcggagctgtgctctgggatagatgtggaaaatgtaagattttggtggaacacactgtgatcatcacataagtaggcgtgacttgagtcccaggccatgacactgaagccctcggagtgtgacccggggccacggggctgtggataatgcccgacctgaagatctggtgcggctccyatgagtgtcctattcccagatgacccccgtgaaccctgcgacgcgtggcttgggtgacccgggacgtttccacgggcgaaccccagttggggcgggctcgggctgtgatgtgtgagcctgcactgccgccgcgcggccacttccgattccacaactacaaccaattccgtgccatccaggcggtgagaccga

SEQ ID NO: 730352 - DNA, 618 bp, Homo sapiens
tacaggcatgaaccaccacacccggccttatgagcatttctgacccaattgatcccacccttctataaattgtttcacccatgtattggcatttaattatgtcccagtgagaccccatagggaggctggaagggtgttggctgtgtgaraactgaaggtgaattgagtgagctcctttcttactaccccctgagtgttagagctaccatctcttttttttttcagctattgccagcagcagttcctcctgcgccagctgcaccagaccctgggcaggcaagtgaataccttagggtttgttcctgtcagggtcactcctgcctctgggttttggtgaaactggcgttttcttttgcatcttatcaggtggcccctctgaggaggttattgatgatatccctttatggaaagcctaaggtaataactctaaggaagttgagcacagtattttctaacttaaacagcttggtggcaggagatgtgtacactttcctatttcataaaatttacaacagattcagaagagattaaggacaaaggaccaaatggggaggacaggtttgtttaagggaggtcatgtactttcaatctggagtctatcaattgttcattcaactc

SEQ ID NO: 730353 - DNA, 540 bp, Homo sapiens
ataagcaaaggaaaaaatattgcaaataaatatgtgagatgtatatgtgtgcttgtgtcaaggaatgggaaagactgaaatttgttgggtatttggatataaattcaaggcaggaagtagcacacgaagtggcataaacatgaatggaatatacatagggggaatacctgaaagcaattattatgtcatgctaaggagcttggttttatcctatagtaggtgatagggaaaggttatgatcaaggtcattccttagatgtggctattgaagagtgtggaagacaatttgaggtcaacaaggccagaggcaaagagatcagttgggtggtagtcctcraactcaagcttggagcaaaagaatgaagatgaagttgaaaaatagttaagcagttaggaggtagcataaccaggactatgattcaatgttcccttgagggacaaggctgccttacaatgggtatctggtttccagctcagggaacattagttccattgattgaaataaaaatgaatgaggaagaatgggttatagggtaggaa

SEQ ID NO: 730354 - DNA, 593 bp, Homo sapiens
tctatctataaaaccatcttctagaattcattacagtatcactatagacatttataagccaaagtggcagaaatattgaaataaagaactataatattggaactctgatcaacgttttactagtatagtcctttcataattctgtgcagatttctctagctagtatatattaagaaataagtcgtatttaaaccaacagaataagttgggaatccgtatataagcaaatgataactggaaacatattttttgaacttaacaattacatcagaaatacacttattgagaatgagctgcattcctggtaatgagaaggcaaagaaagattctgcaagatttggctctactagatctccttttggcaatttaaggtcattctctacccttagtgacttggaatttcagaaagtayatgtcttcttttcaaggagaaggaaattagaaggtacttagattggtttaatttgctttagttgaaagggcataaggacatccaatgtttacaaattcaccttcttttagtttccctgtgctttgcacagggaaatgaaatggactttgacattgtatagccttaatttgtaaaacaactc

SEQ ID NO: 730355 - DNA, 601 bp, Homo sapiens
atatgtttggtactgcaggttgactggtgacaagtttgctcaagttttgtttatgtgaaatatcttcagtttaccttcctttttgaaggttctcttagctagacaaggaattctagagtgacaaagttttgtttgtttttccttccttctgccttggcatgttaacattgttgtttcattatcgtctggctagscttgtttctgatgagtgacaatatagttattgccatcacagttcctctgcatgtaaaatatagatttccttcttagctgcttttaaaattttctctttatcacatacatatggccaacaatcatatgaaaaaatgcttaacatcactgatcattatagaaatgcaaatcaaaaccacaatgagataccatctcataccggtcagaatggctactattaaaaagtcaaaaaaataacagatgctggcgagattgtggagaaaaagggacgcttatacactgttggtggaagtgtaaattagttcagccattgtggaagacagtgtggtgattgctcaaagacctaaaaacagaaatactgtttgacccagcaatcctgctactgagtgtatacccaaaggaatataaa

SEQ ID NO: 730356 - DNA, 601 bp, Homo sapiens
atatgtttggtactgcaggttgactggtgacaagtttgctcaagttttgtttatgtgaaatatcttcagtttaccttcctttttgaaggttctcttagctagacaaggaattctagagtgacaaagttttgtttgtttttccttccttctgccttggcatgttaacattgttgtttcattatcgtctggctaggcttgtttctgatgagtgayaatatagttattgccatcacagttcctctgcatgtaaaatatagatttccttcttagctgcttttaaaattttctctttatcacatacatatggccaacaatcatatgaaaaaatgcttaacatcactgatcattatagaaatgcaaatcaaaaccacaatgagataccatctcataccggtcagaatggctactattaaaaagtcaaaaaaataacagatgctggcgagattgtggagaaaaagggacgcttatacactgttggtggaagtgtaaattagttcagccattgtggaagacagtgtggtgattgctcaaagacctaaaaacagaaatactgtttgacccagcaatcctgctactgagtgtatacccaaaggaatataaa

SEQ ID NO: 730357 - DNA, 562 bp, Homo sapiens
taaaaacaacaaggatcacttgtgggatattgtgataaaatgggcctgaaattgattaacatcttttctgcccacattctgttggtcacaattaagtcatatggccatatttaattgcaaagtgtgatagaaaatgtatttgtgtgtgtgtgtgtgtgtgtgtgtgtgtgcccagtgggaaatggcaatggattttagtgcatatgtgcagtctctgtcacaccaaaaagtacaaaactaagtatctgggtatgccaaattcagctatattgktagacggtattgcttagagcattatgaactattattgatagttactgaacatttaacagcaaaagatctgttgatagtatgatatcaatgtgcagacgatttaaaaatcttgaggcattccaactatcatacacaaatcagaggcaattcatttacttaagctcattattgactacctattatgtattggactttatgttatgtgctatgcaaagaaaaagcacaggatatatctgtaacctcaaaaagctctcagtattccagaagaggcaaacatacacacaagtaa

SEQ ID NO: 730358 - DNA, 658 bp, Homo sapiens
tgcctttactacatcactcaggggatcttggatcttagttcaggaacagtgttttgctgggccagcttcatgtgtgatcatgtcactattttaaaatatatttgctgataatacagtcttatgtacagctgtcctcaagagctagccaacaactgtctcatcaggatgggttttccatcttcttcttcttccagcacctttttcttccttccatgatatagatataytgatcatgaggagagggctcacccctcacccggagaagtagttggggaagcaatatgcggaaacaaagccatgaatctgacaagaaatgtacttaaggtaagtaataagatggggttgcatttttatgatgtgctacaaaaaaaatgtcctcaaaaaatctagctctggaagccaaccattattcactttgggggagcatgccatgcaaaagatctcctggttttgggaaatcacacagtgacctatgttgtttctgctgcctaccgaggaacatggatgcagcttcagtctaagaaagaacgttcaattgaggcagtcactttctctgggccaaattacattcttcataatctcccaagtgttatatttaatttacatttgaaatagaaaatatgtgaacatagactttggctcacgaattatttcagtt

SEQ ID NO: 730359 - DNA, 630 bp, Homo sapiens
tttctgcacacaatctaagtacagggcatgggggtgaggagatggcagtacaaagagaagggactcagggaaggtatatgatcccaaagcaagtataagcagcagtgtggccaatccagtccaattggagacagaccctgacatgcacaatggggacaaggagacagcattagaaggatacagcatgaagatgctgggggcactgaaagcagagtagggttcttctggcaactccagcacagcaaagcacagaagactgtaacagaagtcagttacaggaaacaggaccccactatagaaaaagcaagttccagcttgcygattggggccttctggagaagggggacacaactccccaagggtaaggggtgagaagcaaaggtggctgtggaaagctgctctgtcttagtgcttcccagaaatgagagaggtctgctctgttcagggacctcagcctgcgaagtcagagctgcaaaaaacaaattccgaaaccccaatgccagagggataagatctcccacccacccaccaggctagacttcatcagttcttgcaaggccagttaaaactctcctaggggtggggtcttagaaaatacagctggaccagggcaagagctgactgataata

SEQ ID NO: 730360 - DNA, 631 bp, Homo sapiens
aatcctagtcaacgttcctctaaattctatgtgcagttcattagctcttagatactcattgaataaagccagagagttccatggtttgcacacatgcttttggtttcctactttagagcttatggaagactgtgagagatcacttcactcacagagagaatggggactggtaaatacagaaagctctgaagcttggacattaggtgtatgattttaagaataagaaacagcaagatggtatgaccctagaaaagggccagggtatacaraaagatgaaacatcaagatgaagtcagtacacctcactcacagggttcctttcttggtgtatcacaacaggcagcatcttataagagaaagagtatgggtttgaatcccagctctgctactctataacttactagctctgtaattttgggggctttagcagcccagagactcagtttcctcagataagatgaaaatggtgtctacctatcatgggaattaactaccaaaacatatatgtaatctctgccatagtgcaattatggtaacaaaagcctacatataagggcctgatctgtgccaagcactgtattatacacttgacatgaattatatcatttaatcttcaccataaggtagatgc

SEQ ID NO: 730361 - DNA, 637 bp, Homo sapiens
aataaccaatagcaatcaaagggtgcagaaaaaaaatctgggagacattgtcaacacctcctcactcattatctgatgagtgctttcagacactcatcagattcagccagtgaaggagcatggagagcgcccatctgcccaacactgctgtcgggaaaggcaaaaatggaggaactcaaggtgatgggatggtctatgatgtcttctagtgccaacagccattcatccttccacatgtggattatctgcacctgtctgcttctaagaagggtttgactcagttctgagagtctgaggttctgcatcaaagggctcgggctaatgcaccacctgatcctgtttcaggctgggaaggaactctgagacacttctttttggtgctcacaaggagstcatgggagaggcattaggactcagcagcagaggccttgggattttggtttcttccagcaggtgctgaaagaggtaggagggagctctgaactggaaccttgtgagagagagtgcgttggttctttgtgagtagtaactgttcaggcagtacgggcctgagtgctatccggtgtgggattgctttctggcctgtgtgtctgatacaggcctttaggacagtgggtggtgggccagtgtccttggg

SEQ ID NO: 730362 - DNA, 531 bp, Homo sapiens
gagcatgagggaggcatgagtgagtgtgaggggattactgggtgtgcgaatgagacacccagtgtaagtgtaagtcagtgtaagtcagtgagggttggtgagtgtgaggaagtatgagtgggtggcagcacaagtgtgtaagtgtgcgattgagtgygagcatttgtgtaaatgtgtatgagtgccttgtgtcagtgtgagcacgagtgatgttattgtgaatgcgtgtgagtgaatgtgagcattttgcttgtgtcagtgaatgggaggttataacagtataggtgtgagtgcaaagtgagaaagtgtgtgggtaaaggtgtgagtgggtgagtaatcggtcgttactagtgttgaggagtgtgagtgcatatgtgagtttttgtatgcattgggaggggtaagtgtatgtgagagtgcatgggagtgtgtgtcagcttgcatctgtttgtgcatacgtgtgactgggattgtgtgtgtgttagtgattgcgacagtggtgtgagtgcacctgaaagtgtgagggtgggt

SEQ ID NO: 730363 - DNA, 495 bp, Homo sapiens
tgatatgtataaagatgaccaggaagctttgttttccttattatcatgatgaccaatccattggcttttagggtgtgatgtttccactgttatgtttttgatgatcagggaatccttttgagtgaacccagtaatctttgaaagctcccttcctttatgayacaagttgatccaggctcttcctgtatatttcctgcctgagacacaaagccagacagtgttctaaagagtttctcttccctttatcattaaataatacttagaatgcactctgggtgctagatgaaattcttttttttttttgagatggggtctcactttgtcactcaggctggagtgcagttgtgtgatcttggctcattgtaacctccaccttccaggctcaagcaatcctctcaactcagtctcccgagtagctgggaccacaggcatgcaccgccacgtctggctaatttttgtatttttggtagaggtgggtttcgccatgttgcccag

SEQ ID NO: 730364 - DNA, 495 bp, Homo sapiens
tgatatgtataaagatgaccaggaagctttgttttccttattatcatgatgaccaatccattggcttttagggtgtgatgtttccactgttatgtttttgatgatcagggaatccttttgagtgaacccagtaatctttgaaagctcccttcctttatgacacaagttgatccagsctcttcctgtatatttcctgcctgagacacaaagccagacagtgttctaaagagtttctcttccctttatcattaaataatacttagaatgcactctgggtgctagatgaaattcttttttttttttgagatggggtctcactttgtcactcaggctggagtgcagttgtgtgatcttggctcattgtaacctccaccttccaggctcaagcaatcctctcaactcagtctcccgagtagctgggaccacaggcatgcaccgccacgtctggctaatttttgtatttttggtagaggtgggtttcgccatgttgcccag

SEQ ID NO: 730365 - DNA, 591 bp, Homo sapiens
catggaggtttggggagttcctttaagggaggagaccacccctcatactgtcttatgcccaatttctgcctccaaagaaagaaaaagtaaaaactaaaaggcagaaatgaaatccacaggcagacagcccagagccgtgccccgggtctggttaaagattgacccccgacctaaccggttatgttatctatagattccagacattgtatggaaaagcactgtgaaaaatccctgtcctgttctgttccattatgattaccagtgcatgcagcccccagtcatgtacctcctgcttgctcaatcacgaccctctcatgtggacccccttagtgttgtaagcccttaaaagggacaagaattgctcactcagggtactcggtttttggagaygtgagtcttgccgaagctcctggccaaataaagcccttccttctttaactcggtgtctgaggggttttgtgtgtggcttgttctgctacatttcttggttccctgaccgggaagcgaggtgattaacggacagttgaggcagtcccttaggtagcttaggcctgccctgtggagcatccctgcgggggactccagccagct

SEQ ID NO: 730366 - DNA, 633 bp, Homo sapiens
gccctgtaactcaatgtcacaagtactttaaaagggcatacagagagatacacagatgtaataaccttaatttaaacaaattttattctcaattttttccctaagcaaaccaaagcttaataataatatgacaacttgatcatataaacttttttttgtttttataaatcctcttattgtgatttatacagaccattcatgacatgcttggactttctggtttgtcttgaacatccctttcttaaacaaccagttattttactttaggastaaatttaccacacaagattctttctcatatgaaattatttctctttaagcttttttaaatgattaccaaaaaaccctctttattttcataactttctttacatctctcttatttctttgttccttttaccttgttttatacatgacctttaaataaactttaaatcagataaaaattgttcaccttttttaaaaggacacttttttttttttgagatggggagttttgctcttgttgcccaggctggagtgcaatggcgtgatccctgctcaccgcaacctccgcctcccgggttcaagtgattctcctgcctcagcctcccgggtagctgggataacaggcacctgccgccacgcccagct

SEQ ID NO: 730367 - DNA, 529 bp, Homo sapiens
tgatagcttgtgcataggagttcaaaaccagtctaagcaacatagcaacaccccatctctacaaaaaatgcaaaaattagctgggcattgtggcatatgcctgtggtcccagctactcaggagacagaggtaggagaatcgcttgagcccagtaggttgaggctgcagtgagctgtgatcacaccagtgcactccagcctaggtgacagagggagaycctatctcaaaaaaacaaaaaaccaaccaaccaaacaaacaaaaaacatgagtgaagaggcatcacaaattagtggggctgagaatattcaatatacagtaatggagcaacaattaccttttttggagaaaaaaagagaaatttaggtcctctcaacactataaacgaaataagttccatgaggatcaagcaattaaattttaaactttaaacattaaaaaaatacaaaaatatagttaaatatatttctaatgtctggatgaggaaagaatctaagcaaaccccagagactgtacaaaagaaacaatgatg

SEQ ID NO: 730368 - DNA, 526 bp, Homo sapiens
ctcaacaccatttattgaagagactgtctgtctcagcccattttacgtggctataaagggatacttgaagtggggtaatttattagctcacagctctgcaggctgtgcaagaagcaaggcaccagcatctgctcagcttctggtgagggcttttgtgctgcatcaaaatatgaaggagaagatcaaagggcaagtgggctcatgygaagagagactgatccccggggtagtgagtaggggtcctggctttataacaacccattctaatgagaactgatccgttctccccaagaaccaatccaatcttgcaagagctcactaccatgagaatggcacaaagccgttgatgagacatttgctcctatgacccacacagctcctactaggccctgcctcccaacaccaccacactggggatcaagtttcttctttttttttttcatacccttagggtgatgtcaggtatcagatttcaatgtgagatttggtagggacaaataaaccaatccaaaccatagcactgtct

SEQ ID NO: 730369 - DNA, 632 bp, Homo sapiens
ttttccccttgccttcgggatagaaagtgttctcatatggaatagaaattaagaatctatcagatagtattaaggtgacattactagccttatctcatttccccgtgcttagtatatttcatcataggtttaaatgcttcaccttttccagatttattaaaactagtgacccataacatggatgaaatgggaaaatgtcattgtgacttctgaaataaaaagcttagatgtgtgtggcwattgaacatgtttctttttctttccatgtatgatgaattttgatatgaacaacatgacttcctaactccaaatcaaccagaagcctcccttggccaatgtgccctattgctccagctctcaggctggttgtgcagtgggtagttgcctagcgtggaacttttctttcgccccagttcacatctggcacacaaggcaggcctcagtccatctggatccctccctacattgtgtcctttttccttgttccacagacttgattaactgtcaaaatgttttgttttgttttgttaataggacctgctgcagctacagtatgaaggagttgcagtcatgaaattatttgatagagctaaagtaaatgtcaacctcctgatcttccttctcaacaaaaa

SEQ ID NO: 730370 - DNA, 515 bp, Homo sapiens
aatgttgcccaggctgatcttaaactgggctgaaacgatcctcctgctcagcttcctgagtagctgggatcacaggcgcgcaccaccatgcccggctaatttttgtattttttgtagagacaaggtctcaccatgttgcccaggctggtctcaaactcctgtgcttaagtgatccacatgtcttggcctcccgaagtgctggggttataggcatgagccaccrtgcctggctctctttgatctttaaagctaagctgttttctctttttcatcatgatagctactcatcaaatttggtcaaatataggggggtggtactcctttggcttaattgtaccttagttgcccaggactggaccccctcagcaggggtgggggctgtctgtgaaagcacagctggatatggtcttgcccatcaggcagtgtttcaaattcaatatgccaagagttcctggaaccaggactgtcagtgtgatgagcattcgttctaagcacacaggaagggagaaactatg

SEQ ID NO: 730371 - DNA, 517 bp, Homo sapiens
gcacttatttttcttaaagccaacaaaatagagctctttcataatttaattttggagcattaaaaggagataagaaactatgatacctgtatcatacatacagacttatataaacataaacagcaacagatcttacagctttcatttaaatatcttagccatgttccaggtacagtaatataaaactcctgaatttattaaagactatctggatccaaattgttcttctggccaatggaacaagatttcttgcccagatgactaaagcttttgaataagattcgtgaaggagcttttaagatttttttgtttgatttctgtaaggaacctattataaagaggcaattttttattmatttaatcttttagatgcctctgtgtatcaattaaagaatgcatcccattgcttttgtggcatttttgaacctttcttttctaatgcaccttgcaagtgaacagttttatctaggtcaaaactttcccactgtggccactgtaactcttaagttgtcctcag

SEQ ID NO: 730372 - DNA, 633 bp, Homo sapiens
tggggagaagaaagatcctcccctctcctaccccctctttgggatccactccagcccggacagtcaccatagcaacagtagacatgtgactgcacaggtctctcatagtcactatggcaaccagtgtcccccgttcccttggttaccatggggatctgtcacatggttttcccccaacctgataacctgtgggtctccctgattctcctcccctgcataaggacaagacaacagcctcagtcaggggagatcatgtgagaggggtctttttaattaccatgacaacaaatccacaccacctggtgacacatcctcctgtcgttatggcaacagaagaacatcacacagtgacatactgccatgttcccaaggaaacaagccctactctgagaagggtgaaagacccccccccccatyaattattcctctattcagagtgtcccaaattgtcgtgtgccttggtctcttccctgtccgtttatgcttacgtgtcgtggaaggagagctgtacagggtgggcaggatgttacttggaagcaggctgaattgccaagggacccttaagaaggggctgacatgatcaagagctgtgcatgaggttattcgggggcaggctttgcctgtaagaggcct

SEQ ID NO: 730373 - DNA, 445 bp, Homo sapiens
ttcacttttggccaagcctagggcccaccttccagagcccagattcttttttttttttttttttttgagtttcgctcttgttgcccaggctggagtgcaatggcacaatcttggctccccgcaacctccgcctcctgggttcaagtgattctcctgcatcagcctcccgagtagctgggattacagacatgcrccaccatgcctggataattttgtatttttagtagagatggggtttctccatgttggtcaggctgagctcgagctcccaacctcagatgatctggccgcctcggccacccaaagtgccgggattacaggcgtgagccaccgcgcccggccccagagcccacctgtgataaggccacagcccatgccatgtgtgtgtcctgaggcatgagcgtggacacatgagaatctcaatcccacatgcttgggggagcag

SEQ ID NO: 730374 - DNA, 515 bp, Homo sapiens
agtactggagagttgcttaggttgagtcttagcatgcctggttctttgtgcgttcctcttcccctggcctcctcttcccagtagggaccaaggaatttggggtgaacttactatgcttttgggttgctctgtagagatctgcagggaccagcccagtgaaaacaaaaaggttcccctattccctccccagcagccctctctgtggcctggagggtttctctggaagagggcagtgcctggaggggagcctctggatagtgatgtggaaatattaacarcagagtcaaagcgggtattttggggtagtcggggagaaaactgtgacctctccccccaatgatgtaaaatctttatcaatgatggaaactgttgtgtctcattaaaagggttttgaggtggaaaagcagctgccgctggatcttaataataatatcaaactgctaacctcatgctgcttgtctgggtggttatttgatgctgctctgggatacataaggggtgggggtagggggtgg

SEQ ID NO: 730375 - DNA, 559 bp, Homo sapiens
aacacttcctgaggaccaacttctccaggcactgtcctgggtgctgaggatacagtgataaacaaacttcagtccctaccctcaaggtgtccacagtcctctgggggaggtaagcaagacatcagtgattacaagtgggggaagcctcctagcccaggactgggttggggaggtccaaggaaggctttgacggggaggggggcttgagcgaactcttgaagaagtttgccacttgcagaaagggaggtagggtgtaggtaggagagtgcaccaagcagccttgaagacagatacaggaagtgcatcccgctcaaggagactgcgcagaaacagtctcctcggcagacgtggggcgcctcctgcgtgtgctgggataagctctgtggcgytgagcaagctgtagggtgtctcagggcctcagatttcttgctctggtgagaacaaccaaaacaataacatcctagaaatattgtggttattattcaagggctctgtgaaaggggacacacttcctgagtggcctggaggggtaaagccccaatacctcaagagagatggg

SEQ ID NO: 730376 - DNA, 576 bp, Homo sapiens
tctcacactgctcagttaccaaatttcacttagggacaaagttagccaccccacaggctacaagatataaagggcttaccttccacgttccagttcccagctagatggggctagaaactggacaaggacagtagcagcatctctgctgggaagacaccgcacccaggccacaaaggcagcccagggctgagcagcactcagcagccctcagggaggaggtcacaaaagaaagtctcaaacatgagggcacaggctctttgtttactctgagtgtgggcaaaatcatcctctaggaggcagagcatygtgtacagaacccaaattgaataaaggccttctcgggaggtggctggctggggttctgtatgccgggttggaatgaccatgcataaggcattcactccctccaccattcctgcatccactgagtaggtcatgcaagcaatgtctgtgcagcccctgtcacgtgcctgatgtcactagtcactgaagctaccagctgagcaggattatggcagacctaattcctgatcccagaaagtttaaattttaatgggcatgtttcgagttaataat

SEQ ID NO: 730377 - DNA, 573 bp, Homo sapiens
aaagcccatttccttcaatacacaattatggcaacaactcatggtaagtcccaacccagttaatattccttaatttccccatataacacacaggtctcagcctagggcttataaagtaagatcagcttcactgagccctacctacatcttggcgctgaaatgttctcttgaaaaatatgaagaagtctgaccatactcattagagcagaatgtcagcaagggaatattctgtttgtctcctttaaagaaaaacaaaagcgacatgatcatgaacttmattaaagttgtttgcagtgatttaattaggcttatagcactgtgtctattcattctggccagggacctttctgtcttttaaaggattggtaggcagagatatcatgtgctgtgcaattttacctaatccttaatttcatctcctgatgaagtgaggccaagcatcttcgtgttcaggtaattgctttatcaaatggcttaattgtgcattcaacagaactgacaacaagaaggtattcttcctaatgtgtttttaacaaaagcactaactaattacatggcattctactcagggca

SEQ ID NO: 730378 - DNA, 500 bp, Homo sapiens
gaaaaaaacaaggggatcaccactatatgtcatagagatcaaaaagataagatactatgatcaattttatgtcaataaatttgacaacttagagaaaatcaacaactttctttaaaaacacaacttaccaaaacagacataagaagaaatttaaaatctgaaaaatcctaaatttattatttaaattgaagcgacaattaaatgccttcccctaaatttaatttcagaccaatattgctttagyaataaattcttccaaatgtttatggaagaaataatgccagtgttacacaaactcttatagaaaatagaaaaagataaaacatttcttaaatcatgtgtgaaatcagcctaacctaagtctgacaagaacttactagtaaagaaaaccaccacccagtatctttcatgaatcttaaaatatttgattagcaaatcaagttcagggatatgtaaaagaatatgtcatgatcagatgggatttattccaggaatccatg

SEQ ID NO: 730379 - DNA, 615 bp, Homo sapiens
ttcaaaattatttttcagggtatgattaaataataatttcacaattgagacctgatattattttgttccccctgcttttccttcacaacagaaaccaggaatggatctggcagacacctatattatgtttgttcggcaaaaccaagatattcttcgagaaaaggtcaatgaggaaatgtatatagaaaagttatttgatgtaagtagcttcccttgcaaggtatgctgacaccatagataaactgcaaagagaaaagttgaattttgatgstatgtttgcaaagcatagtctcctttttgtgatcctgtatcttctatactaaaaagttgaagctggccaggcatagtggctcatgcctgtaatcccagaactttgggaggctgagaccggtggatcagttgaggtcaggagttcaagactagcctggccaacatggcgaaaccccgtctctactaaaaatacaagaaaaaataaaagacatagctgggtgtagtggtagatgcctgtaatcccagctactcgagaggctgcagcacaagaatcgcttgagccgggaaggcagaggttgcagtgagcaaagattgctccactgcactccagcctgggtgaaagag

SEQ ID NO: 730380 - DNA, 615 bp, Homo sapiens
ttcaaaattatttttcagggtatgattaaataataatttcacaattgagacctgatattattttgttccccctgcttttccttcacaacagaaaccaggaatggatctggcagacacctatattatgtttgttcggcaaaaccaagatattcttcgagaaaaggtcaatgaggaaatgtatatagaaaagttatttgatgtaagtagcttcccttgcaaggtatgctgacaccatagataaactgcaaagagaaaagttgaattttgatggtatgtttgcaaagcrtagtctcctttttgtgatcctgtatcttctatactaaaaagttgaagctggccaggcatagtggctcatgcctgtaatcccagaactttgggaggctgagaccggtggatcagttgaggtcaggagttcaagactagcctggccaacatggcgaaaccccgtctctactaaaaatacaagaaaaaataaaagacatagctgggtgtagtggtagatgcctgtaatcccagctactcgagaggctgcagcacaagaatcgcttgagccgggaaggcagaggttgcagtgagcaaagattgctccactgcactccagcctgggtgaaagag

SEQ ID NO: 730381 - DNA, 574 bp, Homo sapiens
gagtctgtatttgtgactcaaagtgctatcattaatatcatttttatcaccaatggtaattgtttgtaaagtaattttccattcatgtgtgtcatttggaaagacttgttaccttagcagatatatagtttggaattgtatttcctgagaaaagtactttataaatttacaaaaatatgatttaattatagaaatgaactatagatcgtttttcagmaacattttttatttaaagtttgtatgcccattttttaattgcttctacaaatctttatagtaaaagaaagatttttttacttttttcacaggaaaaagataggtctttttcctgtgaaatttatcactatcctgttctcaacagattaaccattaatgggcattatttttaactcctgttgtaaccttctctggtgaaagaaataaggtataaaatttagcagatgttttataaaactagtaatttagtttcataaaaatgatactaaaagatttttttgctgagataaatggaaaaatgaatattctaagatacatcttttaaaatacaaaagaatcttccaattttataaaatgt

SEQ ID NO: 730382 - DNA, 615 bp, Homo sapiens
gtattttgttttcattaatagttgtaaaaccccaaaaagaatataccttgtaaggcttaaatttcatgacttgcttcttgatgaggatgtgagatgtcattagataggaatttatgcccattttctgaaggaaataacattaagaaaacccagagaccctaagaattagtatatgtgtagaatttatgttctttagctaatcctgcatgtaatttttatgtagcattagcttagttgacagggttggtcctgcaactttattgttttctgytggataaataatatttagtatctgccattgtatacatcgcatattgttctaggtgctggggaaacaaaacagacatgttctttattcatggagactatactttgttctgggtgagttttgttttatcttgatcttagattattgctgtttttagtagatgagaaaatcaaggcttagaaagtttaaataatttgcctaaggttacagaattgatacatggcgggtgttgagaaaagaacccagagtttgtgtggcttcaaaattttttctgctgtttcatcacaaatccttgaggccaaggaaatcatggtttccctgaaaagttttaaaaggattttctctct

SEQ ID NO: 730383 - DNA, 532 bp, Homo sapiens
ccaaccaatccagagcctgcatcctaaccacctcctatattaggttctcatactttagaccacctgctctaatcaccccccagggcgaggtaccaaacaactagggacagcccctgtgccccacggtcttctaaagttattcaaactagccaaccctaagcctgtttaccctgctttgcctgttccttgtggtggaaaccacaataaaggatctcgccaacagtttctactcctgcttttgtctcctaactgacccgtatgctccacatcctrtggcaggttgtgccgcctcctcttgggaactgtaacaaacttatcttttcagtggcaatcaattttctattaatacactatcttttaaaactttgggctactgattttttttcaatccttgtggcaaagaatcttattattaagaaagtattaaatactgttagatttaaagctttttttggaagtaacttgaagagattcagaatggtactgaaatacatatgcgtgtataggtaaatatgtacatatgtttaagtat

SEQ ID NO: 730384 - DNA, 643 bp, Homo sapiens
cagatgaaaccatcaagctgtttcctgccaagctaggacatatgaggtattggctaaaatgtcaaacaaggccactcttctcatgaaatgcttttttcctaatgtgattatttgcctgaaaatgtttcccatattagcattcaatagacttactattgctctttagaaatttttttttgagaygaagtctcactctgttgcccaggctggagtgcggtggcatgatctcggctcactgcaatctccgcctcccgggttcaagtgattctctggctcagcctcccaagtggatgggattacaggcgcgtgcccccatgcccagctaatttttgtattttttgtagagacctggtttcaccatgttggccaggctggtctcaaactcctgacctcaagtgatccacccacttcggcctcccaaggtgctgggattacaggcgtgagccaccgtgcctgggcatgcttttttaaatatactaataactaaatatttttaataattttcaattttcatttccaatatggtaaaaatggatagttctaaaccacataaacaaaagccctttagagtgcttagtaactttgaggtgtaaagggatcctgagcgatgtttctttatattaatagtttgtgttgctattgg

SEQ ID NO: 730385 - DNA, 624 bp, Homo sapiens
ttcggtgggggagggagggagaggggcgtgggtggaaaaactacctatcagctactacgcttactacctgtgtgatggcaccatttgtacaccaaacgtcagcaacatgcaatttacccatgtaacaagcctgcacatgcacctcctgaatctaaaataaaagttgaaaagaggaaaattgttcctcctgagggtagatcttcataggaagaacagaatactctggcrtatttcaaaatgggtcattgttcctcctcccctaacagaagtatgaggggtcttttctcctgcttttacaatgaggacttgacagacctcttagaggtaaaaccaacaaaagtgtgggaaccccctccaataactgggtccccaggagttttgacctctcagatttgtctataccaagccttcagtaattcttcaattacagtaaacatttcccttctctgatattggttcctccagaggttgcaatggatggatttcttttacaataagttgtgattccctctacttgcctgttggtctttccaatttggggagctgcagtttgccctgtgacatcttttaccaatcaagactgctgagttttcagtttattcagctttttacttattgtcggga

SEQ ID NO: 730386 - DNA, 640 bp, Homo sapiens
agtttttaaggacaacttggtgggtggaggggaagccagtgagccagcagtgctgattggtcagagatgaaatcaaagctgtcttcttgcggagagtcagttcctgggtgggggccacaagatcagttgagccagtttatcgacctgggtggtgccagctgatccatcaagtgcaggatctgcaaaatatctcaagcactgatcttgggagcaatttagggagggtcagaatcttgtagcctccagctgcatgactcctaaaccataatttctaatcttgtggctaatgttagttctacaaaggcaatctaatccccagacaagaaggaggtctgctttgggaaagggctgttatcgtccttgttccaaactataaactataaactataaactaaatttcccccaaagttagttcaccctaygtcctggaatgaacaaggacagcttggaggttagaagcaagatggagttggttaagttagatctctttcgctgtctcagtcataattttgcaaaggtggtttcaattttccaggggagcaatgaggctcagagaggggaagcaacctgccctgcatctcacagctagaaagcagtggtgccgagaattaaacagagtctggacgtttccatgacatag

SEQ ID NO: 730387 - DNA, 606 bp, Homo sapiens
attgggttttccatttctgagttacttcacttagaataatgacctccagctccattcaagtttcattcttttttatgtttgagtagtattctgtgggagtatctataccacatttcctttatccactcatcaattaatgagcacttaggatggttccacatctttgcaattgtgaattgtgttrtaataaacatgtgcatgtgtctttttggtatagtgacttcttttcctctgggtagatacccagtagtgggattgctgaatcaaatggtagatccaccttcagtttttaaagaaatcgccatactgctttccatagaggttgtaatttacagtcccaccagcagagtaggagcattcgcttttcgtgacatccacaccaacatctattgttttctggctttttaattatgcccattctggcgggggtaaggtggtattttattgtggttttaatttgcatttcactgatgattaatggtattgaatattttttcatgtgtttgttgccatttgtataccttcttttcagtaatgtctattcatgtcctttgcccccttttggatgggatatttttttcttgctgatttgtttgagttccttgt

SEQ ID NO: 730388 - DNA, 623 bp, Homo sapiens
attgtcacttcaatgcatttcagaacttttttttcttttttctttttttttttttgagacggagttttgctcttgtggtcctggctggagtgcaggggcatgatctcagctcactgcaacctctgcccccagggtccaagtgattctcctgcctcagcctgtcgagtagctgggatygcaggtgcacgccaccaagcccaactaattttttgtatttttagtagagatggggtttcaccatgttggtcacgctggtctcgaactcctgactgcaggtgctccacctgccttggcctcccaaagtgctgggattacaggtgtaagccaccgtgcctggcccatttcagaacatttcatgaccccacaatgaaaccccagcagaagggaaaatgtaatggtgcagccattgtggaaacagtctggcagttgctcgaaagttaaatctagaattatctcatgactcagcaattccactcctaggttcctactcaaaggaaaagaaagcagaggctcaagaaggtattttacaccaatgttcacagcagcactgttcacagtggctaaaaggtaggagcaacccaaccgtccatcagtggataaatgggctgggcgcggtggctcac

SEQ ID NO: 730389 - DNA, 541 bp, Homo sapiens
gaagaagcttccaggtttccacataaaagtggtggctgtatcgatcacatcctactcacatctctaaaaatctacccggatcaaaaaggggaaaataaaaaaaaaacctatgacttaggtctagagtaaaactaggagacagaacaataaactccaaataccaaagaagtggggaaatgagcagggtccagcaggagctacatcgaagagtggcttgtgcggaatcatactgattagggatcacccaaggccagaccccaccccctccaccacctgcccctcaacagagcactactgagtgtaggttagagcactggcaacagggtggttaaaggaaggactacagaaaagtacttgggtccagcaatggcaggctcaggaaggcaccatgcaygaaaggaaggggggtaccttcaaaagcagaagtgtcccttaagcggctgtaaaggggtggaagcagctaatgaaaaagagtcttcattaagctacatggagctgaaaaatcagaaagtggtgattctgcccttactaaagcaacaga

SEQ ID NO: 730390 - DNA, 512 bp, Homo sapiens
tttttacactgtaattagagttcaaacttccatagcgcctagcctaaaattaaacccagaattatgccaatttatgcctgctatatatgcacacacaaaagacttataatgcaatatactaaaagaactaaaggtaggtgggtttttccttgaaggaatcatagctacattattttcaagtttaatctgttacattcacctgcctatcaaataaatgtagcacttaaacgcataaaacaaaatttgatttagtgacaaaaagccattagcttctaatttaacttcaaaacgcttttcaaaaaatctaccccatctaattctaagtgaaccagaccacacttgataraaaactgttgttctaaaaaccatacgtacttaacacaaacagtaaacatatgagaacatttagtcttctattaatgtcttacaaaatatttcaatgtggctggttataatttttttttttttaagggacagggtctgtcaccgcggctggagtgcagtggtgtgat

SEQ ID NO: 730391 - DNA, 551 bp, Homo sapiens
ctctccatctgtacagctagcaccctactcatctcttaactagatactgcaacagcctcctaccggctctttctgcttctaccttggcctctgttgcacccattctcctcactggatgcctcctggatcttttaaaatataagctagaccatgtcaccctcctccattaaactctacgatagctctactttacacacagagtaaaaaataagctccttaccttagcttacaaaatgctaagatgccttgactcctgcctggttccatcttcgtctagtaccattcttccccttgtccatgctggcccagccacactggcctttttgttccttgaacaccaagctctttcctacktaacagtcttagtactagctgtccttgcagcctggatgctctttcctccggatatttgagatggagtctcactctttcacccaggctggagtgcagtggcacaatcgcagctcactgcaacttccgcctcccaggttcaaggcgattctccctcttccacttcacaaagagctgggattacaggcatgcaccaccac

SEQ ID NO: 730392 - DNA, 228 bp, Homo sapiens
caaatgtgcctctgagacggggcagtgcctgaatcctcaaaacagaggtggtagcrgtggcagaaaccaggctggaggcttcccctggggagttcaggacttgactaaccattgttcattctgccagaagcaaaatgcaaactatgcaaagcatttcagagctgtgctcccacccatacgcccttcctgcctggctctgcagctcactccccttgcctgcctacagtg

SEQ ID NO: 730393 - DNA, 621 bp, Homo sapiens
tcgggcatctccagatgattccctgaacaaattgttttttcttggcttcaaaacctttcaagatgtatatttctttgtaaaagaaggacatgccaattgtaactttaagtgagcaatccaaatccagctcctaaaaccgaagtattttaactctcattctgataatatttattttctgaggcaaagaagaaagacaagattagatcaattgtttctctgcccactccatctcttccaacctgccttctcccctttaatcaaatgtataaatactaagcctcctgaaacctcttcagagaaaacacaaaccacagaggttttttgcaactcatgtattcccagggtgcactatcaggctctggctcaataaaactcaactggtcaagacycttgcctcagtcagtcattctggataaccaccaggagtcctgcaaagcccttcagtaatctattgcctgcctaggtgatgtgtacctagatgagtcatatcttcatgagccaaacacttgtcttccttttctgtctttcccaaccctaccactcagtgctgtgtgctctgatctgaccccagttcccaggttgtttgtataggtctaagaaagcaagaccaggaggggcagg

SEQ ID NO: 730394 - DNA, 658 bp, Homo sapiens
ttcagcactgggtaaagcagttaagtgtgcttgagaagcttcaaaaatctgttcttttagcttgcttaagtctaaacttaaattatcttcacttccttgtaaatggcattttactgattcccagttgtgaacagactcattatgttggaatggagttatacaaaaatcagaagtattccaatcasgttgcatttgtaatctatgttctaaactcataattctatctcccatccatgtaacagaagcacatcatgtgctgtaggctcattctggcagcccaacctggcattgtatttacacaatcctgcatgctcttttatatttacaataatcaggagcatttcatcatttgttctgtagcaatagtttcagggcttctccctacaggactacaggtgcgcgccaccatgcccggctaatttttgtatttttagtagagacagggtttcaccatattgaccaggctgatctcgaactcctgaccttgtgatctgcctgccttggcctcccaaagttctgggattacagatgtgagccactgtgcctcgccaataattaacacatttctttgagtttttgtaattccagcacaagagaaaccatttgatatttgaagaatggctgcacaccagtgaaaacatctgtagattgcaccaca

SEQ ID NO: 730395 - DNA, 572 bp, Homo sapiens
acaggtgtatacagagctcgcctgggctgtcgcccacctttcacactgcccctcttaccccgtcaccctcctgtgccaggttcctgccacacgggccttcgtgaccttcctccaaaaggtcagactagcttctgtgctatagtctgtgtctgtgttccctctgcggggaaggcactgctcccatcctgcttgtctccttcttgttattcaggtccttttggggaggtttttgctgatcagccaatctgaaagcgacccctagtctttttctatcacatcaacctgttccattttckatagcacttgttacgtgtttgtgtatttattgtgtagtgtctgtttcctcccattggactgttcactatgtagttaacatagaggactggacgcggtggttcatgcgtgtaatctcagcactttgggaggccgaggcaggcagatcatttgaggccaggagttcgagacaagcctggccaacatggcaaaaccccatctctactaaaaaaaaaaaaaaaaaaaaaaaaaaaaaaaaaaaaaaaaaaattagctgggcgtggtgacaggcacctgta

SEQ ID NO: 730396 - DNA, 641 bp, Homo sapiens
tatctgcatgttccccctcccataagaggtttgagcagcagtgcccaaaaagatgagccacacccctattgcacatcctgtgaggggagtcagggaactctcctgtatcacaggtatttggaaagtgactccaggaagggtatggggaagtgagacaggggagggaaaaaggccagtcaagktgcattaaaaagaaggtgactattgagggcaactggggctcagttctactgaagaccttggaggaactctacagcatatgtcccagagttgtcctgcctgaggaacaaggaagctgggctttctctctactgtatttcactggtcattggtcaagggctgctcaccaaggaattactttcctaaggacttcaggtcttgtggccagagaaagctcttagacagagtcccaggcatttgcagaaagaggctgtgtgtgtgtgtgtgtgtgtgtgtgtgtgtgtgtgtgtgtatgtgagtgtacataagaggagtctgtaaactccttgagtatgagaccttgcatttgtatgtaacttctacttgtaaataatgatttacaagtaaatgcattgattttatgcatttatgaaggaaactgcccagaaaaagatgcttcctgaattgtttataggaactgt

SEQ ID NO: 730397 - DNA, 625 bp, Homo sapiens
attcaatgtattaatgaaggtttccatataagtcatttaattcattcattctcagtgggcagagggatgggtgtgtgtgtcacttcccccctaccccagcatttggcagcatctggagacacttttggctgttataactgaactggggagtgtgtgtgtgtatgtgtgtgtgcatgtgtgtgcatgtgtgctactggcattgtgggtagaggccggacctgttgctaaacatcgtaccatgctcagaatcacaacaaagaattatctggccccaaacaccaacagtgccaagttcggggaactctgctctaatttgatttcaaaatatctattttaaatagataaacaggtakcagaagtttctttactctagatataagaaaacacactaggagagattaaatgccttatctaagtccacccaacataaggtagtcacagaaccaggaattcaaccctaggcccttgattccaaatccagataataactagactatttcaatcactaaggtgattattgtgcttttaaaatagtatctaaacaatagccttatatttgagccttggaagtctgtccacactctactcaaaagtaatatactggaattaaggcagaaaatatttt

SEQ ID NO: 730398 - DNA, 573 bp, Homo sapiens
gattttctggctgtagaagaaaaaaagtggaggaatttaacttcatagaaattcatcaaaagtatcctccaaaagttaaaaggcaatagtttgtaacaaaacagagaaaacaagattaattttaatacacatttgtaaaagtaaatatttttaaagaatccaaaaaaaaccagcaaaaaataagaaaaccacttccataaaaagaaaacaaataacttatcaacatgtgcaagagatgttcaatctcacccttaattaggaaaatgttcattaaaagtagaaatataaagattgacaaagatttaaaattcaatagtacaacactacttttggtaaagttactggaaagcctgtaccatcaaatcagctaatagaaatggactttctatcataattgaagttgtacagtgmaaatggtctttgattcttcaattccacttcacagaatttgtcctgcagaggtgtctacacttgtaagcaaaggtcactgtaaacacatgccaactgcctatggaaacctttacataagtgtccaatataggaatgagttgaataaaatgtgaaatagaaaaa

SEQ ID NO: 730399 - DNA, 538 bp, Homo sapiens
ggaaaaagcttcatgatattgaatttcagaatgatttatttgttataactacaaaagcataggcaacaaaaaagggataaattggacttcatgaaaattaaaaacttttatatatcaaaggccattatcaagaatgtaaaaaggcaagctatgacatagggaaaatatctgcaaatcatatatctaataagggattaatttccagaatacatgaagaacactacaaatcaaaaacagcaaaaacagaaaagcccaattaaaaaatggacaaaagactgaaagagggattttattaaagaagatatacaaatggccaatgaggacatgcaaggattctcaatataactaatatttagagatttgcaaagcaaaaccacggtgatacatgacctcrcacacattaggatggctttgataaaaacaacatgaacaacaacatcacaaaacaagtgttttcaagtacgtggaaaaattgaagctctttgtgtgttgccgatgggaatgggaagtgttatagccactgtggaaaaaatggcat

SEQ ID NO: 730400 - DNA, 580 bp, Homo sapiens
ccaatttgtggtggaatgcaattgattttgtacagagacttgaggaggcagtgattgatttacatagggtccagggtattgttttgaccaggtgtgctgtttacgtagcccgagaaaagactggccctcccaccttaatcttttattatgccattgtggcttctacctggtggtcatcatgacacctgcacatatggtgacaaggaaaaaagtgcaggaactgccatattgggagtacctggctcttagttgcctgcatctgtatatgcttatctatgcttgcagcctgatcattcagtctgttttctkttagaaatggtttgggggctgcgttttattaaaggaaaattccaccaagaattcttttaccctttctagctgcctaaaaataatttctcaataactcctgtattaggacccctttaggaaaacagaaaagaagacacagactctcctgtaggaaagtaaccatagtttttttgtcatggagccccaagagttgcaagtgaacggatttctctcaggtctaaaactctgctcttttctccattgtgttacctgacctctttgccttttacat

SEQ ID NO: 730401 - DNA, 590 bp, Homo sapiens
aagggatccctaggaaaagcagagaggcaagtaaaggttagccacctgcggtttccttattcctgtagctttttttctctgccttttttccacctggctactctgggacctctcccctgtagttgctccgcctggccgcccaccccccagcccctgcaggcagtggggctgttgacacatcccaccatcctgactccggaactacggagatcacagggctttattattaattggtgatgagaagaagtagggatttttttttttttttttttcctgatgagaaaccctgggctcaagggtggatagttgtctcggccagagtcacatgggccttttaaaagctcaagcttgtgtttcttttcactatggattctctttactcagataaggcaggaagcccactgatctacatatttacccagagaaaatgcasagagtggagattggcggctggtcaggtgtggtgccccgccaccagggcctcccatcagctaagccaaattaagaggctttatcctttttttctccctggacggtccataggcctgaaaagctgctgtgatcttcctgtcaagctggtgactgagact

SEQ ID NO: 730402 - DNA, 643 bp, Homo sapiens
catcttttaagctcactctgggtcgagagctctgctgccacttcaatcttgccactcaagataattataccattcggatggttaagtaccaccagctggcctctatcatttcaggattctattatccccagtcctatctgggaactcaattccataacagcatcttttatcatcaaccatgacctacagaggagacctaccactgagcttctcagtgatgctggtacccttctcaccagagaattccatgtctctttaataaatggcacatctgaactggaattttgacatctggggggtttccagccctacataatatggccactgtagcatacccatttccctgagcagtttgatccctacttctaccatctgccatggcagctgtggcatttttacttctcttagcgtgggccaccacttttccacaaacttctaaaagccgtcatagaagcatgatagcaatgtttcccagagtccttgctggaatgttcgatcctctctcyctggagactgctctcaaatcaataaactctctcatacaaatttactttccactctccttttgttcagcatcctcagaaggcagtcccatcagtactgtcttgttccagctgcttcatgttggcagggttctacagct

SEQ ID NO: 730403 - DNA, 516 bp, Homo sapiens
tgtattgatttttttccctgtttatcctgcttgggattcatttagctttctgcattgtaagttatagtttttaccaaattcggaatttttttagtccttattcaagtgctttttcttcctctgtgactctaactatacgtttgttagaatgctagatactgttccataggtcagtgaggttctgggtttttcctcagttttttttttcccatttgtctttcattttggatagtttatattgctgtgtcttcagattcatggatcttttcttctacagctaagcttatttgttcaatttttcctttcagatgctgtatttttctgctktagaagccatattggtttctattttgtattttccatttttctcatcatataaatattttcagtgaaatcttttaaaatatttgtaatagcatttaaaaggctgtttgtctgctacatctgtcttctctgtcatttctgggactctttgtctattaatcatttttctccttgttaggtttctgtgtcttt

SEQ ID NO: 730404 - DNA, 614 bp, Homo sapiens
gttcttaagactctggtacaaatgactttaaacccttttgtatatatgtaatcatccaatcttttggcttttagttctggtttcccataaagatgttatactacctttttcaattatggtaatggcaggattttcaaagaaggatagtctataccaacaagctattctatatacataacttcaatttctgtcctctaaatcctggggaatatttgccctcttgaatgcagaaaggcagcccatctgcttctttgggtaatttacttcattattaaattgttctataaggtgataggagaacttttcagaggagttttcatcttaycagaaacatgatataccattggacttcatgcattttcttgttttcatttcttacaatacatagctgactattttctcctctacatacttttgcatggctaggggtcaactcctatcgttagaaaaatgtagattaaaagtggcactattaatgtaagagttaactttgcttggatttcatgtgtggaagttcagagataattaattgggctttcattgtagttttgcctttttcatttcaatgtataaatctattttcagggagggctggctagcaggacagcagaaat

SEQ ID NO: 730405 - DNA, 614 bp, Homo sapiens
gttcttaagactctggtacaaatgactttaaacccttttgtatatatgtaatcatccaatcttttggcttttagttctggtttcccataaagatgttatactacctttttcaattatggtaatggcaggattttcaaagaaggatagtctataccaacaagctattctatatacataacttcaatttctgtcctctaaatcctggggaatatttgccctcttgaatgcagaaaggcagcccatctgcttctttgggtaatttacttcattattaaattgttctataaggtgataggagaacttttcagaggagttttcatcttatcagaaacatgatataccattggacttcatkcattttcttgttttcatttcttacaatacatagctgactattttctcctctacatacttttgcatggctaggggtcaactcctatcgttagaaaaatgtagattaaaagtggcactattaatgtaagagttaactttgcttggatttcatgtgtggaagttcagagataattaattgggctttcattgtagttttgcctttttcatttcaatgtataaatctattttcagggagggctggctagcaggacagcagaaat

SEQ ID NO: 730406 - DNA, 615 bp, Homo sapiens
ttagtgtataaaatttaaaactatgtggatttggccttctaccaatctaaatattcatattgtttcatttcatacttttgttcttattttagtattacatttttgctaatagtaatactgtagcacgtgctcatagagggctttctttggggttcatggacaacaacaggctgaaaatctttgctcttggattagagaaatgtggtgtgttycacagctgggcgttacacacttacatactacatagttatctccctgtcttttgaggaggtttgctttgcttttctttctggcctggatatctaggctaaaagccctctcatggaagagttttctttctttggaaagtaattcttaagactttaacctgggaagcaaatgtcagtgttcctagatgttttggttttggtctgggagaaggagggccaacactgacacagcagttgctgtttgactgatggtattttaattaattgtacccatgaatgtcctgctgtttgaatttgctgactctgagcttggagtttctctggagttcctttgggaagaaaggttctcaccttggcaatggctttctctcaggcctactttcggttgaagttttttcactgtagt

SEQ ID NO: 730407 - DNA, 563 bp, Homo sapiens
ttgaattggtagataactctgggctgtatgaacattttaacaatattatttcttcacattcatgaacatgggatagcttgctatttaatgtgtttaatttatttcatcaatactttatagttttcagtgcacagatcttttaccttcttagctgaattattttaaagtattttattttttggtagctattataaaagggatttttttttagttctttttttggaaagtttgttgttagtgtatagmaatgctactgataatcgtatattgattttgtatcctgcaactttactgaattgatttattagttctaagaggtttttttttctttttcttttttttttttttttgaaggagtctttgggtttttctatttgttaagaccatgtcatctacaaacagggacaatttagcatttaatttccaatttggagaccttctagttccctttagttctttcttttgtctatttttttctggctaggacttctagtactacactgaaaaatgtgggaagagtgggcctccttgccttgttcttgatcatagataaaagctttcaa

SEQ ID NO: 730408 - DNA, 646 bp, Homo sapiens
tattgtgttgaggtacattccttctattaccaatttgttgagaggttttatcatgaagggttattatgtttgtcaaaggattattctgcttctattgatatgatcatatggtttttgtctttcattccgataatgtggtgtatcacaattatagacttgtgtatgttgaaacatccctgagataaacaccacttgatcataataagwaatccttttaatatgctgcataagttctttgctagtattttgttgagagttttcatatttatgttccccagggatattgacctgtaatgatcttttcttgtagtggctttgcctggtgttggtatcagggtaatgctggccttgtacaataagtttggaagtattccaatttctttaatttattggaagacttcaaaaacattggtataaattattctttagatgttagaattcagcagtaaagccatcaagtcctggcttatctttgctagaagactttttattgcttatgtaatttccttactcgttattggtatgtttgggttttctatttattcatgattcagttttagtaggtagtgtatgtctagtaatttatcaatttattctagattatccaatttgttggcatatgattgctcataatagtctcttatga

SEQ ID NO: 730409 - DNA, 646 bp, Homo sapiens
tattgtgttgaggtacattccttctattaccaatttgttgagaggttttatcatgaagggttattatgtttgtcaaaggattattctgcttctattgatatgatcatatggtttttgtctttcattccgataatgtggtgtatcacaattatagacttgtgtatgttgaaacatccctgagataaacaccacttgatcataataagaaatccttttaatatgctgcataagttctttgctagtattttgttgagagttttcrtatttatgttccccagggatattgacctgtaatgatcttttcttgtagtggctttgcctggtgttggtatcagggtaatgctggccttgtacaataagtttggaagtattccaatttctttaatttattggaagacttcaaaaacattggtataaattattctttagatgttagaattcagcagtaaagccatcaagtcctggcttatctttgctagaagactttttattgcttatgtaatttccttactcgttattggtatgtttgggttttctatttattcatgattcagttttagtaggtagtgtatgtctagtaatttatcaatttattctagattatccaatttgttggcatatgattgctcataatagtctcttatga

SEQ ID NO: 730410 - DNA, 618 bp, Homo sapiens
catggattttcatgacacaaccacagagcaaaaatgtcacagtcaaactgtgtttatttacactttatcaactgtagagtcaagccaaaaatgccttcaatactcacattttaatatcgttttaatttgtgctgttaatgaacacttttacagctctattttaaaccgttgcaaacatacccataaaattgtgtttgcttcgcattttaaaaaccccactgcatttcccaagcaaataggcatttatgcaaacaaatagcctaacacgtgtctaactgcctgtttcaaagcaattattatttgtcaatacaaatgtccacttgagtagtgcaaagaaaatgctcccagaaagtttggcaggctctgttctctgcttcaattctatcagtattcttttcattaccacrttaggatcaaatttctagaaattcaaggaagaaaatgtagaatatgatgctaactttcttgccactaagagaccatactcactattttattaagttttgctaatgtttgtcaagccccccaaaatatagttttatgctcatctaggtattttgctcttattcagttttgtcttaagtaaaaatacatttatttggggatttttggtataac

SEQ ID NO: 730411 - DNA, 617 bp, Homo sapiens
attgacttagactactttccaataagtaagcaagtagataagttaataaataatcaaataaataaataggtaagtgtatctgagctttgaacatcctttctctcaggaatagggcccacaataacttctttagtggatgacggcttttagtagtagttccttsaacaacagctgctccttccaggtcactaaagctcacagaataggtggttcccacagagtgcctcagccagcagttaccacaaaagttcctgtccatcttttttcaaagagacctgggacccttagtgacacaatcctgtctttcagcaccatgaatagaggcagctgtcatatgtcctagctgtgccctctagcggcagctggaatgttacccggctctttgaaaagggtaattaaaatacctctcagtatttgaagtcagtgagtttagggacatactaggagaggaaagtcttccccaacgacctgttctctcagtttgcctatgatgccttctatccacagtgctcaaggtaaaacaaactgctaataatgagtaagccattttaagctacattaaaagagggttgagggaatttctgaaaatatatacaaattttcatccaacctctcta

SEQ ID NO: 730412 - DNA, 644 bp, Homo sapiens
ctgtgccttttaagtggagtgtttagcctatttatattcaaggttaatattgatatgtgaagattttattctgtcattatattggctagttgttgtctagatttgtttttgtagttgctttatagtgtcaataatctgtgtacttaagtgtgtttttgtggtggtcagtaacagtctttcatttccatgtttagcactcccttaaggacctcttgtaaggcaggtctggtggyaatgaatttccttactccctttcagagatgccagtgagtcataggtttagtctcttcacataatcccatatttcacataattccttatttcacttttttaatttgtttacattatttttgtctgtctgatttgatttgaagaaccactcttcaagctctgaaatttcttcattagcttggtctattctgctgttaatactttcaattgtgttatgaaattcttatagtgagtttttcagatctattagatcagtttgttttttttcttaaaaaagctatttcatctttttactggattccttagatttcttggatcgggtttcaactttctcctgaatctcagtgatcttcattgccatccagactctgaattccatctctgtcattttagccttttcagcctggtttaaa

SEQ ID NO: 730413 - DNA, 468 bp, Homo sapiens
atcattacttatgttaatttgcagctaatttgctacatagtatagactcttctgcctatacatgtctttaaaagaatccatttttatatgaaatgtgtatcattggtgtcaagttttttatattcagagagtgaagcttttaatttctatattttatgtcattagtgtgcygaacacttctgctcctggaaagcaatgaaattaatcatttttggcttcggctgctgttgtgatgcacataaacagcaatcctgttgaactcgagtgagaatgctcactgtgctcatactaagccaattagtgcccagttatttattttcactgtagtggcgagtgtgggagtggtgggggtggggaggcgggggagatgtggagagagagataagcactactagtagagaaaagcagacataaaattggcagaatatttttcagaacaaaaactgtggtagtaagaggaatcaatgt

SEQ ID NO: 730414 - DNA, 468 bp, Homo sapiens
atcattacttatgttaatttgcagctaatttgctacatagtatagactcttctgcctatacatgtctttaaaagaatccatttttatatgaaatgtgtatcattggtgtcaagttttttatattcagagagtgaagcttttaatttctatattttatgtcattagtgtgctraacacttctgctcctggaaagcaatgaaattaatcatttttggcttcggctgctgttgtgatgcacataaacagcaatcctgttgaactcgagtgagaatgctcactgtgctcatactaagccaattagtgcccagttatttattttcactgtagtggcgagtgtgggagtggtgggggtggggaggcgggggagatgtggagagagagataagcactactagtagagaaaagcagacataaaattggcagaatatttttcagaacaaaaactgtggtagtaagaggaatcaatgt

SEQ ID NO: 730415 - DNA, 368 bp, Homo sapiens
ctccaggttgtccaagcaatggggaatggtcaggtcaggtgaacgttaatgtaacccaatgttctagtcaacaggagtgcttggcaagaggttcttgcctttaacctctatcctttaattgcagatatgttagtgttagtttctctctccctctcatttttcacaggagtatgtaacagttaatcaatttttaaattkgtacttggtaattctccttttaagttattgatatctaaaacatcttttggttacctttcctaatcttcttgtttaagttttaaaaacaggcctcttaacaggcaaaaattccataatgctaaaaaatagctttgatgaaacaaattaggaaaatcaatcatgccacttag

SEQ ID NO: 730416 - DNA, 482 bp, Homo sapiens
tcagtggagctggggagaatgcaaccatgggcatctcagtaaggatatcagaaatgacattataaataatgtgttagattatttttaaggagtttcaataaatgggctttgcatgggttgcatgctataagggagcaagaataattctacgactgggtatctaaataaaccttatctggaaggcgaaaaaactggaaggagactaaagctataattggtaaagaagcagaactcatttatattagctggtagaaggaaagatttgatatttcagggctctcacagtgaccttgtttttgcttagacaaattttatagtcttattttttgtctcactccatcrtagtcacagaatatgtgatgtgctgccctatgaagttgttcatgttaaacaggaaccatgtcataggtgtgagtgccaggccagcccctaaaagcatcaggcctagctgaaagtgtcaggccaggtccctgatattcatg

SEQ ID NO: 730417 - DNA, 592 bp, Homo sapiens
gatgatttccaatttcatccatgtccctacaaaggacataaactcatcatttttatggctgcatagtattccatggtgtatatgtgccacattattaacttctttcctgtatatctgggttggggggattgagtttcaacgtgagtcaatttttagactagaagttctcaactyccgacaatttcaccttctgggaatatttggcaatatctggggacattattagttgtcacaactggtgggggaagctttgactggcatctagcgtgtagagaccaggggtggtaccaaaccttctacaatgcacagagcaggaccccccccgttgagcgaaatttacctgactctgaatgctaacagtgccaacgttgagaaaccctatgttccttgattgttgcctcagtttccacatgttttaaagaagccattttctaatctgtgatattaagattacttgattgaacatataagatctttgatgtgcttagggaatttttcggtttagatttctatgtatatatgttgaatatatatgtctccacatatgaagaaatctaaacactaaagattcatatgtgtgttcatgtatata

SEQ ID NO: 730418 - DNA, 630 bp, Homo sapiens
cttctccagcctactaaaacctaattttaacatagactatctcatttcaatttttaaagatttttctaacagcttttttggggaaaaaagatttataccagtttatttactgaaacgaagataatagatttgtttgtaaatatctcctaattatgcaatatggaaacttcaaaggaaagtgagcgtctgtttgttgytgttgttttgttttgtttcgtttttgagatagggtctcaatctgtcacccaggctggagtgcagtggtgcgattgtggctcactgtagccttgacctcctgggctcaggtaatcctcctgcctcaacctcctgagtagctggggctgcaggtgtgcaccaccatgcccagctaacatttatattttttgtagagacgaggtctcattgtgttgcccaggctggtctcaaactcctggactcgagcgatcctcctgccttggcctactaaagttctgggattacaggcgtgagccactacgcctagcctccatttttaacatcttataacgcctagaagagatcacttgatttccaggcacatcgtgttctatcactggtttcttcaaaatttattagagcaattttgtcttgtgtatatttgttaataattgt

SEQ ID NO: 730419 - DNA, 630 bp, Homo sapiens
cttctccagcctactaaaacctaattttaacatagactatctcatttcaatttttaaagatttttctaacagcttttttggggaaaaaagatttataccagtttatttactgaaacgaagataatagatttgtttgtaaatatctcctaattatgcaatatggaaacttcaaaggaaagtgagcgtctgtttgttgttgttgttttgttttgtttcgtttttgagatagggtctcaatctgtcacccaggctggagtgcagtggtgcrattgtggctcactgtagccttgacctcctgggctcaggtaatcctcctgcctcaacctcctgagtagctggggctgcaggtgtgcaccaccatgcccagctaacatttatattttttgtagagacgaggtctcattgtgttgcccaggctggtctcaaactcctggactcgagcgatcctcctgccttggcctactaaagttctgggattacaggcgtgagccactacgcctagcctccatttttaacatcttataacgcctagaagagatcacttgatttccaggcacatcgtgttctatcactggtttcttcaaaatttattagagcaattttgtcttgtgtatatttgttaataattgt

SEQ ID NO: 730420 - DNA, 630 bp, Homo sapiens
cttctccagcctactaaaacctaattttaacatagactatctcatttcaatttttaaagatttttctaacagcttttttggggaaaaaagatttataccagtttatttactgaaacgaagataatagatttgtttgtaaatatctcctaattatgcaatatggaaacttcaaaggaaagtgagcgtctgtttgttgttgttgttttgttttgtttcgtttttgagatagggtctcaatctgtcacccaggctggagtgcagtggtgcgattgtggctcactgtagccttgacctcctgggctcaggtaatcctcctgcctcaacctcctgagtagctggggctgcaggtgtgcaccaccatgcccagctaacatttatattttttgtagagacgaggtctcattgtgttgcccaggctggtctcaaactcctggactcgagcgatcctcctgccttggcctamtaaagttctgggattacaggcgtgagccactacgcctagcctccatttttaacatcttataacgcctagaagagatcacttgatttccaggcacatcgtgttctatcactggtttcttcaaaatttattagagcaattttgtcttgtgtatatttgttaataattgt

SEQ ID NO: 730421 - DNA, 586 bp, Homo sapiens
gagaagaaagaggtgcattttttccaatcatgagctcagcagtttcctgcagagtataataaaggggaaggaaggtgttgactactgcaagctgggtggggaaaggaggtcccagtgtgtagacgtgagatccttagaggtgagatagaagcatagaaaggtctctctctctctctctcaagacagggtctggctctgttgtccaggccagagtgtggtggcacaatctyggctcactgcaacctctgtgtcctgggctcaagccatcctcctacttcagccttctaagtagctgtgactacaagcacacaccaccacacctggctaatttttgtatttttagtagagatggggtttcaccatgttgcccgagctggtcttgaccttctgagctcaagtgatctacccgcctcggcctcccaaagggctgggattacagatgtcagccaccacaccctctaggcctcatgttttgaggtcaggcacacttcacgttgcccgctggctatcccagagaagttaccaagctttttggaagctcaaactcttcattagtaatgctactgaggattcttttttcagagag

SEQ ID NO: 730422 - DNA, 663 bp, Homo sapiens
ggaaccatttacctatatttccaagcagtccattaataactgtgttattatcagcctttaatgtattgttgtcctgattgatgaattcaagactatcttgtagcctatggagggtgagaagaaaattaattccaaattcattttatggtttaaggacaattctttgtacatcctgatgaaattttaagtgcaaaaacagtttcttcctattagcattacaaattaactaacataatcatttaaatcagaggttggtaaactatagcctggagtgccagatctagtctgctgcctctttttgtaaataaagttttattggaacacagccatgcccattcatttatatactgtgtatgaatgctttgatgctgcaacagcagagctgagaaactacaacccattgtctggctcacaaagccaaaaaaatatatatatatwtttttttattattatattttaagttttagggtacatgtgcacaatgtgcaggtttgttacatatgtatacatgtcccatgttggtgtgctgcacccattaacttgtcatttacattaggtatatctcctaatgctatccctcccccctcaccccaccccacgacaggccccagtgtgtgatgtcccccttcctgtgtccatgtgttctcattgttcaactcccat

SEQ ID NO: 730423 - DNA, 534 bp, Homo sapiens
tgcatgaaccaacaaattctggttttcttttcttttttttttttgtaagtttgagtcaggattaccgttgcttacaaccaaagcttctaatgatatggtcattaatagaggatccatttttaaagagagtaaagggagcacaagaactcaatgccagtaatgttrgaggctctgaataggttggataagggacagcctcaagatgtccatgtttgaatccctggaacctgtgaatgttaccttatatggcaaaagggactttgcagatgtgattaagttgaggatctggagaaggggtgattatcctggagtatatgagtcagcccagtgatctaaccacaggtgcccttatatgagggaggcagagggccatgttcctccagagaggggagaaggggatggtatgcagtcagctttgaaggtggtggaagggccagagactaggaatgcaaacagtgaaaggaacaaagctctggaattcagcaaaggcaggggattttccctgcagcttccggagggagcagagggagagtg

SEQ ID NO: 730424 - DNA, 552 bp, Homo sapiens
aacagattaatattctctgggtcattactccctttctccaccaatgaacacctctggggtctctcaaaagacaaactcccacctctgagccctggagcagctaccagcctccgtctgttcgatcacaaggaagagagggaaccaagcagccctggtactgtgcagtgacatcaatgcccaggatgcccaagactaactcctcaaggcttgagcaatggaccctacagccttgttaaatgatgagcatgatgagaaggtgacggaagggacacaacctgcrgccacatggttggcaggtggtaagacagaggaaggacttgcagttctagagttttgagtctgtcgttcttatagtattgagtcaaactgcttttcacatgatactattcacaagatttcatttaaattcaaaccaatcatcgcctcttggcaacttagggacagggtctaatctcttgatcttgaatctccttgctttaaattgaaagagcctctgaaacaggaacaatgcttccataaaatacttgatatgcagggaacacaaccaggact

SEQ ID NO: 730425 - DNA, 552 bp, Homo sapiens
aacagattaatattctctgggtcattactccctttctccaccaatgaacacctctggggtctctcaaaagacaaactcccacctctgagccctggagcagctaccagcctccgtctgttcgatcacaaggaagagagggaaccaagcagccctggtactgtgcagtgacatcaatgcccaggatgcccaagactaactcctcaaggcttgagcaatggaccctacagccttgttaaatgatgagcatgatgagaaggtgacggaagggacacaacctgcagccacatggttggcaggtggtaagacagaggaaggacttgcagttctagagttttgagtctgtcrttcttatagtattgagtcaaactgcttttcacatgatactattcacaagatttcatttaaattcaaaccaatcatcgcctcttggcaacttagggacagggtctaatctcttgatcttgaatctccttgctttaaattgaaagagcctctgaaacaggaacaatgcttccataaaatacttgatatgcagggaacacaaccaggact

SEQ ID NO: 730426 - DNA, 552 bp, Homo sapiens
aacagattaatattctctgggtcattactccctttctccaccaatgaacacctctggggtctctcaaaagacaaactcccacctctgagccctggagcagctaccagcctccgtctgttcgatcacaaggaagagagggaaccaagcagccctggtactgtgcagtgacatcaatgcccaggatgcccaagactaactcctcaaggcttgagcaatggaccctacagccttgttaaatgatgagcatgatgagaaggtgacggaagggacacaacctgcagccacatggttggcaggtggtaagacagaggaaggacttgcagttctagagttttgagtctgtcgttcttatagtattgagtcaaactgcttttcacatgatactrttcacaagatttcatttaaattcaaaccaatcatcgcctcttggcaacttagggacagggtctaatctcttgatcttgaatctccttgctttaaattgaaagagcctctgaaacaggaacaatgcttccataaaatacttgatatgcagggaacacaaccaggact

SEQ ID NO: 730427 - DNA, 552 bp, Homo sapiens
aacagattaatattctctgggtcattactccctttctccaccaatgaacacctctggggtctctcaaaagacaaactcccacctctgagccctggagcagctaccagcctccgtctgttcgatcacaaggaagagagggaaccaagcagccctggtactgtgcagtgacatcaatgcccaggatgcccaagactaactcctcaaggcttgagcaatggaccctacagccttgttaaatgatgagcatgatgagaaggtgacggaagggacacaacctgcagccacatggttggcaggtggtaagacagaggaaggacttgcagttctagagttttgagtctgtcgttcttatagtattgagtcaaactgcttttcacatgatactattcacaagatttyatttaaattcaaaccaatcatcgcctcttggcaacttagggacagggtctaatctcttgatcttgaatctccttgctttaaattgaaagagcctctgaaacaggaacaatgcttccataaaatacttgatatgcagggaacacaaccaggact

SEQ ID NO: 730428 - DNA, 589 bp, Homo sapiens
gttttctctgatgcatttgaagatgtgagatagatagatataggtctgagaaaataagcctgtttcttatttctttccagaccttgaggtaatagttttagtttttctttttaagtttaactcatttgaacacaatgtctttcctcagtrgtcaggagctgaagagtccatcagaaagcaaggtggtctctaagcctcttcatcacccttttcttttctttttactttttgagcagagtatcaattagagattgattattagattagcaggaaacactgcttggttccaatctcctctgcttctactgtgaactcaactcatatcaacaagctaattaaaatgaatcacaccctaagaaataaccaatcaccgatgcataggtccactctcagaaattaagtagtagccacttggcacaactgacctgagagtgagcaagattcagaagagaccttcagaagcaaatggtgctgaatgatgcatggtaggtgtagacaaatgtgtaagccatgacaggctgtcagctggccagcgcgcctcctgatgccttctctgtgaagtcacagcctctcctctctctgcagagcc

SEQ ID NO: 730429 - DNA, 610 bp, Homo sapiens
agaagagaccttcagaagcaaatggtgctgaatgatgcatggtaggtgtagacaaatgtgtaagccatgacaggctgtcagctggccagcgcgcctcctgatgccttctctgtgaagtcacagcctctcctctctctgcagagcctttaaatgtgagggcctggaggccctcttcagccctctgcaatttcctkttcgctctgctcttaagagttttcacctgcttttcatggcttcagtgaagatctccacagcacactcacaaatcttgcttccagtcctgaatcccctcccacaaattttagtcctgcatttgccaaattttttggatatctatagtcatctcaaattcaacatgttcagagccaaactcatcatcatttattgatttaaatttgttcattcattcattcgtttattagcactggccacaaatgaggataaggacctccctgacctcaagaagctcagagtctgatcctaaattggagagtcagaatttgtagatcaaaaaggatcaatgtgacttaactgcaataccctgtttgtgtacaaggcaactgaagccaaggaagatcaaatggcttgtttaagcttatattgctattgg

SEQ ID NO: 730430 - DNA, 610 bp, Homo sapiens
agaagagaccttcagaagcaaatggtgctgaatgatgcatggtaggtgtagacaaatgtgtaagccatgacaggctgtcagctggccagcgcgcctcctgatgccttctctgtgaagtcacagcctctcctctctctgcagagcctttaaatgtgagggcctggaggccctcttcagccctctgcaatttcctgttcgctctgctcttaagagttttcacctgcttttcatggcttcagtgaagatctccacagcacactcacaaatcttgcttccagtcctgaatcccctcccacaaattttagtcctgcatttgccaaattttttggatatctatagtcatctcaaattcaacatgttcagagccaaactcrtcatcatttattgatttaaatttgttcattcattcattcgtttattagcactggccacaaatgaggataaggacctccctgacctcaagaagctcagagtctgatcctaaattggagagtcagaatttgtagatcaaaaaggatcaatgtgacttaactgcaataccctgtttgtgtacaaggcaactgaagccaaggaagatcaaatggcttgtttaagcttatattgctattgg

SEQ ID NO: 730431 - DNA, 634 bp, Homo sapiens
tggggaggagcttccagcaaagaagggggcagttggacaggaacagcactgggcaggacagaggccggtgtgttgggtaaacagaaaggtcagtgccagaagcacagagcaaatctggagaggaacgcagggaccagcacatgctgagccttgcagaatagagtgagtgctctgtactttattccaagaagcacaggtagttactaaaggcttaacgccagggcagtggcatggctactgaggggagtaggagctgtggtgcatgygtggaagcagaaagcccaggtagggctatgaccacagtaacaggcaatggtggcttgagccagggtaacagcagtggaaatgggaatgaggttttcagaaggcagaataggtagaagttggtggtggatttgatagggtgggtggggttagagagaggaagaaatcctaatgcctcccaggagagcagtgatgtcatttactgggacagggtgccctggaggagagtctgggggtgagcagggagggaacagagcttatgtggaacacgctaggcataaatcacctgggaggcatccaagggatgtccaagaggagacgtcaagaaggcaacagacttggaactcagcagagggggctcggtgaagac

SEQ ID NO: 730432 - DNA, 634 bp, Homo sapiens
tggggaggagcttccagcaaagaagggggcagttggacaggaacagcactgggcaggacagaggccggtgtgttgggtaaacagaaaggtcagtgccagaagcacagagcaaatctggagaggaacgcagggaccagcacatgctgagccttgcagaatagagtgagtgctctgtactttattccaagaagcacaggtagttactaaaggcttaacgccagggcagtggcatggctactgaggggagtaggagctgtggtgcatgcgtggaagcagaaagcccaggtagggctrtgaccacagtaacaggcaatggtggcttgagccagggtaacagcagtggaaatgggaatgaggttttcagaaggcagaataggtagaagttggtggtggatttgatagggtgggtggggttagagagaggaagaaatcctaatgcctcccaggagagcagtgatgtcatttactgggacagggtgccctggaggagagtctgggggtgagcagggagggaacagagcttatgtggaacacgctaggcataaatcacctgggaggcatccaagggatgtccaagaggagacgtcaagaaggcaacagacttggaactcagcagagggggctcggtgaagac

SEQ ID NO: 730433 - DNA, 634 bp, Homo sapiens
tggggaggagcttccagcaaagaagggggcagttggacaggaacagcactgggcaggacagaggccggtgtgttgggtaaacagaaaggtcagtgccagaagcacagagcaaatctggagaggaacgcagggaccagcacatgctgagccttgcagaatagagtgagtgctctgtactttattccaagaagcacaggtagttactaaaggcttaacgccagggcagtggcatggctactgaggggagtaggagctgtggtgcatgcgtggaagcagaaagcccaggtagggctatgaccacagtaacaggcaatggtggcttgagccagggtracagcagtggaaatgggaatgaggttttcagaaggcagaataggtagaagttggtggtggatttgatagggtgggtggggttagagagaggaagaaatcctaatgcctcccaggagagcagtgatgtcatttactgggacagggtgccctggaggagagtctgggggtgagcagggagggaacagagcttatgtggaacacgctaggcataaatcacctgggaggcatccaagggatgtccaagaggagacgtcaagaaggcaacagacttggaactcagcagagggggctcggtgaagac

SEQ ID NO: 730434 - DNA, 641 bp, Homo sapiens
ttgctttaagccaggccagaagccaaagcgaatctggaattttgagtcgtgaaaaccaatgaatttcctttcctttaatttttgcttagggtcaggttttcaatgacttgccatagagtgaacccatgaattctaactaatagatacatgctattcctgttactcagaatgtcttcctgcctctccatctggaatatttaactgtggctcctcaatgtagccttttctgacttctctgggcacaggcctcccacccacagagcccagcatggccacatgtccactttggtacatgtctgctttctccactagcctgaggacaagggtcacgtcttgttcacttttatagtgctgattcctcaatatgtggctcacaataatcacttatcaaatgttttctgactgactctctgattgagtaaatgaatcaayaaacaagttataagcagaggctcaatattaagagataggaagatgccgaagaaagagaaaaacggttaaataaatgcttaaaccaatgaaaaattaagtgtatcatcttcagtagtggccaagtacattttcaaaagttcatcactttaattatgaaagtagcctctcaaaaataaaaaaataaatgaagcatgtccttgctcccagat

SEQ ID NO: 730435 - DNA, 629 bp, Homo sapiens
actgtgagtcaaataaaacttttttcttcataaattactcattctcaggcagttctttataacagtgtgaaaaagactaatatactgcatgattccacttatatgaggtagttaaaatagttaaattaataaaatcaaagagtagaatggtggttgcgggggctggggagaaaggagaatgggcaacaggcataaagtttcagtgcagcaagataagttctagaaatctggtttacttatagtcaataatactgtattgtacacttaaaaatttgttaagttgtatatatattaccacaataaaataataatttaaacaattctacaaagactttattttttagtgatgaatttctaatggtcttatcactagactcaaaawtaaagtgggcttatggatattgctttgttaattcggtggtgattgggactttcaaagatgttttatctatgtttcctgttaggaaatcgaggatggatcgtgattttaagctccttgttaattctgtcaataattagtggtcaaaatggaaaatattcatgaatggccagtacatggaatacagaaaaccccatgaaaagcctgaaagagaaaacaaatgaaaagcagagttctgtgagagttctgt

SEQ ID NO: 730436 - DNA, 575 bp, Homo sapiens
tagacatcaggaatgatggaaatagaatttccacagcaacttacatgtcaaaggattgtaggtttagattcagaatttttagttgaatgtgtactggcctctgaagcttaaaaaacatgggctgagtaatgggtggaaaaggatgcccattaattcagctttcaaaatgaaaatgtaaacatgctgaccctagtcgaagcacccagccctcgccagcacacctcactgaccttctccagtcggtagatgagctgcttggtggagagctggatgagaggtgcgacgaactcacaggtgatgttcacagccatcaccaagctcttccccttctgtgccccgatgatggcgtggsacaccagcttctctttcactatctgccagtgagataagccagcatttggggaacaactataacttaatacttactcagaatacttatttacccactgagagaaaatggatttccgactacctgcctggggacacaaggaagagcacacttttctgaacagcacgtttcagggactgctctttgtcacatgattatgtttttgttagttacacatggccttgat

SEQ ID NO: 730437 - DNA, 630 bp, Homo sapiens
tatactgtttataaaaaacacatactgtttataaagactaggcaggatgtctgttacttattcacagtatatctttcaatcatcacagcaatccagtcatgataagtatatttactaccattttatagatcaagaaatggaagctctgaaaacctaagggagttgtctaaaaatatgcaattagaagcggcagcgtatggctatttctttagaccagacgttggcaaactttttctttaaagggctaaataacaaatattttaggcttttkgggccacacggtctctgtaacagctactcaactttcccttgtagtgtgaaagcagccatagacaatatgttaagaaatgggcatggctgtgttccaataaaactttatttacaaaagcaggcagagggttgtagtttacccagccctgcttttgacaattcttctggagactgcaggcatagtgattttatgtcaaaaagtttaggcagagggcaaattagcaactaaagctacagtttgcttttatattcatagaaaactgttagctaaccctccaattccatatgtcagaatatcctttgaaggctacttgacactatttgtagatttaaaagaacatgtaattaggtctggtttgc

SEQ ID NO: 730438 - DNA, 462 bp, Homo sapiens
agaacgcaaataaaatttttaaaatgctactatataactctgggaaccatttctcagagcctctgctgctggggaggacgacagagcatgcaggtgtcacctgcctggggtacgccacagtctctctgcatctggtctggcctaacatggcccagtctaactcctccctgtgccrcagtgctccgccgagccttatgacagcctgaggtcggactgatctctttacctaggttttggtatcttgtttattatggattttttggaattaattttgatttcttacaatatgtaatggaaatactaagcatcttgagtgtttggcttccccttaaattttgtgcccaaggcaagtgcctcatcctatgcccagtcctgctgtgcagaaacaacttcccctgaccccagatgcacactccactctgagttcttgaaatgatcatgcactgtgcagggctggcccgg

SEQ ID NO: 730439 - DNA, 587 bp, Homo sapiens
taaaatgctactatataactctgggaaccatttctcagagcctctgctgctggggaggacgacagagcatgcaggtgtcacctgcctggggtacgccacagtctctctgcatctggtctggcctaacatggcccagtctaactcctccctgtgccacagtgctccgccgagccttatgacagcctgaggtcggactgatctctttacctaggttttggtatcttgtttattatggattttttggaattaattttgatttcttacaatatgtaatggaaatactaagcatcttgagtgtttggcttccccttaaattttgtgcccaaggcaagtgcctcatcctatgcccagtcctgctgtgcagaaacaacttcccctgaccccagatgcacactccactctgagttcttgaaatgatcatgcactgtgcagggctggccyggcctgctgtggagcatctgagtgttagaccttgtctcctgtcaccctaacccttggcttctagttctgtctcagagaaacccatagaaccattctatttctctgttacgtaacagccccgtgacttgtgaaaggtagctgtgtta

SEQ ID NO: 730440 - DNA, 554 bp, Homo sapiens
ccaaatataaaggaaaaataaagtgaagatgaagtcattgatttggaaagaaacagagaatcctagtgtgactgtaaccccttgtttatgtatctgggctgtggctagaaggaagaacaagtggttttggcagaaggctgctagcaagacgctgtgtcttttaaaatcttcctgagatatctgggaagcaacaacaacaacaaacaacaacagcaaaagaaaagagggaagacagttaagggtgaaataattccactggtggcactgtgaggcgataaccaaggcaaagcactatcctgattgcaracaaaacatggaaggatgagtattcctcaggatgaggaagctgaattctcatggcttttcctgcagaactcaagataaggcgctgttagtgatatcacatccacatccaccatgaatgaagcctggattcggattacaaagctgaataaaccagatatcatctttggcataagtgtggctatttattggtatctaaaggatctgagtctgaaggaaagataaacctaagtatcaataagttgtgaaat

SEQ ID NO: 730441 - DNA, 624 bp, Homo sapiens
aagagagactttacaaactgctttagagccagccagagactaacacctggcttttacctctcttagacaaagctgctttgtcatcgtatccagcttcgttccgtgagactcctctcttaagaggtgtggacctttcttgcttggcaagcaatacactaagctctgattttctttcttttctttctttctttctttctctctccttccttccttccttccttccttccttccttccttccttccttccttcctccttccttccttccttcctttctttctttttttttttttttgagacagagtcttgctctgtcacccaggctggagtgcagtggtacaatcttaactcacctcaacctccacctcccaggttcaagtgattctcctgcctcagcctcctgagtagctgggattacaggtgtgcgccaccatgcaccaccrcgcccatccaatttttgtatttttagtagagacggggtttcaccatgttggccaggctgctcttgaactcttgacctcaggtgatccacctgccttggcctcccaaagtgctgggattacaggcgtgagcaacagtgcccggccactaaactctgattttcgattccctaggcagctattgta

SEQ ID NO: 730442 - DNA, 656 bp, Homo sapiens
cttttgatgctttatttgaacaactctgtccccaaatcccagacaggttatcatattttgcaataacttctctgtccacattattcaatggccgagttcaataaatgcttggaggttttcaaactccttattctcattcaacacatccttgtatctcctgaaaaatagtgggtttgcagatatttacctgggcctttagtgtatcagctagcatgccagttgttacttggtccgtttattctttaacccatccaaggattcatctatgcctcaatgttccttcaaggacaatcaccacccaattctattatctgactctctcatgctactgcagctgtagtcaacagaactaattatttctgggtaggtcatccaacatccaatcctaccatcaaaaatctttatagccatagaaattctrgaaaccaacatatagtactattacccaccacccatctatcacaacatcatcaattccaacagtccctgatgcaaaatccatatcttcaccaccaagcaaataaatgccacatctccaacactaatctgtaacagactcctttttaggaatggaacttaagtgtcaatacagggataatactgtcaactttagttagcttaatgtattccccactatattagcctctgcaaacctt

SEQ ID NO: 730443 - DNA, 396 bp, Homo sapiens
ctctctccttttgctatacgatcacatggtgagaaggtggctgtctacaagtcaggaggatagccttcatcagaacttgactatgctggcactgtgatctcaggctaccagtctccagaactgagaaataaatatctcttgtttaagtcacacactctatgatattttgttacggcagcctgagctcagtaatatagtataatacattacacttaggtgtagaaatttcaacattgctttgtgayttaatgtaattcttaaatagtaattaggcatcagctaactcagccctagctacagatgtgagggttccttggaggaagcccaggaactaatggggctgggaagaaggagaaagaaggactcctttacactttctttcactcagcatgtctg

SEQ ID NO: 730444 - DNA, 590 bp, Homo sapiens
tgtgattgcatactctttccatcaaataaaaacatataaaacaaaccccaaaagccaagtactgtttgaagtatcaatgaacaactctagtgcttacctcataacaatgtgcagatccagtgaaaactttcccaatatccagcaattcaaagttgaagtgaatcttaggtcccatgccttcccctttgattcggaggggcagacggatttctcggcctagaaaaacagttcagactttatcatccaaatggtgcttcatttaccccaaatcatgttccctcatgtacgttaccaatataaataatcaaaattattaaatagctccctgcattgcaccgagggaactgcaatttaactaacgctgaagattcatcctatatgggagccaatcataatcctgaatgccaaaatcctgactgscgaaattgtgaaagaccaaaatcccaaagatataattctggaaaaacaaaagacattctttacaatatatttatttacattttaaagagggatttacttgagaaacatataaaaacacaacagaacacttcaaaggccactttatgcaataaaataggcaataatagaat

SEQ ID NO: 730445 - DNA, 590 bp, Homo sapiens
tgtgattgcatactctttccatcaaataaaaacatataaaacaaaccccaaaagccaagtactgtttgaagtatcaatgaacaactctagtgcttacctcataacaatgtgcagatccagtgaaaactttcccaatatccagcaattcaaagttgaagtgaatcttaggtcccatgccttcccctttgattcggaggggcagacggatttctcggcctagaaaaacagttcagactttatcatccaaatggtgcttcatttaccccaaatcatgttccctcatgtacgttaccaatataaataatcaaaattattaaatagctccctgcattgcaccgagggaactgcaatttaactaacgctgaagattcatcctatatgggagccaatcataatcctgaatgccaaaatcctgactgccgaaattgtgaaaraccaaaatcccaaagatataattctggaaaaacaaaagacattctttacaatatatttatttacattttaaagagggatttacttgagaaacatataaaaacacaacagaacacttcaaaggccactttatgcaataaaataggcaataatagaat

SEQ ID NO: 730446 - DNA, 681 bp, Homo sapiens
atagagcagttctggactttcttcaggtttctgaatgcatttggttaataaggcagtggtctagcacagcctgctgtttctgggtaggttctttccactgaaacacaggaggaggagagagggagggatccctgcgtatttagtcaggacacccagccaacaaccctttacaaagcacatgttctccatccttttctcaaaggcttccaaactgcagatcaaataaacaatcaaagatactgaagagatttctgatttccataccctctcacccattattcccacagctaagtaaaaccaaatggtgttatgtaaattttattcaaataaaagcacccagacawgtccaatactttaactcttctgttatttaacattctatacaaatctttactcttttcttgcattttacttctagtgctgtgctcagttgaagacagtgcacatctaataaaacactgatattttcctgataatagacacaagttaaaaagaaaaagaaaaatacatacaccaaaaacattagtggggatttgttttatacttttttgcatgttggggtaatttttgcaataagaatgtattgctggtattattagaacaatcaatatagctatgtcttacatatcaataggcaggttatcaacaaaagacacaattagctttaacagaagaaaagga

SEQ ID NO: 730447 - DNA, 681 bp, Homo sapiens
atagagcagttctggactttcttcaggtttctgaatgcatttggttaataaggcagtggtctagcacagcctgctgtttctgggtaggttctttccactgaaacacaggaggaggagagagggagggatccctgcgtatttagtcaggacacccagccaacaaccctttacaaagcacatgttctccatccttttctcaaaggcttccaaactgcagatcaaataaacaatcaaagatactgaagagatttctgatttccataccctctcacccattattcccacagctaagtaaaaccaaatggtgttatgtaaattttattcaaataaaagcacccagacatgtccaatactttaactsttctgttatttaacattctatacaaatctttactcttttcttgcattttacttctagtgctgtgctcagttgaagacagtgcacatctaataaaacactgatattttcctgataatagacacaagttaaaaagaaaaagaaaaatacatacaccaaaaacattagtggggatttgttttatacttttttgcatgttggggtaatttttgcaataagaatgtattgctggtattattagaacaatcaatatagctatgtcttacatatcaataggcaggttatcaacaaaagacacaattagctttaacagaagaaaagga

SEQ ID NO: 730448 - DNA, 481 bp, Homo sapiens
ttccacagatggcccgagagtaggagatcctcctcttcctcttctggggattctgccctgcctggaaccttctgacttgactcaaagctctgggtttgctttggaagcaaggcaagctctgaggacagggcaagggcccttctcagggaaggagcaaaggctttctcatctgcttgggaaatcctgtgtctcaccaagctcaccccatgggcctcacacagttyctttgttcacttgagtttgggaaaaacctgatggctgtccacagaccccccttttctgaatctcagcatcccacttgtgaatatttatagagcaccgactactgccacatatgagtctacgtattgaggacgtagtaatgaacccaatagataaaagtgcagccctgtgttctcattgtttaactctgacttatgagtgagaaaatgtggtgtttggttttctgttcctgtgttgtttgccgagaatgatggacaca

SEQ ID NO: 730449 - DNA, 481 bp, Homo sapiens
ttccacagatggcccgagagtaggagatcctcctcttcctcttctggggattctgccctgcctggaaccttctgacttgactcaaagctctgggtttgctttggaagcaaggcaagctctgaggacagggcaagggcccttctcagggaaggagcaaaggctttctcatctgcttgggaaatcctgtgtctcaccaagctcaccccatgggcctcacacagtttctttgttcacttgagtttgggaaaaacctgatggctgtccacagacyccccttttctgaatctcagcatcccacttgtgaatatttatagagcaccgactactgccacatatgagtctacgtattgaggacgtagtaatgaacccaatagataaaagtgcagccctgtgttctcattgtttaactctgacttatgagtgagaaaatgtggtgtttggttttctgttcctgtgttgtttgccgagaatgatggacaca

SEQ ID NO: 730450 - DNA, 470 bp, Homo sapiens
agaaaatctctgtgttgtgtgttcaattttgttgggaacctaaaaactgctctaaaaagtcgtccattttttaaaagtcagcactgggtccctttctttgccctgcagagtgtcagtgctcaacagaccctttgaagcccrgggaactgtggttgataagcatcccatgactctggaggaagctgcattaagcttcttcccaggcttagaattgtgttggatgtaccatagggggttgatgaatgcctacttttatgggctatgtgaccccctcttgctgagggtcaggtatgggggtagcccagagagagacagtttaccctgagcccagccctggaaaggttgggcctgacaagtgtagtcaagggataccctccttgtccagttgctgtgcttggaatcaattattaaaccatgcagcaattcaaagctgcccccttgggctactaaactgatttggaacatttgct

SEQ ID NO: 730451 - DNA, 604 bp, Homo sapiens
gatcatcaggatccattaagtgaaaaaggcaaggtgcagatcactgtatatagcaagctatgttttgtaaaataaaaaagagaaaaatgtaaatatgtatgtatttcttgtatttgcagaaagaaatattggaagastgaactgaaagcaaaaattactactataaatgcactggcaataagggtgaaagggttaagatgaaagccaaattttttgagtatatatatatatataacttaatgttttacatatttagaatataatacatagtttaaaacaacattaaaaagcacttgtcaattacagaaacaaatgttgcaggaagtcttcactttgcaagttgattgttgaggaaagaattgactcttcaactcagtttattgtataaactgtatataagaataatcatatggttcttgttaataaaataaagctctttttggagaaaaatgtcagctagtaggatcatttttcaactctatgaaataattgacaggcaatcaatgggcaatcactaatggatactaaaataattgagtgaaagattgatagaaaactgaacattcacacagggtccaagtaccccttcctggtacttgtgcag

SEQ ID NO: 730452 - DNA, 550 bp, Homo sapiens
tgttaagtacagctcctggggaagaacttctctccgtctgtgaacctgtgaaaataaggaagcaacatatctgctcccaacatgcagtgatgggacgacatagtaacaattatagacactccagttctaaaagggggaattgaaaataaaatggagttgctgctccaaagcagcctggaaacccagcccagccaatgccattgggtttccaggccagagcttatcgaacgtcagcctcagctttgccctccgggtcagatgtcasaaaaagatgacagtggaaatgcctcttgtaagggacttgaatgcatcaggctggtgggggaagaagccctgcttcagtccacttttgagtatcgtgcaaacgtcacacatttccacctgcacagaacgacaaggacagaactgcatttccacctgccgtggaactacaagaggcaggagtggtacctctggtgagggatggcccaggatttgcagcaatccacctgggctgtcctgtggccagatctcaggaagcacttagcacagagaatgtggttgagtaaaa

SEQ ID NO: 730453 - DNA, 633 bp, Homo sapiens
acagtattaagtgaaaaacatgtgtgtgcttagatctatggaagggaaagaaattaagaagatacataactggattacatttttactcatatatacccaaattgtttgactttttataatgtatattaactcacaaattttttatataatctaaataagtaaatacgatgtagctgaatagattatcctgagagcagcgttccatgtgactcaggaagaataagcaaaaggactcactcaccctgtctggaaatgactgtcttttaactctccagatttttcatatttttaatgataatacttcctcacccaaataaatattcatctgtagaaattaatgcagttaaaaagaaaagatgacatggacaactaaggaagaatrgtgcaatttttttggagaaaagtgtaatggtgtaaaagggtatgtattgatgaagttgagctccctctctctttttctggttttcccaaaagctcccccttctcttctgagccagagactacctaacattccaagttccaccacaggcaataagattctcataagtagtgaagggtgtgcatgtctttttataagacacttatagagtagttacaatcaacactttcctcctaactttaaaataataaatt

SEQ ID NO: 730454 - DNA, 538 bp, Homo sapiens
tctcataccacacctgcctctgagaaggacttttggtccctgccccaactttcaaggagatttttattccaaattagaaatatctgtagtgaaaaatctgagtatgtgcaatttttaaagcagttttacatttaaaaacttttaaattaggctgggagctgtggctcacacctgtaatcccagcactttgggaggccgaggcaggtggatcacttraggtcaggagttcgagaccagcctcgccaacatgatgaaaccccatatctaccaagaatataaaaaattagccgagtgtggtggcacacacgtgtaatcccagctactcgggaggctgaggcaggagaattgctagaacccaggagggggaggttgcagtgagccaagatcttgccattgcactccagcctgggtgttagactctgtctcaaaaaaaaaaaaaaaaaaaaaaaaaaaaaaaaacacttttaaatttaggaccataattgcactgactctgtgctgaagcgacttaatgaacaccaagtactttatttcttct

SEQ ID NO: 730455 - DNA, 538 bp, Homo sapiens
tctcataccacacctgcctctgagaaggacttttggtccctgccccaactttcaaggagatttttattccaaattagaaatatctgtagtgaaaaatctgagtatgtgcaatttttaaagcagttttacatttaaaaacttttaaattaggctgggagctgtggctcacacctgtaatcccagcactttgggaggccgaggcaggtggatcacttgaggtcaggagttcgagaccascctcgccaacatgatgaaaccccatatctaccaagaatataaaaaattagccgagtgtggtggcacacacgtgtaatcccagctactcgggaggctgaggcaggagaattgctagaacccaggagggggaggttgcagtgagccaagatcttgccattgcactccagcctgggtgttagactctgtctcaaaaaaaaaaaaaaaaaaaaaaaaaaaaaaaaacacttttaaatttaggaccataattgcactgactctgtgctgaagcgacttaatgaacaccaagtactttatttcttct

SEQ ID NO: 730456 - DNA, 538 bp, Homo sapiens
tctcataccacacctgcctctgagaaggacttttggtccctgccccaactttcaaggagatttttattccaaattagaaatatctgtagtgaaaaatctgagtatgtgcaatttttaaagcagttttacatttaaaaacttttaaattaggctgggagctgtggctcacacctgtaatcccagcactttgggaggccgaggcaggtggatcacttgaggtcaggagttcgagaccagcctcgccaacatgatgaaaccccatatctaccaagaatataaaaaatwagccgagtgtggtggcacacacgtgtaatcccagctactcgggaggctgaggcaggagaattgctagaacccaggagggggaggttgcagtgagccaagatcttgccattgcactccagcctgggtgttagactctgtctcaaaaaaaaaaaaaaaaaaaaaaaaaaaaaaaaacacttttaaatttaggaccataattgcactgactctgtgctgaagcgacttaatgaacaccaagtactttatttcttct

SEQ ID NO: 730457 - DNA, 584 bp, Homo sapiens
ccttttcatggttgcctctttttctcagtgtatctgttgtggcagtcattaataagagcctgtcaggtgagatttaggacagtgttttctaattctgcaaaaaatgttactgggattctgttaggtgttacattgaatccgcaactcactttgggaatattatctttctaacaatattgattcctccaatccatgaaaatgaaatgtgtttccatatattgatatcgtctttaacttgtttcagcaatcttttgtagttttcagggtataatcatttgactttttggttaaacttattycaaaatattttattccttttgatgttaatgtgaactgaaattctttccttaatttcctttcggattgttcattgttagtgtatagtctaaagaatgatctagaaagagtgaaggggacaggcaaaagctggtggttttggagcagaaacatattccctgtcctgggtttttgattttccctctccctttgcagagggcaggtggctcttccctgataactagatagacttcactggaaaacatagtgccaatgctccagggatccacttaccagggactatgatc

SEQ ID NO: 730458 - DNA, 552 bp, Homo sapiens
ccaaaatcctcacatgcagatctggcatgaggaagcttcctaagcgtctctcaggtagcttggtacaagttctgcccaacagaggtgcttcatacaccaggcagcaagcctacccaaatgagatcccctggttgggaaggtggacgtacttcatgaacaaagcaaaggtagatggttgtgtgcaggtcatctcacatgaggtgtctccctggttctttgwgaaaccctctctggacctcttctggttttgaaatagctcattcatggattcattctattaataaaagtcaaaagtaaacacttacataatgcttactaggtgtcagccatggtgctaagcacttcattcatattaactcattgtctccatgccacaatcctattacctgagttgacagatggggcaacgcaggcacagagatgttaagtgaattgctcgagatcacgtagacagcaagtggcagaatcataatttgaatcctagttcatctggatccagaatacagaccataatatcctcctgatgctcatgaaaatttgttgaaccagata

SEQ ID NO: 730459 - DNA, 592 bp, Homo sapiens
tctgtagttccagctacttgggggttaaggcaggaggaatacctgagccttgggagatcaagattgcagtgagccgtgatcgtgccactgcactccaacctgggcaacagagtgagattctgtctcaaaaaaaaaaaaaaaaaaaaaaaggccaggcacggtggctcacacctgtaatcccagcactttaggaggccgagrtggatggatcatgaggtcaagaaatcaagaccaccctggccaacatggtgaagccctgtctctactaaaaatacaaaaattagccgggcatggtggcacacacctatagtcccagctactcagtaggctgaggcaggagaattgcttgaacccgggaggcgagggtgcagtgagccgagatcgcgccactgcactctagcctggcaacagagtgagactccatcttacaaaacaaacaaacaaaaaacacacacacacacaaattaagaatctccaggcatgaaaaaaaacaccattaaaagactgaaaaggcaaaatacagactgaaaaaaataaaaatgcaatacatatatatcctagaaaggactcatatccagaataaagcattata

SEQ ID NO: 730460 - DNA, 592 bp, Homo sapiens
tctgtagttccagctacttgggggttaaggcaggaggaatacctgagccttgggagatcaagattgcagtgagccgtgatcgtgccactgcactccaacctgggcaacagagtgagattctgtctcaaaaaaaaaaaaaaaaaaaaaaaggccaggcacggtggctcacacctgtaatcccagcactttaggaggccgaggtggatggatcatgaggtcaagaaatcaagaccaccctggccaacatggtgaagccctgtctctactaaaaatacaaaaattagccgggcatggtggcacacacctatagtcccagctactcagtaggctgaggcaggagaattgcttgaacccgggaggcgagggtgcagtgagccgagatcgcgccactgcactctagcctggcaacagagtgagactccatcttacaaaacaaacaaacaaaaaamacacacacacacaaattaagaatctccaggcatgaaaaaaaacaccattaaaagactgaaaaggcaaaatacagactgaaaaaaataaaaatgcaatacatatatatcctagaaaggactcatatccagaataaagcattata

SEQ ID NO: 730461 - DNA, 585 bp, Homo sapiens
aaacattatgttgtatgaaagaagtcggttacaaaaggccacttattgtatccatcataatgaaatgtccagaataggcaaatccatagagacagaaaatatattagtggttaccaggggctggaaggaaggtgaatgaggagactaatgggtacagagtttctttttggggtgatggaaatattctgaatgggagtttggatagtagtaataatggcacaaatttgtgaacatatkaaaaaccactaaactgtaccctttaaaagtgtgaattttagatccatccctgctagatttgctcataaaaggtttggccatctgacttactttggccaataaaatttaagtagaaattatgtataccactccctaggggatgctttaaggtatttcaactagatctcttttctgtctgtcatgagtctgatttatcccagatagatgccggctgcggtcacagaacaaagcacagtaaagcaaagatgtatccaacctactaattgagatgaatgtaaatgtgagcaaaaaataaaactttaattttttaaaaaaataaaatggcttaaataacccaattaaaagaca

SEQ ID NO: 730462 - DNA, 585 bp, Homo sapiens
aaacattatgttgtatgaaagaagtcggttacaaaaggccacttattgtatccatcataatgaaatgtccagaataggcaaatccatagagacagaaaatatattagtggttaccaggggctggaaggaaggtgaatgaggagactaatgggtacagagtttctttttggggtgatggaaatattctgaatgggagtttggatagtagtaataatggcacaaatttgtgaacatattaaaaaccactaaactgtaccctttaaaagtgtgaattttagatccatccctgctagatttgytcataaaaggtttggccatctgacttactttggccaataaaatttaagtagaaattatgtataccactccctaggggatgctttaaggtatttcaactagatctcttttctgtctgtcatgagtctgatttatcccagatagatgccggctgcggtcacagaacaaagcacagtaaagcaaagatgtatccaacctactaattgagatgaatgtaaatgtgagcaaaaaataaaactttaattttttaaaaaaataaaatggcttaaataacccaattaaaagaca

SEQ ID NO: 730463 - DNA, 589 bp, Homo sapiens
gatctcagctaactgcaacctccacctcccacgctcaagcaatttcctgcctcagcctcccgagtagctggaactacaggcacgcgccaccacacccagctaatttttttttttttaattttagtaaagatgaggtttcaccatgttgcccaaggtggtctcgaactcctgagactgggcaatccgcccacctcagcctcccaaagtactgggattacaggcgtgagacacagcacccggtctacattatcagctttctattaaatttgagtgtttgtgttttaactatgtgctgatcctcaattatttgcaaattattataattaattagctttcattaggttatgctgcagttaacaacaacaaaggtgcgtttcctgttgagtaytgtcagctgttgactggctgtagcactgctccaagtcatcttcactccaggatcaaaagtgaagcaaagtcccttttgggacactgtcattcttttggcagaggaagcaagagatgaaagaaacttcagttttctcttacaagacacatgtaccatatttgctttaagcaagttatatggccacgcctagcatcatggggg

SEQ ID NO: 730464 - DNA, 605 bp, Homo sapiens
gctttgccaagggctcagggaggtctcttcttcctcaggccatgtggaattcaaaccctccaccatgtccaaactaagcctcctcccccactgcaatacccatgtgcaactctaactcctccaggcggttttaggcactgtttatgcggtcagggaagaaagattttggttgtttaattcaatatacagtgccttataaggcacaacctggccagagttaagtgaggscaaactgggaacagggcattttcactgctgaatgacagacagcagcagagagttcagccaagatggtggactcctcatcccagtggttagttttctgcggcaaaagttgtacctctggttaggtaccgcctataaatgcttcatccagttatcagattctatgcttcctaaggcctccttcttccatttgaaaaaggaaaataaaagaaaaacattaatagcagtaaccattggaagaaaggtatggagaaatatgggctttaaatgtttgtgcacctttgtgcagcactgattacattttctagccttaaacatgtatttcttatatcatttgcaatggtaaatggggattatctaggcataaaactcatgcatat

SEQ ID NO: 730465 - DNA, 588 bp, Homo sapiens
tggaagtaaaaattggtcagaagatgatctacaattactaattaaagctgtgaatctgttccctgctggaacaaattcaaggtactggttttaatgaaacttttcttcaactcacactggagcctggagataatgtagacagactccaaatagcagcacttgttatcacagaaacttgcagagataaattctgtgccacagyagaaaagtgtgaaaagtgaggtgcattttgaagctgtcagtcttacccattgcatcagtacacatgcacatatacatatgacagaatacttgtttctcaggaaattgaagatcatgagacaagtcttgatttatgttggcttactctgtcatggcttgttctagggattaggttttctgtagtttttcttttacagtcttgctctttgttttttcccacctcaagctggagcttgagtttaactgcaagaaagccctagagatccagcgtccctaattctatagatgaaaccgaggctgttttcagaatgattgatcttctgaagaaatgtattaaactggcagtatacacaaataagtggttttatttatgttgatttgtacacc

SEQ ID NO: 730466 - DNA, 623 bp, Homo sapiens
tcaggatgtaggagggtacgtgaggtgaagtgaattaaacgaattcctgtggagagctgtttgccctccaacgtactctgcactttcttcagaggcgatctttcttcaggggagaaagaaaagccctttttaggacagataactgggcaatgtggctcacacccatgccacagcttagtgtgtaagattgagcttgtactgtgtttgcttgttacagcagaagtcaaatcggtctcctgaaatgcagctggtgccgctcagcaatgcatcgccttgtcagggtcctgcagcaacggtgcttacctgttacagtcgtgrtggaagcttttgtttccacaaaccagtaaattctccagtctccctcacagagaccctgaacactgcggtggagaggagactcgggtgtccgacactggatctgagcctctgccgtccgccctctgtcctctggtgcaccttgctttaagcatccatgtggttaactccttggcggtcacaccgatgtggttttaccgtgagggtgttcatgcgtggggggctgaagactcatgtccttctgttcatgttggtgctgcagagctggctgaggcaccacgggtggggatgtgaggaggccgtgcagc

SEQ ID NO: 730467 - DNA, 590 bp, Homo sapiens
ataacacatgttgaagggacagagcaagcttcacaaccagactcagagacagcagggatgctggaattaccaggcgggaaattgaaagcagctctgattaatgtgaggggctgtaatggataaagtaggcagcatgcaggaacaggtgcgcaatgaaagcagggagatgggaatctaagaaaaaaccaaatgaagtgacagagagcaaagcacggtgacggaaatgaagaatgccgctgatgggctttgatggatttgtggactggacacagctgaggagaggatctctgagcataaggttatctcaatagaaacctccacatgtgaaaagggaaaagaaaacccacccacacgcacacgcgcgcacacacgygcgcacacacacagaacagaatatccaagaactgtgggacatctacaaaaggtgtagcatgtgtaatgggaataccaggaggaggagaaagaagaaatacttgaaatggtaatgacagatttctccaaattaatgtcagacactaaaccacagatccaggaatctcagagaatcaggacaaatgccagaaaaactacacctgggcatatcattttca

SEQ ID NO: 730468 - DNA, 590 bp, Homo sapiens
ataacacatgttgaagggacagagcaagcttcacaaccagactcagagacagcagggatgctggaattaccaggcgggaaattgaaagcagctctgattaatgtgaggggctgtaatggataaagtaggcagcatgcaggaacaggtgcgcaatgaaagcagggagatgggaatctaagaaaaaaccaaatgaagtgacagagagcaaagcacggtgacggaaatgaagaatgccgctgatgggctttgatggatttgtggactggacacagctgaggagaggatctctgagcataaggttatctcaatagaaacctccacatgtgaaaagggaaaagaaaacccacccacacgcacacgcgcgcacacacgtgcgcacacacacagaacagaatatccaagaactgtgggacatctacaaaaggygtagcatgtgtaatgggaataccaggaggaggagaaagaagaaatacttgaaatggtaatgacagatttctccaaattaatgtcagacactaaaccacagatccaggaatctcagagaatcaggacaaatgccagaaaaactacacctgggcatatcattttca

SEQ ID NO: 730469 - DNA, 602 bp, Homo sapiens
tccttgttcctcaaatattgattgaacacctactctatacccagcactttcctgggtgcagggagtaccagaatgaagacagttctgtgctctagtccctggagacctcaccacccatagcctgttatttctatgaagtgttaagttycttaactacaaattcccaccaagggaattaggaggcttcaccaccaaggatggggagggatgactgaaactatgagaaacaagagaagtggcagtcacgtttacgtgggggagtcaggaaaggctttgggggcagtgaaaaaaaaagtaggatttacatgcagataggcaaggatagagcattttaggtgacagtatgacaatccatgcaagctagtgttgacagagggaactttttaaataactttatgaggtataatttatgtacaacaaactgcactcaaagtgcacgatacggtgtgttttgacagatgcataaccccatgaaaccagcaccacagtcacaatacaggacacttcttggctcccaagagtttcctactgtacgtttgcaactggatgcagggtatgttttagtgcagataatgtgcccctttcaacacaagaacattttg

SEQ ID NO: 730470 - DNA, 493 bp, Homo sapiens
aacaggacacctctggcctaactaatgaattgggagctcaataatcttcaagtcaacagaagcaaggcctggtattactttccacagtaacactgattcctccttggaccccctcagaggactgctcctgccacgttcctttatttctttttcaacaagagtttttttaagaaataaagttttatgtttttattatgaaaacaatatatattttactccaaaaaattgggggaaaaaagaaaaatataaaggaaataagacttttgcatacacttccatcaagaagtaattatttggccgggtgtggtggctcacgcctgtaawaccagcactttgggaggctgaggagggcagatcatgagatcaggagatcgagaccatcctggctaacatggtgaaaccccgtttccactaaaaatacaaaaaattaactgggcgggtgcctgtagtcccagctactcgggaggcagaggcaggagaatggtgtgaaccc

SEQ ID NO: 730471 - DNA, 596 bp, Homo sapiens
catgctggaaaattcctttatcttgtttagctttgcaaaagctctgcaaaagctatttttctcaccatattcatttatggttttgcttttcctaaataaaagcatgtatgcagagcaggcacatgtgggtagcttgtttttactaatctttatttaacactaaatatckgatctgacgttctcatatactatcaaatgtggtaaccatatcattcagccaacatagtgtcccttttccccaggaactgccacagaatagtattcttctttacataattttttaaccatttaaaattgtaaaacccattctttgtttgcagactgtacaaaaacaggcaggtaatgggccagatttggcctacgaggcaaagtttgccaatccctaatctagatcagctcccagacttctctgcacgtagaatcacctagggaacattgtaaattttcagtgctcaggccataccccagaccaattaagtcacaatttcctgaggatactagcagcagtaattttggaagctcctcagtggaatccaaggtgcagacaaacttgagactcactgatctctaaactaagattttcttttcaagtgctg

SEQ ID NO: 730472 - DNA, 596 bp, Homo sapiens
catgctggaaaattcctttatcttgtttagctttgcaaaagctctgcaaaagctatttttctcaccatattcatttatggttttgcttttcctaaataaaagcatgtatgcagagcaggcacatgtgggtagcttgtttttactaatctttatttaacactaaatatctgatctgacgttctcatatactatcaaatgtggwaaccatatcattcagccaacatagtgtcccttttccccaggaactgccacagaatagtattcttctttacataattttttaaccatttaaaattgtaaaacccattctttgtttgcagactgtacaaaaacaggcaggtaatgggccagatttggcctacgaggcaaagtttgccaatccctaatctagatcagctcccagacttctctgcacgtagaatcacctagggaacattgtaaattttcagtgctcaggccataccccagaccaattaagtcacaatttcctgaggatactagcagcagtaattttggaagctcctcagtggaatccaaggtgcagacaaacttgagactcactgatctctaaactaagattttcttttcaagtgctg

SEQ ID NO: 730473 - DNA, 596 bp, Homo sapiens
catgctggaaaattcctttatcttgtttagctttgcaaaagctctgcaaaagctatttttctcaccatattcatttatggttttgcttttcctaaataaaagcatgtatgcagagcaggcacatgtgggtagcttgtttttactaatctttatttaacactaaatatctgatctgacgttctcatatactatcaaatgtggtaaccatatcattcagccaacatagtgtcccttttccccaggaactgccacagaatagtattcttctttacataattttttaaccatttaaaattrtaaaacccattctttgtttgcagactgtacaaaaacaggcaggtaatgggccagatttggcctacgaggcaaagtttgccaatccctaatctagatcagctcccagacttctctgcacgtagaatcacctagggaacattgtaaattttcagtgctcaggccataccccagaccaattaagtcacaatttcctgaggatactagcagcagtaattttggaagctcctcagtggaatccaaggtgcagacaaacttgagactcactgatctctaaactaagattttcttttcaagtgctg

SEQ ID NO: 730474 - DNA, 596 bp, Homo sapiens
catgctggaaaattcctttatcttgtttagctttgcaaaagctctgcaaaagctatttttctcaccatattcatttatggttttgcttttcctaaataaaagcatgtatgcagagcaggcacatgtgggtagcttgtttttactaatctttatttaacactaaatatctgatctgacgttctcatatactatcaaatgtggtaaccatatcattcagccaacatagtgtcccttttccccaggaactgccacagaatagtattcttctttacataattttttaaccatttaaaattgtaaaacccattctttgtttgcagactgtacaaaaacaggcaggtaatgggccagatttggcctacgaggcaaagtttgccaatccctaatctagatcagctcccagacttctctgcacgtagaatcacctagggaacaytgtaaattttcagtgctcaggccataccccagaccaattaagtcacaatttcctgaggatactagcagcagtaattttggaagctcctcagtggaatccaaggtgcagacaaacttgagactcactgatctctaaactaagattttcttttcaagtgctg

SEQ ID NO: 730475 - DNA, 513 bp, Homo sapiens
ttaaaaaaaaacctactggtggctcccttttatctctaaggtatgctgtgatgatacttttttccatatacgtaaagcacggaactaagcaaccatgtttacaagacaataaagagaaaaaaattgataacagtcacttaaaagaatcttaaccacaatatgttaacatttaaaagggtgccagagggcaataagataattcaaaaatagtgaaggaataagctaaaaataaccactgtataaaaatatgcactgactcagtataaattaatagatgactacccttttgatccaagctggaaaaacttgcttctcaggtacttgtcatgaaataggaamatcctattgcatctttcaaccaatctctatttcctgaaagcctgactttcaaaattgttctgactgtctctcatgccactttccagaaagtgacaaatgttaaccctttccgtgcaatcacatgatttttgaatatgagggagtaatccggctgagacagaataccagatgtaa

SEQ ID NO: 730476 - DNA, 663 bp, Homo sapiens
acacattaaaaactacggaaatgagatcatatactggcatggaaatggatatatatcatcaacgaaaacaaagtgattgtaaaaaagagtcctgatatatgagaagataacagataacaaaggaagactcacaaaccaatgggttaagagattattcgtcagagttgaaaataattgactcgggggaaagtgttatattcacatctcacatcatgcaaagaataaaatgcaaatacttttaagaattaggtataaaacataaaagcaggctgggtgcagtggctcaygcctgtaatcccagcactttgggaggctgaggcaggcggatcacctgaggttgggagttcgagaccagcctgaccaacatggagaaaccccgtctctactaaaaatacaaaattagcccggtgtggtggcgcatgcctgtaatcccagctattctggagactgagacaggagaatcgcttgaacccgggaggtggagggtgtggtgagccaagatcacgccattgcactccagcctgggcaacaagagtgaagctacgtctcaaaaaaaaaaaaaaaaattaggtataaaacataaaagaaaaaaatagcggagaaaatgttgataggcatagaaaatgttttagaataaagttctcatttaccacagttatatga

SEQ ID NO: 730477 - DNA, 797 bp, Homo sapiens
tattttcaaggacacatggaaatcattgaccactcacctggttaaatgtaaattttctgtgaaatacaaactctggattaacacgtctgctagaattaataaaatgctatcatgttttgcctgactacgtaccaaaaatcaaatggtaaaacttacctagatatataaaaatcagatgattcatgattggttagggtgtgcatcatcacttacttagagcagaaatgtttttattaacatccacttttagtttcataacaatcagttcacaggaacctgaaacacaatgtgaatatgtgttaaaggatgccatgttttccaggaggacacttgcaaataaccttgcagagttccgtccttatgagacaaatcatctgtacctggacatttgcagtattccaaggacaacactgttgtcatatcaaactatcatttcttgagaggaagcctaaaaaattacgtggtttctactgtagtgaaaatcaccatgatcattgcctggatacatgcaatccctcaaactcaaagagtctgccatacatgttccctaatatatgaaaagtaaagactcacggtttctagaattgatacaggttctatgatttytttcctgaacccctgccaaaaaatcatggaaaaggcaataaagaagtgcttggggcgctgtcatcacttacctatgcacatgatgatcagatgggctgtgctgtgctgtgcttttgtcccacaccatctcttgccttgataccggcaacatcccatctttcacagactccctgattacctttcacagactc

SEQ ID NO: 730478 - DNA, 635 bp, Homo sapiens
tcaaaaggcctgctgtgatgccctgacattcatctgaaagacatattggggaaactctgcttggtacacaacctatgctacgaggacacccacaaatactcttgttcattggtatcgtttcgcaactcatccaggttacccagataactgaaaatatctaagccagagcctccgagggatacctggagaaacagcacagtccacatcggggtgacagacaatatgatcaactacctgggcactggcatatctgtttctcacgtggagggtcagatttaccgaaaaaaaaaaataaaagcccttacctctgaataagcaaacagtaaaatctcatgcttactggcattgggaatcactaattattttttcycaatgacacatatgccaaacacaaggttactctaccagacttaaaccatcattaactatctacatgcaggaaattcagaatgtctttcatgaggtaatgccacaacatctcctacctctctacaggaagagaactttacgggactcctgcaggaaaccatgggaaaaacactgtgtcaaggacagtgccctctttgtccaggaaatctgaagttcaagtggtctgtattggcataggactggtgtcatccattacctggttacta

SEQ ID NO: 730479 - DNA, 601 bp, Homo sapiens
gggcaggattccaagactaacttccttggtcaaatgagaaaatagtccagagaaaaatattatctttgtaatacagaaattaataaagagataaaaataatgagatctttaggatcctagtatagacaaagaagccatggtggctaatttctcagattctagcagggcttctttacctccgccctactgacaatttgggccagataactttttgtggataattatttgttatgggaactgtcctgtgtgttgtaggatgtttagcagcatccctggcctctacccacaagacaccaatagcaatcacttctytaggtgtgacaattagaaacgtctccagacattgccaaatgtccctgcaggagtaaaactgcccctagttgagaatcattggattatagaaagaaggaaaataaaaatcatgatgttctttcattttctccaaatcatccgaccaacaacattgctaatggtaatctagagacagttcataacaaaacaggcttaatttagaaagatatagttatggattcagccactttgattaaaaagttgtaattcttgtctttagtccactgcccattcatcctagggagaagat

SEQ ID NO: 730480 - DNA, 627 bp, Homo sapiens
cacatgccctccctatgccccatttggttgagtccaaaaaagttatgagtttattgcagcaggctcaagggctgctaaagggagaaaagaacaccagtagaagatccttctggcatcttaaaaggctctttggagaacttcacatgaggacaatgactcaatgtggtcctttccagattttcagttctttccatggcagctctaggagaacagagacctatttgaaaggctggcagggccttttagttacgttagcaaagaaattcatattaccttgagaaaatattagtggtacacatcaaaaacggggaargggatctgatggagattgggaagggagataaactccactcctttttagtgttcccaccagcacccgtggcagtgctattgagtcccttggattcctaacccaagtgattttgagtaggcctagaatttgcccagatgttttgcagtggtaagttctcatttgagtgaagagttgaatagtaatggaagcagaaaaaaatatgctacagagggtaacaggtgccattagtaattttgctcagacttttctagaagactcactttctgttctttgcctagtcaaggcccatctttcctactcacttctgtcttaac

SEQ ID NO: 730481 - DNA, 645 bp, Homo sapiens
ttaccttccagggaaggggtcctcctcagagagcaggaagccgctttcttggggacaacaaggagtggcagttaggacaggatcagaagtcactgagtctttattactcactgagtcactgagtcttcaaagttcctgcttattcattacagatcttayctcctttccctcatccatggaaggatgttatttataaagtgttttattgaggagggtcctctggatatacagtccccaaaggaggtgagcacactcacactgtaaattgaggcagttgatctgagctgggcattgggaaccttttcacaagatatgagttggaatgagtcctcttgtgggaatttcttgctttcatcctggtcatagggtctctcccatttacttgctaagcgacctttgggaaaagtgcttaatgtctttgagttctatttccttgtttataaagtggaataattgattagagacttgttgagaagcagagggagagaaagatatcttacagcatactctatcattattggctaccatttaccgagggcttatctgtgccagccactattccactgtcttagcgcgtgtcaactcatttactattattatccccattttatgaatgaggaaactcaataaatactgggatcccat

SEQ ID NO: 730482 - DNA, 570 bp, Homo sapiens
tttgcaaactatgcatccagcaaaggtctaatatccagaatctgtaagtgccttaaacagttgaacagccaaaaacaaccccattaaaaaataggcaaaagacatgaacatacgttcctcaaaagaagacatataagcagccaacaaacacatgaaaaaatgctcaatatcactaatcatcagagaaatgcaaatcaaacccaaaatgagttactgtctcacaccagtcagaatggctattagtaaaaagtcaaaaaaataacatgctggtgaygctgtagagaaaaagggaacagatatacactgttggtgggaatgtaaattagttcagccactgtgaaaagcagtttggtgatttctcaaataacttaaaacagaactaccattcaacccagcaatcccattactggatatatattaataaaaatcattgtacagaaaaagacacaagccctcgtatgttcatcagagcactattcacaatagcaaagacatggaatcaacctaggcgcccatcagtgtcgactggataagaaaatgtggtacagatacaccatgagctacttctta

SEQ ID NO: 730483 - DNA, 627 bp, Homo sapiens
aggcctaggactcactttaccatttagctcatgaacttctgtgagcagcactgtcctcctccgcttacccactcattcctaccttttcacacatcccttcactccatcctgtccagcacgcgtctattcattcatctattccttcatatctgcatcttgtgtctgttaaaattctttgtattcatggccaggcacagtggctcatgcctgttatcccaggacttttggaggctgaggtgagaggatcgcttcagaagttcaaaaccagcctgggcaacatagggagaccctgtctctacaaaaaatttaaaaattaactggktatggtggcacacacctgtggtcccagctacttgggaggctgaggtagaaggatcacttggacctgggagattgaagctgcagtgagccatgatcacaccactgcaccccagcctggatgacagagtgagaccctgtctcaggaaaaacaaaaaaacaaaaaaacaaaaaaacacacacacacattatttgttcataagtggagaaaacttttgtggactgggagtgtggaaaaaacagtcaacatgcatttttcctgttctcttacaccataataatacagaagacttctgtgacaaaatatgt

SEQ ID NO: 730484 - DNA, 647 bp, Homo sapiens
agatcaatgtaatgaaatacagtgtgaagacaagatgagagaaaaaagaatgaaaagaagtaaacaaagcctccaagaaatatgggattatgtgaaaagaccaaacctatgattgattggtgtacctgaaagtgacggggaaaatggcaccaagttggaaaacattcttcagggtattatccagaagaactttcccaaaatagcaagagaggycaacaatcaaattcaggaaatacagagaacaccactaagatactcctcgagaagagcaactccaagacacataatcgtcaggttcaccaaggttgaaatgaaggaaaaaatgtgaagggcagccagagagaaaggtcgggttacccacgaagggaaacccatcagattaacaccggatctctatgcagaaatgctacaagccagaagagagtggagggtaatattcaacattcttaaaagaattttcaacccagaatttcatatccagccaaactaagcttcataagcgaagaagaaatgaaatcttctacagtcaagcaaatgctgagagattttgtcaccaccaggcctgccttacaagagctcctgaaggaagcactaaacaaggaaaggatcaaccggtactagtcactgcaaaaacataccaaattgta

SEQ ID NO: 730485 - DNA, 524 bp, Homo sapiens
agatctggacatcaggatgtttggaatctccccaggctcatttaacgtgcaaccaagactgaagcccactgtcctcagcaatgtgcccagcccagccttcctgacatccccccatgggtacaggatgacagtttctcactctgaccctttcctttattcaatacagcacagcacaatccaacagggtgagcactgttatgacagagaacctggaktcggatctgattaaatgtcttcaacaaaaccagtgccaagccttggccattcagctatcaattactattttcaacccaggttctaaaggctcttcattagaaacttctcgggttgataatgattgggcaaatgtgccctttggatttgattgctaccatgattattaattaactgaattgtagagatatcgagtacctttctgcctcttgtttttaagaacccatgagagacaaggccaattgcagacaatgaggacgtcctcatgatagtgagatgaactgcctagctatcttccgatatcgttactt

SEQ ID NO: 730486 - DNA, 524 bp, Homo sapiens
agatctggacatcaggatgtttggaatctccccaggctcatttaacgtgcaaccaagactgaagcccactgtcctcagcaatgtgcccagcccagccttcctgacatccccccatgggtacaggatgacagtttctcactctgaccctttcctttattcaatacagcacagcacaatccaacagggtgagcactgttatgacagagaacctggagtcggatctgattaaatgtcttcaacaaaaccagtgccaarccttggccattcagctatcaattactattttcaacccaggttctaaaggctcttcattagaaacttctcgggttgataatgattgggcaaatgtgccctttggatttgattgctaccatgattattaattaactgaattgtagagatatcgagtacctttctgcctcttgtttttaagaacccatgagagacaaggccaattgcagacaatgaggacgtcctcatgatagtgagatgaactgcctagctatcttccgatatcgttactt

SEQ ID NO: 730487 - DNA, 616 bp, Homo sapiens
tgtacttttccttctaaaaaaggtttaaagaaaggcccacactaggaattaaacggtaaaaaagaaaatgcatataaattgagaatgtgttttatttagcatcgcagagaattttggggtagataaaggaatggatcaaaagattatgtatcatgtaaaaagccttaacaaaatatgtggtgatcaacagacaatggaagggttacaaaagaacaaactgattccttcaagtctcaaaacaaatggcctttcatagtcttcctgatcctactttttgcttctgaggaagaaaaaattgaagaatatatgtgtggctggtggggtaaacatggaaacatgttatcgttgtttttgcttagagagccatcaggagtcttaatgagatttcagtttcaatggtactattargaaaaaagtttctcaatctcagcactaataacatttggggctagacaattcttgttttgattttttccttactttttgcaaaatcccttttcctgtttttttgtttttttgggtatattttattatgcagcaccctcttcatagaattgacaggataattatttgctgaggggaggcagaggaggggctgtcctatgcattttaggat

SEQ ID NO: 730488 - DNA, 610 bp, Homo sapiens
atattatacagacataaaaatgaagtaaacctgtatttattgacacagggagatgctcagactaaaattgttaagtaccgaaagtagatggtaaaacaatatttaaagttcttcttatcaatatttaaaaatatatattatgtttacatataggatatcaaattcttaaatgaggtattggtgagtggtgggattatgggcaattattttccttcctattgtttatttatgtgaagacaatgataaaccttgaaagaaaaaagtacccacaatctcacttgatgatgagtaattttgatttatttttatttttgcatactcgtgttctcaaacttttcatcagtgaaaattatattacttaaaggattgaaaaatcatttccaaaagcctctaaaattctagagcytgattcacaaagagccactcgaccaacttcacacacagcaagtcactggcagggcaaaagcttggttccccttctcagcaggggacagaatccctggacacactgggaagatattctgggtgttgctgtcccttgtcccttggccaagaggtggtctgggcatagaagacaagagtgggccgggcgcggtggctcacgcctgta

SEQ ID NO: 730489 - DNA, 430 bp, Homo sapiens
cccaatgtccttagcctcatttacccctggggcaatgttcctggttctgtctctcaacatctggtgcttcattgcccccaccctctccctcagaggcagaggcagacatacacacactcacacacacacacacacacacacacacacacacacactcctagattytggaggagagagttttcggtgctaagggtgagtttttgatttgcactaagaactcaagtgaaattcatttacactccaaaataacttctagactctagaatgtagagtgagactattccatgtcttcacttttcacagggaaaatcatgccagaatggcccttcgttccttcctgcctccctgctttccacaaacctaaactgagccttactgtgggcaggcacttggtgggcactgtgaagaatttcaacaacttcaatttccc

SEQ ID NO: 730490 - DNA, 619 bp, Homo sapiens
aggcccatgctttagccaaactgggtaaacaattcttgtagttcctgtagcccagaatattctcctgccttctctattcccataaatctaattcttacctattcctacagaatcagctcatttatccccacttccaggaagcttttcctgattgctgcacttggacctggtctctctccttccttaatgcatctctcrtgactcctgtcctgtcccactggcgtaatggccatttgttttcatactttctctccaaaaaggttaccaggtccctgcttattctttttggtcttctatttggcacgtggtagcagaccaaattcacaacgaatccttaatatttattgggtgaataaatgaatagtaagtattggtaacacactggttgctatatatatttctttagatttgtttttctctcccctgtgtcccaactggggcccccttagctttcaatctaaccaccctttccagacagtctctgcttctccctccctgtggtcccctctcagccacactctgctgcaggcgagagaagcaggtccctggcctgaccctcaatgacctctttcctccccgctctctaaatacaggctcagaggaggaactcgaggagctg

SEQ ID NO: 730491 - DNA, 492 bp, Homo sapiens
cgtgtttattgcagcactattcacaatggccaaggtatggagtcagtctaaatgtccatcaacagatgaatggattaaaaaaatgtggtgtatatacacaacggaatactactcagtcataagaaaaatggagtcattttgtttgttgcaacaacatggatggaactagaggccattatcttatgggaaataaggcaagcacagaaagacaagcatctcatgttctcactcatatgtgagagctaaaaaaattgaaatcacagagagaggaattattgttatgattawtagagagtaggaaggatgggaggagagaaggatagggagaggccagataatgggtacaatacagctaaaggggaggaataaatcctagtgttctatagcactggggggtgactataattagcaataacattgcatatgttcaaaaagctagaagagagaatcttacatgttcccaacacaaagaaatgtttgaggtactggtta

SEQ ID NO: 730492 - DNA, 501 bp, Homo sapiens
cttttctggggcagagaaggatgctgcccaggtgtgggcagtcaagcagggtgcagaggaacccagatcagagtctggggctgggtcccaagccctgttctctgtttcactcacaatatgagctggggcagtctttttcccctcctgtgtgtcagtttcctcatttgtacaagaggcatttggactggaacagggctgcttacactttgaatgaatcccctaggggtcttgttgaagagcaggctyagattcagtgggtctgggctggggcctaagattctcaatttctatcaggctccccagggagggcgattctgctggtccatggaccacactgagtagaaagggactgctaagctttgccattgtgtgactttggagtctaggagcagggagaggcctgatgccccttcttcaccatctcaagaaggcttcctgctatgaggaagattttagacacagatcagggagcaggggcttttatccctcttgaaaaaccag

SEQ ID NO: 730493 - DNA, 626 bp, Homo sapiens
cctgccggacctccatgggctatctgtgaccccaccagctggtcttgcccatctgacttccagctggctccctcagtcccacacctggcccaggacaaggctcaccggtaaggggtggactgcattctaggctgcagttggaggccaagcccctccaggctgatggtcatggtggtgatgggggactgacagtccaggagggatggggtgggacagggagtttagcctcagcacttctttcatgacctgcgaggcatgttcattgccatcttcatgaagggacccacaaaggaaaacagcttgacrggcaagagttctgaaagctccatcctcctcccatcctccccagctcagagatggccaccatccacccatttactcaaccaggagcacgtcctctccatcaggaggacatgtgcctccccctgaagttgtttctcaagcccatccactttcaccaggtcagagccaccagcatcgctgattttgacacctgtgacagcctagccaaattcagctcctgtccccatcgctttccccctttccaatcctgtcccttcactgaaaccagtgtgatctttaaaaatatacacacaatcatatcattccttttctctggaccctca

SEQ ID NO: 730494 - DNA, 610 bp, Homo sapiens
cactgcagagatgggaaaaatctggaaaataagctcttttaaaaatcttataaagaaaatgaattggcattcttgattgaacctctattatctggaaaacaatgacattaaattatgaccttaagacactgcagtccccagtagtgagcttaacttcctgggaatgggtgctttcttctggttccattgaaaagcacttcctttcctgagggtcgctgaagctcagggtatgggtgtcgagctgccaaaaggtggcaccatgacaagcaattagcacaaggattcagaggtggaggktcataaggggctatgaagaagctcttcctccgaggcacttactacctggctgggaagtgaaatacttctggtacaataaaaaggcaactaggaagttgaagctcctgagtcccacccagttacccaagccaaaaatttgggtgttcttgcctccgcctcgtccgtcatcttctgcatctgtgagtcctgtgagctcttcacccagagtgatagtaggcactttccttctttcctcctttctctgcccaccggcgagggcctcagttcacactcccatcctcttttcctggttaattcccacagcccctccctg

SEQ ID NO: 730495 - DNA, 642 bp, Homo sapiens
aactgaaatgtattttttttctactcttttcacatttagaaattatacactatgtttttattgttctagtggttacttctaaaattttaatcttaattgactttaatcaatccctctaccccctcaaaaaaatgtgagattttargaagctttaactctgatgattgtttcccattcccatgctcctgtttattatgtctggtgttttagtttcactttgtttttaactactcttaaattagttgctattattattttaattgtttttattgtcggttctcatttaggtttatctaaatgcttgccgatttcttttcttcctgatatgagtccttgatcgttcattcagtgaaggtctgtgatactaaactgttttaatccttgactgaaaatgtcttcattttgttcttacttttagtgatgttttagttgggaatttcaaagttgacagtttttttctttcagctttgaagatgttattttattgtcttatgcccttgtcattgctattgagaagtctgctgtaactgtttataggtaatctgccttttgtctaagatttttctcattgtcttttgtattccagtagttttaaaatgacatgtctaggtatgcatttatttttacatgtccatttgaatc

SEQ ID NO: 730496 - DNA, 495 bp, Homo sapiens
gctcactgcagccttaaactcctgggcttcagcgatcctcccatttcagcctcctgagtagctgggattacaggtgcgtgacaccacgctcaactaatttatttattttttgtggagagagggtcttgatatgttgcccaggctggcctcaagtgatcatcccgcctccacctcccagaatgctgggactataggcatgagccaccacaccttgcttcttctctgttattatgtgagagtggctctttccaccaagccaaggattcagttattcagagattgagtcctggtcccatggagcccagaacaccagcagtaatccagctcrtgcctctctctggggggcatgagaggacctgtggtgggaggtggaggccttagcagagggtcgagccgagttctgccacttggcccccatgaatttattagttgcatgctttgatacatgtctccgggttatcagcacaatcacactttgaaaaagtgttttgagtc

SEQ ID NO: 730497 - DNA, 639 bp, Homo sapiens
agtgacagtttgacttcctctttactgctttggatgccctttatttctttctcttgtctgattgctctggctaggacttccagtaccatgttgaagaggagtggtgagagtggtcatccttgttttattccagttctcggagggactgctttcaacttttccccattcagtattttgttggctgtgggtttgtcatagatggcttttattgcactaaggtatgttccttctrtgacgattttcctgaaagttttaatcataaatgttggattttgtcaaatgctttctctgtatctattgagatgatcatgtgattttgttttcaattctgtttatgtggtatatcacatttattgacttgcatatgttaaaccatccctacatccctcttataaaacccatttgatcatggtggattatctttttgatatattgttggattcatttagctactattttgttaaagattttagcatctatgttcatcaaggacatcggtatgtagttttcttttttggttaagtcctttcctggttttggtattagggtaatgctggcttcacagaatgaattagagagggttccttctttctctatcttgtggaatagtgtcaaaagtaccaattcatctttcaatgt

SEQ ID NO: 730498 - DNA, 639 bp, Homo sapiens
agtgacagtttgacttcctctttactgctttggatgccctttatttctttctcttgtctgattgctctggctaggacttccagtaccatgttgaagaggagtggtgagagtggtcatccttgttttattccagttctcggagggactgctttcaacttttccccattcagtattttgttggctgtgggtttgtcatagatggcttttattgcactaaggtatgttccttctgtgacgattttcctgaaagttttaatcataaatgytggattttgtcaaatgctttctctgtatctattgagatgatcatgtgattttgttttcaattctgtttatgtggtatatcacatttattgacttgcatatgttaaaccatccctacatccctcttataaaacccatttgatcatggtggattatctttttgatatattgttggattcatttagctactattttgttaaagattttagcatctatgttcatcaaggacatcggtatgtagttttcttttttggttaagtcctttcctggttttggtattagggtaatgctggcttcacagaatgaattagagagggttccttctttctctatcttgtggaatagtgtcaaaagtaccaattcatctttcaatgt

SEQ ID NO: 730499 - DNA, 611 bp, Homo sapiens
tcactggaagcactcacagaatgcaccaaaactgttatgcccactgttttggtttactatggtgaaaagatacagattagaatcagtgaaaagaagagacacatggggcagagtccaggtgtatcagtctgttctcatgctcctaataaagacatacccgagactggggaatttataaagaaaaagaggttcagtggactcacggttccacatggctggggaggcctcacaatcatggaggaaggtgaaggagaagcaaagccatgtcttacgtggaggcacgaaagagtgtgtgcaagggaactgccctttataaaaccatcagatctcgtgagacttattcacagtcacgagaacagyatgggaaaaccccgccctcatgattcaattacctcctactgggtctttcccaggacacgtggggattatgagagctatgattcaagatgagatttgggtggggtcacagccaaaccatatcacctagaaagtttcaaacatggagctcccagttgtctactctcagtggagtcatggacatcactacctttcctggcaatgatgtttgaaatatacacggagtattgccaaccagggaagctcacctgagt

SEQ ID NO: 730500 - DNA, 505 bp, Homo sapiens
attttctagaagtgatactcttatttttcctattttatacagaaggaaattaaggctgagatagtaggtcttatctaagaagtaattaacactgggactcaaatctaggcatttgcttgtagagcccacttacttaaaactgttctaccacacaacatcctcaccagaattccattagcaatgagcactacctgttagttctctctagggtcctagtacaaagcttccagagcagtgttcttaacatggggtgatyctgtaccccagtggaaatatggccatgtctagagacatttttggttgtcactctttgagggggtgataggcatctagcacagaggtccctaaccccctcatctgtatttacagctgctcctcatagctcacattattgactgagctctgcctcctgtcagatcaggatgccattagattctcacaggagcgtaaaccctattatgaactgcgcatgcaaggaatccaggttgcacgctcctaatgagaa

SEQ ID NO: 730501 - DNA, 478 bp, Homo sapiens
ctggatagcctcagtggggacgttggactagaagagaactggctctgggtactgagcaactcagcaggtgctgccagagcctggtacatcctggcacagaatatccaaaatcttttactgaagcaatgggaccaggggagctgcatggcaataaccgtcaacaaccaatttgtatgagcttgaagtgagattccataggtwttcaacggaatgtctggaggtggactagtggaaaacacgaagctctcacgaccatagcaccatccagatttcaggagagagcgacctgcagaagaagtggttccaaagtacaagatctccactgaaaaaaagacttttcctcaaagtcctaattgtcttaggtcctaagtattgtcacaagggcaccccaccaagggatgatgaccagacatatactggagtggctgaccctaccctagatccacactctttggaagaaaaagggggtagggagttt

SEQ ID NO: 730502 - DNA, 591 bp, Homo sapiens
tcagcaggaaggatttttttttttttttttttttgagacagggtctcactctgttgctcaggctagagtgcggtggtgtgaccatggctcactgcagcctcgacctcctgggctcaaacgatcctcctgcctggggaatagctggggctacaggcttgtgccatcatgyccagctaatttttgtatttttttgtagagatggtgtgtattaatctgtcttcatgctgctaataaagacatatccaagactggtaatttataaaggaaagaggtttaattgactcacagttcagtacagctggggaggcctcaggaaacttacaatcatggtggagggggaagcaaacacgtccttcttcacatggcagcagcaagaagtgccaaacaaaagtcggaaaagccccttatgaaaccatcagatctcgtgagaactcactcactatcatgagaacagcagcatgggagtaacggcccccataattccactacctcctactaggttcctcccatgacatgtgaggattatggaaactataattcaagatgagatttgggtggggatacagccaaaccatatcatggggtttgccg

SEQ ID NO: 730503 - DNA, 591 bp, Homo sapiens
tcagcaggaaggatttttttttttttttttttttgagacagggtctcactctgttgctcaggctagagtgcggtggtgtgaccatggctcactgcagcctcgacctcctgggctcaaacgatcctcctgcctggggaatagctggggctacaggcttgtgccatcatgcccagctaatttttgtatttttttgtagagatggtgtgtattaatctgtcttcatgctgctaataaagacatayccaagactggtaatttataaaggaaagaggtttaattgactcacagttcagtacagctggggaggcctcaggaaacttacaatcatggtggagggggaagcaaacacgtccttcttcacatggcagcagcaagaagtgccaaacaaaagtcggaaaagccccttatgaaaccatcagatctcgtgagaactcactcactatcatgagaacagcagcatgggagtaacggcccccataattccactacctcctactaggttcctcccatgacatgtgaggattatggaaactataattcaagatgagatttgggtggggatacagccaaaccatatcatggggtttgccg

SEQ ID NO: 730504 - DNA, 567 bp, Homo sapiens
atgatatgagcaccaactactgtgtcttttactatatcacattgagattctgacctatggcaagttaaaaggcaggaaggataaaatatttctatcatggacgttcttgcaatagaccgtttcctaatcctttacaaaccacaggagttgcattcttgaaaaatatcacaatcagcaaaacartgttaccaagatcaagatgttaacagaaaaagaggaacatggggaaaatcataaaaagtctcacacggacaaataaaattaagtttcttccaagtttgccatcacatcatgtaaaaatggttggatgtatttccataaaatcagaaagatctgtgcagactggtctgtcttaaaatataatctatgtgatgtacatgatatctgctttgggaatgtgggtcacagggatactcaagagacaggcaggcattatccagaaaagacaaagaacaaaagttctgggcttcagatgggttgagacatatcataaatgttaagatgctgtagatagagaaaacagtagcttcagtgtaaaccctgaacaacaaaatcaaaagagaattg

SEQ ID NO: 730505 - DNA, 638 bp, Homo sapiens
aataggaaaaaagtttaggatacgatagaagctgtcatagataactgtggctggacagacaacagaaagctgagtagccacagaagaactgaaacaggtcatcctgttttaatgactggaatattctgagtttgtttactttaaggacacttaatcacatctgcaaagtctgttgtaccacataaagtaacgtatttacagcagacatttggaagaagagacattatcttgcctaccaaaatctctactggcctctytattccttaaacttaacaaacaccacctgcctcagggcttttgcatatccttattctactaggaagctccaactcatcttttccgtctaataagtatccatgtctccattgaaagcttccatcccctatcaaaatgtccctctacttcagactataacacaaatgaaattgcacatatatttacatgaccaatgtttaatttctgtgtcaccactggagtgtaaataccttgaaggcaggaactgtgactttctgacttatctttgtgtaccagcacaggtacaacagaagatactcaagaaaaatgtgctgctaggcaaggaataaagctcagtaacaggaggtgagggcatctgaggatccaaattgagttcagtctcc

SEQ ID NO: 730506 - DNA, 605 bp, Homo sapiens
tgtgcccaccatagaaaagagtcagccaagtgcctgctaccacagggctcttcacacatggaaaagctgccctgtggaagtgtcccaggaaaggtcagggggacaaaaaaaggtcacagtgatttgcctccagacactggacactcttccctggagagtacagggcatgctgctctccaaacctgatcttgctacatttgtgctgcccacagtaggggtgtcactgagttttcraagaagacagcaggacctgaattgtgcaaggaaaataagtgcttgaattttgtagcatgcgtgcagtgttctactttttagaatgctactgggctcctctggtattcaagaaaggcccccaacagctcagatggtagttttctaatcctgtcttcccatatgcacatttacctcctccacccaagaactgaataacagacatgagtgctcgggacatcatgctgtctactgtcatccccttcctgagaccccctctccaaatctcttgacaaccctcttcttagctccctctttctttctggcctgttacactcaacctctccaacgtcctatcaagtacctgctcaaacctacttcctctcctgctgtgc

SEQ ID NO: 730507 - DNA, 559 bp, Homo sapiens
ggcatcattttttgaaagagaaatttaaactctgtccatctcatcccctttggaagaacgttaagattcctttctgagctttttcatcatctggagtttaaaagcttcccctcctctgtcaactctctttgaatccctcatgtcacaccaaacttcaaaagagacaaatacttttgcatgactccctgcaggctctgttttgccctgtagtgacagccccacgtcttggctttcctgattggaaaaacttctcaagctttctacattcatgatctgcacttcttcagtgcarccttctccagtttgtctctgatctccaatggtccctgcattaatcctgtccaagccacaggtgaccctcatatcatctcagcttctacttcccagtctctcactctcttttttttttttttttttttttttttttgagacaggggtctcactctgttgcccaggttggtctcaaactgctgggctcaaaagatccttcaccctcatcttcctgagtagctggtaggggtgtgagcccttctgcttggtctccagtcctttgcttttc

SEQ ID NO: 730508 - DNA, 459 bp, Homo sapiens
tttcacatgagctaattagggtgaatacatgtaagtgttggtaagaagtactagaaacactggaatttgtgagatttcattgaagaaccaacttccacccagcccttcacattgttctcttttggtagtttcttgtcatttcctccttttattatcaatagagctgctgtgaacatgcatgtacaagtttctgggtggacatatgttttcattttttgggggrtgggtagacatgaaagagtagaattgctgagttatatgatgaatctgtgttctaacttttcagaaactggacttctactccttcctgatttcaccttccacgccatttctgtagtgaggcccactccttggccttacaagacctgaattaagttaggtgcccagagccgttctgtcattgactctgttctttcccttgctagcctgtgtaataattggcaatcagaccttcacgtg

SEQ ID NO: 730509 - DNA, 589 bp, Homo sapiens
cataacctcatcacttaacacaaccgttttattttctgatcattttgccggtcaggaatttgggaagagcttggctaggccattcttacatagacactaggaggtggctcctgccatccgaaaccctggctgagatgacagctccacggactgtgggctggagcaccatgtggtagtctccccagcatggtagcctcacagtggttggacttattacagaacggctcacggctccaagcacaagtgcccccgcaaacaagaggggcctgcacagccttttataatttagcctcagcagtcagaggagcacttccaccctcttctaccagctgaagcggttctaggsctgcccaaattcaagaagtagatcccttaacagaggaagtggcagagtcacactgtaggagggcatgtgggacaagggagagtcacagcctcagctggaaaatgcaatctgctccacctcaggaggatgacaagacagatttttatctcaaaacccattcattcaagtgtctctatttcccaaactgatttttgcatcactgaagtgtttagacatcgaaccagtgtgaattctgtggacaat

SEQ ID NO: 730510 - DNA, 589 bp, Homo sapiens
cataacctcatcacttaacacaaccgttttattttctgatcattttgccggtcaggaatttgggaagagcttggctaggccattcttacatagacactaggaggtggctcctgccatccgaaaccctggctgagatgacagctccacggactgtgggctggagcaccatgtggtagtctccccagcatggtagcctcacagtggttggacttattacagaacggctcacggctccaagcacaagtgcccccgcaaacaagaggggcctgcacagccttttataatttagcctcagcagtcagaggagcacttccaccctcttctaccagctgaagcggttctagggctgcccaaattcaagaagtagatcccttaacagaggaagtggcagagtcacactgtaggagggcatgtgggacaagggagagtcacagcctcagctrgaaaatgcaatctgctccacctcaggaggatgacaagacagatttttatctcaaaacccattcattcaagtgtctctatttcccaaactgatttttgcatcactgaagtgtttagacatcgaaccagtgtgaattctgtggacaat

SEQ ID NO: 730511 - DNA, 569 bp, Homo sapiens
attatactgtggtcaatcacgagtacatcaaactaagcattcatagaattcatataaaataagcattcacaaactataacagaacacatgatattgagaacagctgagtattaagctggttggtctgtgagtaatgttactgtttctcttttatgattacatctgtgcaataaattagaaaacaggagttagccaaactgtatatgaaaaaaatgcactaatcatcagggaaatgcaaattaaaaccacaatgagatatcacttctgttagaatgggtactacatttgggaggtcaaggcgggtggatcacaaggtcaggagatcgagaccatcctggccaacgtggtgaaaccccatctctactaaaaatgcaaaaattagccgggcggtggtgccayaaacgcctgtagtcccagctactcaggaggctgaggcaagagaatcacttaaagccgggaggcggaggttgcagtgagccaagatcacgccactgcacgccagcctgggcaacagagcgagactctgtctcaaaaaataaaataaaataagacacaagataacaagtatt

SEQ ID NO: 730512 - DNA, 613 bp, Homo sapiens
tctgtaataaataaacaaatggaaaatctcagcagataaataaaaactatacaaataaaccatgcggaagttctaaaattgattaaaatatctaaaattaaaaattaacagcagttagaagatgacagaggagtcagtgaatttgaaactagatcaacagaaattatctaatctgaagaaaaaaaataaaatagaagagatcctcaacatcaaaatgtctaagacacttttaatgagtcccagagaaagagacaaagaatggggcagaaaaaaawcttgcagaacaatggctgaaattttccccaatttggtgaaagacattaatttacaggcacaagaaattcagcaaaccccagtcaggataaagatgaagaaatctatgtgtagacaaatcattatgaaactgctgaaaaccaaagataaaaagaaaacctgatgcctgtcagagaaaaatgacagattacatacaggggaatgacaactcaaatgaccatgtacttctcaccagatactatggaggccaaataacatttgtaatgtactgaaagaaaaaataaactgtcaacccagaattctacttccaatgaaaatagccttcaagaattggggcaaa

SEQ ID NO: 730513 - DNA, 611 bp, Homo sapiens
acatgggtaatgtgatagagaatggaagtaagtggcttcttttgataaaatggtcagggaaggccttgctgattagttaacatgtaatctgagatatgtgtgaatgaacagtgatctggaacaggtgcattctaggcagaagaacagcaaatacaaagggtggatgggaaccagctttgaatgttcaaggaacagaaagaaggccagtgtggctggagtgagagagaagcaattatatagacatggaagcagaacggaagagaggagttaaaagcaagcaggggccagtccacagaaggtcttctaagccacagtaaggaatttgagattattctaaggtcaacaggaaaacattgaagggtttccaacaggggaacgacatgatgccatttacatttwaaaaatatccttttggcttctgtgtgtagaatgtgggacagtggttctcaactaagtgtgattttgtcccccagaggatatatggcaacctctagagacattttagtttggttgaaaagttgttgggagggggtgggtggcacattaggtgctactggcacctagcgggtagagtccggggatgccacctgacatcctacagtgcacaggtc

SEQ ID NO: 730514 - DNA, 331 bp, Homo sapiens
ggtgacttacccagcattcctggctaggaagaagcagagccaggatccaaacccaggctagctggctccggagcttatgctctcaaccagcagccgctgttggtacaagaggaataaatgcctagtcttctacctactgtatctactcctaaggatactgagggtgtgrtgtggtcgggagaaaccctggaggccatcagaagagcaggggatattcaagcctaagatgggaagaatgggtagacaccacttcattctgctatctgaagggctgtctttgtcagaggcagcctcaagagcagaactagaatcaaacggtgaaaagctagga

SEQ ID NO: 730515 - DNA, 522 bp, Homo sapiens
atcacggagatcttaaataaagaccaaaacacttccaatattaaacactgaagggaatgtgagctatacatatacttaagaaacattgaaaacaagttagataattatttacccagttacagcaggtcagggtcttgggtgaccagatcctgtcccggcagctcagggtacaaggtggaaaccagccctggacaagatgccatcccattgcagaatgcacactgacacgcacgcccacgctcactcagacagggaccatacagacactccaattcacctaacgtgcacgggtttgggatgtggaaggaaaccatactagccaaagaaaagccatgtggacaygagggtaatgtgcacgctccacacagacagtggccccagccagtaatcattttcttttctttctctctcgctcttttatttctttttttttttttttgagacagggtctggctctgttgcccaggtgggagtgaagtggcacggtcacagctcactgtaacctccatctcctgggctcaa

SEQ ID NO: 730516 - DNA, 485 bp, Homo sapiens
taatgttttaagaaagtttaagaatttgtgttgggccacattcaaagctgtcctaggctgcatgctgcctgggggccatgggttggacaagcttgaaatagaggattaagaaaagagaccagcatcttctgggcattctgcacaacattacaagtccactactatattgattacatcatgataatccaatcaaacgagtaaaaaatggcaaacacgttaaagcyctggttaaaacgtgctctagagggtgggagataaaccctacaaagattcaggaaaccatgacgtcagtgaagttctcaaaggattaagaaataggggggaggggaaggaaaataattgttctcctaggtgggtctgtctggtctttatgtacacaaggcaaaagtgtcttctagcatctattgatctctaacagcctttaatttaaatactcatcataccagggagccatattttggggtgaagttccctgtgctccttca

SEQ ID NO: 730517 - DNA, 586 bp, Homo sapiens
aggatggtcttgatctcctgacctcatgatccacccacctcggccttccaaagtgttgagattacgggcgtgagccactgtgcccagcctagaaaagtagccttttgaggaawcctcattgtgagcacacctcaccagttcagaattattctaagtcaaaaaagcaaaaaggtagcttactaactcaaaaatcttaaagtatggggctattctgttagaaaaaggtaatttaacactaaccactgaaaattcccttaacccagcagatttcctaacagggaatttaaatcttaattaccatacaaaggtccgaccagacctagaaggaactcccttcagaaaagaatgatagatggctcctcccaggtgattgaggaaaaaacacaatgggtattcagtaattgatagggagactcttgtggaagcagagttagaagaattgcctaataattggtctgctcaaacgtgggagctgtttgcactcagccaagccttaaagtacttacagaatcaaaaagactctatctcaatcctgactcaaaaggttacctacaccctctctgaagcgaatttgcataagaactgt

SEQ ID NO: 730518 - DNA, 567 bp, Homo sapiens
gcaaaagacccttttaagaggatgaaaaaaagctacaaagtggggaaaaacatttgtaagccacatgtctgacaaaggaataatactagaatacatacagaactctgaaacattgagctgtttaatacgtaaaactcacttttgtgagtttttgtcaaggttaatgagctgctcctcccaaaagcactccttggcttctgagcaaaaaaagccagacacaggccaggcacggtggctcacgcctgtaatcccagcactttgggaggccgagrcgggcaaatcacctgaggtcgggagtttgagaccagcttgaccaacatggagaaatcccatctctactaaaaatacaaaataagtcaggcgtggtggcacatgcgggtaatcccagctacttgggaggctgaggcaggagaatcgcatgaacctgggaggcggaggttgtgatgagccaagattgcgccattgcactccagcctgggcaacaacagtgaaactctgtctcaaaataaaaaaaagaaaaaaaaaagatctgtgcagtttactgtatgtaattatatcataaagccc

SEQ ID NO: 730519 - DNA, 567 bp, Homo sapiens
gcaaaagacccttttaagaggatgaaaaaaagctacaaagtggggaaaaacatttgtaagccacatgtctgacaaaggaataatactagaatacatacagaactctgaaacattgagctgtttaatacgtaaaactcacttttgtgagtttttgtcaaggttaatgagctgctcctcccaaaagcactccttggcttctgagcaaaaaaagccagacacaggccaggcacggtggctcacgcctgtaatcccagcactttgggaggccgagacgggcaaatcacctgaggtcgggagtttgagaccagcttgaccaacatggagaaatcccatctctactaaaaatacaaaataagtcaggcgtggtggcacatgcsggtaatcccagctacttgggaggctgaggcaggagaatcgcatgaacctgggaggcggaggttgtgatgagccaagattgcgccattgcactccagcctgggcaacaacagtgaaactctgtctcaaaataaaaaaaagaaaaaaaaaagatctgtgcagtttactgtatgtaattatatcataaagccc

SEQ ID NO: 730520 - DNA, 634 bp, Homo sapiens
gcctgggcctctcaaagtgctgggattacaggtgtgagccaccgcacctggtcttatttatttatttattattttgagacagggtctcactctgtctcttggactggagtacagtggcatgattatagctcactgtaacattgaactcctggactcaagtgatccccygcttcagcttcctgagaagctgagaccacaggtgcaccaccatgctcagctaatttttaaaaaattttctgtagacacagggtctcactatgttgcacaggctggtctcgaactcctgggctcaagggatccacctcaacctcccaaagtgctgggattacaggcatgagccaccatgcccggcctaagaatgtttacatctatgtttgtaatggagatataccagaagctgcaaaatcagaggtaacttgtaggccttgtttatttgaccagcacagggttttgaagcatttgagtttgaattcctgaagaaggggtgcacactcaccagtgcctgcagctcccaccttttcctttcatttcatacccaatcagctgcacccatttatgttattttctggctcttgtagacacccccagtttgtggttttcttttctcgttgttaaagctttggtagatttggga

SEQ ID NO: 730521 - DNA, 634 bp, Homo sapiens
gcctgggcctctcaaagtgctgggattacaggtgtgagccaccgcacctggtcttatttatttatttattattttgagacagggtctcactctgtctcttggactggagtacagtggcatgattatagctcactgtaacattgaactcctggactcaagtgatcccctgcttcagctkcctgagaagctgagaccacaggtgcaccaccatgctcagctaatttttaaaaaattttctgtagacacagggtctcactatgttgcacaggctggtctcgaactcctgggctcaagggatccacctcaacctcccaaagtgctgggattacaggcatgagccaccatgcccggcctaagaatgtttacatctatgtttgtaatggagatataccagaagctgcaaaatcagaggtaacttgtaggccttgtttatttgaccagcacagggttttgaagcatttgagtttgaattcctgaagaaggggtgcacactcaccagtgcctgcagctcccaccttttcctttcatttcatacccaatcagctgcacccatttatgttattttctggctcttgtagacacccccagtttgtggttttcttttctcgttgttaaagctttggtagatttggga

SEQ ID NO: 730522 - DNA, 634 bp, Homo sapiens
gcctgggcctctcaaagtgctgggattacaggtgtgagccaccgcacctggtcttatttatttatttattattttgagacagggtctcactctgtctcttggactggagtacagtggcatgattatagctcactgtaacattgaactcctggactcaagtgatcccctgcttcagcttcctgagaagctgagaccacaggtgcaccaccatgctcagctaatttttaaaaaattttctgtagacacagggtctcactatgttgcacaggctgrtctcgaactcctgggctcaagggatccacctcaacctcccaaagtgctgggattacaggcatgagccaccatgcccggcctaagaatgtttacatctatgtttgtaatggagatataccagaagctgcaaaatcagaggtaacttgtaggccttgtttatttgaccagcacagggttttgaagcatttgagtttgaattcctgaagaaggggtgcacactcaccagtgcctgcagctcccaccttttcctttcatttcatacccaatcagctgcacccatttatgttattttctggctcttgtagacacccccagtttgtggttttcttttctcgttgttaaagctttggtagatttggga

SEQ ID NO: 730523 - DNA, 544 bp, Homo sapiens
ccatttttgccccatgtgctccttcagccatagccctattgctctcttttccagaaggcccctggagtgatcattacacacacagggaccccatcccttacccctcagtcactccccaaaccctggccacctggcattcaccctgccatgcttcagaatctattctttcctttttcccagggaattaattctttttcagccacctctagctaaakcatttttatgtcatttgagaaaaggactgactgttgaggtagacaatttccaattacacagcttgttcatgacagcctagtgtctcacacagcagccagatgtttgtgtttgcttcctttctttggtctgtccctgctgctaccacctttcgttccaatccaagctcaccctcccagtctcctggtctttattttctggttggtcctcttgtcttggattcataacctgctttctgggggtgtccccggatgtcttaagcaattattgtctgtgtcaaagagacaagacctctgagcagagtcactcatcagcatcttcccccgattcc

SEQ ID NO: 730524 - DNA, 708 bp, Homo sapiens
aagggatccatggtcataaggatggaaaaccccacactgcctacctgctcctagaaattcacaaggcacttccacacattaaagatttaattttatatttcccaaatcccatccccaagctacttttctgcagaatacacttgaggaataccaatttataaagttttatgtttcatttgatttcaaaaactggaatagaacacaaatatcaaagtatgacaatyaggcttataactctaggtaagaaattacaatggtataatctggtagttctaacaattaaccttcatttgctcagatgagagtgaaatatgttccctattgtcccccaagtctgggtaggggacataaggctatctttaggtttatttcatcatgttctgcatttttactcttgaggtcttctcactcattttagctcatgctgctttctcattattctacccaaatatccttccttctttttctctatctaccttccttttatttctctatctataagtataccacagagaggtcagagaggaaacaaagaaccagatggtataggcatcaaaggccttgtatttactcttgtgatgtatcaatgaggaaaagaggaagagatgcaatggccagcagggataatccatgtagggagtatccagaaggagacaggtagggctgggaccccagcacaggtggcctgtttgccttggcaaaagagga

SEQ ID NO: 730525 - DNA, 708 bp, Homo sapiens
aagggatccatggtcataaggatggaaaaccccacactgcctacctgctcctagaaattcacaaggcacttccacacattaaagatttaattttatatttcccaaatcccatccccaagctacttttctgcagaatacacttgaggaataccaatttataaagttttatgtttcatttgatttcaaaaactggaatagaacacaaatatcaaagtatgacaatcaggcttataactctaggtaagaaattacaatggtataatctggtagttctaacaattaaccttcatttgctcagatgagagtgaaatatgttccctattgtcccccaagtctgggtaggggacataagsctatctttaggtttatttcatcatgttctgcatttttactcttgaggtcttctcactcattttagctcatgctgctttctcattattctacccaaatatccttccttctttttctctatctaccttccttttatttctctatctataagtataccacagagaggtcagagaggaaacaaagaaccagatggtataggcatcaaaggccttgtatttactcttgtgatgtatcaatgaggaaaagaggaagagatgcaatggccagcagggataatccatgtagggagtatccagaaggagacaggtagggctgggaccccagcacaggtggcctgtttgccttggcaaaagagga

SEQ ID NO: 730526 - DNA, 562 bp, Homo sapiens
agaaggtaggaagattaactgtgttaatgatgactattcactccagatgtaaagggggacatcaagcaaaattaaaaagggctttgacatacagactaatcatccaggccctcagggcttctggaacatatctagaaataaagcagcttaaaaaaatctctcagatatcagagaaaccactctgaacctccaatgaccaaagaagataacagagaacagaaaattggaagatgaaggtattgtcctctgactagctggttccttatgtggaagaaaaggcattttctgctgactacttatgtctacaaaaggacgtccaggctcttctcacaaaagctcagaaacaatgaagaactgggtagagacaacggtaaaaattcaaaagagggggaggagatcaggaacagatcagaggggccacaggractctgggcagcccccattaaatgtagagttcgtgaaaaagatcatttaagttctcttcaaaaagcgacctcatcgccagagaggggatgaagtaaggaaaagggaacactgaccctgcctcagaaagtgtgtgctc

SEQ ID NO: 730527 - DNA, 645 bp, Homo sapiens
atgggagcaagcccaaggacactggcccaccacccactgtcctaaaggcctgtatcagacacacaggccagaaagcaatcccacaccggatagcactcaggcccgtactgcctgaacagttactactcacaaagaaccaacgcactctctctcacaaggttccagttcagagctccctcctacctctttcagcacctgctggaagaaaccaaaatcccaaggcctctgctgctgagtcctaatgcctctcccatgasctccttgtgagcaccaaaaagaagtgtctcagagttccttcccagcctgaaacaggatcaggtggtgcattagcccgagccctttgatgcagaacctcagactctcagaactgagtcaaacccttcttagaagcagacaggtgcagataatccacatgtggaaggatgaatggctgttggcactagaagacatcatagaccatcccatcaccttgagttcctccatttttgcctttcccgacagcagtgttgggcagatgggcgctctccatgctccttcactggctgaatctgatgagtgtctgaaagcactcatcagataatgagtgaggaggtgttgacaatgtctcccagattttttttctgcaccctttgattgctattggtt

SEQ ID NO: 730528 - DNA, 620 bp, Homo sapiens
gtttcgtggcctcaaagctgtggttgtggatggtgggtgggctgatgcagcgcagagaagaagttcgaaaagacagagggttaagctgtgaagagcttcatctgggcctgggtggtgacaccagcaggtgggcccctgcctggattggggtttggaccccctactagcgctgccccagcctttgcctgttattcgctgctccaggctcaggggatggagggattgtgctcccacgtgaggccagaaaggaaggctcagctaggaacaggttcaaatgcasggtgcccatgtctgccctcggccttgaaccctacttgcttattctttctttcagtaaatatctatttagcacccactatgtaccaggccctactctagcttctagagacagagcaattggaaaaagagacaaaaatccctgccctcatggactgtacagtctagtggggaaacagacaataaacaaggcaaacaagtaaactatatagtacatcagatggtggttaatgccaaggagaaaagagcaaagcacgaagtggggaaggggccggagaagtgtcatctgggctgatgatgtctgagtatagacctggagggggtgtgagagctgatacccaagg

SEQ ID NO: 730529 - DNA, 541 bp, Homo sapiens
gtacgtgatgtgtacttcccatcttatcacacggaatgttataaagttgtgtactcaagagtggagatttaaaaatttaaacgtgttttttttttttttttctgattcactaggactttctttagtgaaactggcttttttagttttccggcaagtatttgtaccttgactactaatacagtttggcctcactttgatttgtgctaagtcactgcagtttcacccagcattgtgtttacaccatcattgtcagggttaacacaatggaaagtccaaataacgtccagaaaaatagttttggcttcgcagacactttgaaagggtcttggsgacccccaagagttgacagactataccttgggagccattgagctaggtcatttcaggtctctccaagacctaaagaacaaataactcattttgtaaatccaaagtctttaagtgaggccacaaacaggtaacctgaagatcaaatctagcctgtagacatgttttattaatatttgactaacttagggttctttaaaaatttgaatttgaa

SEQ ID NO: 730530 - DNA, 638 bp, Homo sapiens
cttatcccggagctgagctttgtctatggctgtgcaggtggggcgggaatgggaaagacagtcctctggcacgctttccacatttggatggaagacccagcttcagcttcaaacacttttattcctgatggcattgtttacaaacatgctagaaaaacagaattagggaacaaaattatctcatgattgctgaactatgatgagattgatgcttttaagcacttcccctagggaaaccaggcaggaatctttcaaggggaaaawgtatcataagggaagacaattaaaagttaaaactggctaatgaaactgataaagggagaattgttttaattatcgatgctcgtcttaaataaattgtatgatttcccagaataacacatccatcatcatcaagtatgaggacatgacccgatcctggggtctcacaaggggcttttgggtgtctctgagaggaccatgatgaagactcaatgacattcatgcttctgaaccctgaatccacttcaagatgccatgtaaatgctgtgcatcttcaccagcagatgtcactgtttacatataaaatgcaaacagcccccaaagcttccccccacccccacctttattctaaagcaacacacacttgtccatgtttt

SEQ ID NO: 730531 - DNA, 544 bp, Homo sapiens
tggccgggcacggtggcacatgcctgtgatcccagcacttttggcggccaaggcgggcgaatcacctgaggtcaggagtttgagacaagcctggccaacatgaggaaaccctgtttctactaaaaatacaaaaattagccgggtgtggtggtgcatgcctgtaatcccagctacttgggaggctgaggcaggagaatctcttgaacccgggaggcggaggttgcagtgagcaactgcactccaacctgggcaacacagtgaagctccatctcaaaaaaaaaaaaaaaaaaaaakctttgtcctattctcacaataaagtttctgaatatgacctgaaggcagaaggcaggtctgtcttgattactaactacctgtaactgagctctaatgacactctcctcattctaactgtttagtttcttggttttgtggatttctatttttgttatagaattgtatttatttttctatagttcttaaaaatatttttgctgggtatgcagttctaaacaggtattttctctgggcagtttgaagcttttat

SEQ ID NO: 730532 - DNA, 597 bp, Homo sapiens
ctccatttgagattcttgatgatttattgtaaacaacaaactattttaaaaatttaaaaaataataatttttgatttgaggagattttttccaaaccaaatccttctcctttcattaagtagaaaaatggaaactctgcccctgtaattactccatgtaatwggaaattttgtcctgattcatctaaatcatttggttcttgctaggagtattagatggtattaacttctctttctctgtgatgcatagcatttttaaacatttttattttgagatactgtgggtgtgcatatacttataagaaataatagaaagaaatcccatgtacacctttctcagtttctcccaccagtagcatcttgcaaatccatagtaaaataaccaagatattgacattaacacagtcaagacacaaaacagtttccttaccaggacaatctctcggatggtcattttatagccatacccatttttctcctgcttccacccatcctttaagccctgacaaccactatttcttcatttctatcatttagtcatttcaaaaatgttgtataatttggatcatatagtgccttaatctgttcatgctgtcat

SEQ ID NO: 730533 - DNA, 498 bp, Homo sapiens
ggaccattatctttcacatgtcaattcattgacttccttatttccaatgacttccttttcctcttcaccttaacaacctactttcttcttcatgccttgcccctataagtgccccatcctgtaactgctaattcaaggatctaacttcctgacccaattctcctctattttcagcatacttgttcagtagttctcattatgcccatccatagatctttttggctcctcctattctgccaactcattttccagttcatcatgtttcccttctattcgcaacccttatattcagtttaaactttaagttatattacatcaataaagtcactattwtcataaattccttttcactttctttttgtcacatctctatggcagaatcccattcctagatgaagccaactgtctgctttacttgtactggtgcccaggtagcacaaaggtctttgagaaaatattataatataacatactttttcttctaaaaatcataacatg

SEQ ID NO: 730534 - DNA, 623 bp, Homo sapiens
acagcttaaaaaaaagctccacctcttgatactatcagattggcaatattgaatactgaattcttcaaggaacacattcaagccatagcaacatcccaatatgcttttgtaaaaattgagaagttgagttaaaaatgtatatgagaaaggcaaatgttctagagtatccaaaaacaatttgacaaagaaaaaatttggaggactcgcaatttctgatttcaagacttagtgcaaagctataataataragacagatttcttacaatgttaaatatatagattgatggaatataattataaatccagtatatgatcaattgatttttgagaaatatgtcaatattgttcgatagggaaaactaagttttccaaacatggcactgaaataatttgatatccatgttaaaagaaaattttatataataaaagttatataaatattaactcaatatgtattatagaactaaaccaaaaaaaatctgtaactctaagtcctatagaagactatagaggagataaattttgcagacagtaaatttttagataggatacaacacaaatgttaagaagaaaacagtgttaaattatactccaacaaaattaaaaccacagactgagaatat

SEQ ID NO: 730535 - DNA, 603 bp, Homo sapiens
aatgaaaggaagctgacattattcaaaataaattttctcttactgaattgatgagtagtttggaggaaggcaaaaaggattgaattacagtgttttgtgccaaagggtttttttgaccctgaacccagtttatttttctgactttgagataagatgctgaggtggcaatcaagttttctagaaaaggtctaacatgatatgaacagaagaatttctcactttctcatattagaaaactttccttttcacttgatatttgaagatgaasggctcattgatacatgttttcactaacccttagcttaaaactactctataaaagattgtgaaggaaataaatatgaacctaatcttgatttctgaaaagctatttcctgtgaaacaagaatgggataaattggtaatgcaacctttgtaaacatgattttatattttttatgctaaggactatactcataggagcttcatcttctactcatttgcatgatattttatgggtcaaacatcctcttcagctcaagcgaggctagtgaaacatttagtctggaggaaatttttatttttgaataagctttgtgtatcagcttatggtaaaggattcta

SEQ ID NO: 730536 - DNA, 639 bp, Homo sapiens
ttttaataaattgaatgtatgaatgtaggaatatcttaccctgggaagagcatgtgtatctccttgacagttgtggtcttggatttactcttttttttttttttttttttttttttttgagacggagtctcgctctgtcgcccaggccggactgcggactgcagtggcgcaatctcggctcactgcgagctccgcttcccaggttcacgccattctcctgcctcagcctccagagtagctgggactacaggcgcccgccaccgcgcccggctaatttttttgtatttttagtagagacggggtttcaccttgttagccaggatggtctcgatctcctgacctcatgatccacccgcctcggcctcccaaagtgctgggattacaggcgtgagccaccgcgcccggccttggatttactctttacctgtctgcacaggatgcatgttgaacaaagggtgagggccagccatgttccttagctttttttaaggktgagttctacttgaagataatcagttttacctggagtgagttgaagatatctccattcttgagaaaagagaaagcaaaagaactgtttgtttgaggcaggtgttggtaaagatcctatgaaatatttttactctcctggggaaaaat

SEQ ID NO: 730537 - DNA, 562 bp, Homo sapiens
ttgaacatcatcccccactgccttctgacctccatgacttctgatgagaagtaagctgttaatcttattggtgaatgttgtgcatgatgagtagctcttactactttcaagattccctttttgattcctttggcttttgatggtttgatttttatgcatttatatgcrgacctgattgtatttatcctgcttgtagtttgagcttcttggatatgtagattaacactttttcatcaaaattgggcagtttttagttattactaccaaaaattatttctgctcctttctctgtcctgtccttctgggtggttctcccattatgattattttggcatgcttcattattatccactgataatctgagatcttttttttttgtccttctattcctcagtttgtataatctcagttaacatatcttcaggtgtgccaattctttcttttgactgagcaagcgtgctgttgtgcccatctagtggactagtcatttgcattgtactttgactccagaacttatacctttttcttctttttcaaataatttatacctttttattaacat

SEQ ID NO: 730538 - DNA, 653 bp, Homo sapiens
caccgtgtttcatctaccataaagtgcataattgaaattttctacttccagatggaaataagtaaatgtatgtatatctatattctcaaacagaagtaaggagaaaataatgcatgtgcctattgcattagagttcaggaaaatctgatttttaaaaattggtrtgtatttatacatatttatgggtactttgatacaatgtgtaatcaaatcagggtattgagggtatcaatcatctcaaacattttttttttactttgaggacatttcacgtcctctcttttagctattgtaaaatatgcaatatattgttaactacgaatagtcaacctattaggctattgaaccttaaaacttatttcttctatctgactgtatgtttgtacccactaacctccctttatttctttctccactacacttcccagcttctgttagtcatcattctcttctttatctttaagaaatcagttttctttatctttcattatgtgagtgacaacatgcaatatttgtctttctcttcctggcctatataacttaaaataatgacttccagttctatccatgttactgcaaatgacagaatttcattcatttttatgactcagtagtattccattgtgtagtatgccacattttcttcattcatc

SEQ ID NO: 730539 - DNA, 653 bp, Homo sapiens
caccgtgtttcatctaccataaagtgcataattgaaattttctacttccagatggaaataagtaaatgtatgtatatctatattctcaaacagaagtaaggagaaaataatgcatgtgcctattgcattagagttcaggaaaatctgatttttaaaaattggtatgtatttatacatatttatgggtactttgatacaatgtgtaatcaaatcagggtattgagggtatcaatcatctcaaacattttttttttactttgaggacatttcacgtcctctcttttagctattgtaaaatatgcaatatattgttaactacgaatagtcaacctattaggctattgaaccttaaaacttatttcttctwtctgactgtatgtttgtacccactaacctccctttatttctttctccactacacttcccagcttctgttagtcatcattctcttctttatctttaagaaatcagttttctttatctttcattatgtgagtgacaacatgcaatatttgtctttctcttcctggcctatataacttaaaataatgacttccagttctatccatgttactgcaaatgacagaatttcattcatttttatgactcagtagtattccattgtgtagtatgccacattttcttcattcatc

SEQ ID NO: 730540 - DNA, 653 bp, Homo sapiens
caccgtgtttcatctaccataaagtgcataattgaaattttctacttccagatggaaataagtaaatgtatgtatatctatattctcaaacagaagtaaggagaaaataatgcatgtgcctattgcattagagttcaggaaaatctgatttttaaaaattggtatgtatttatacatatttatgggtactttgatacaatgtgtaatcaaatcagggtattgagggtatcaatcatctcaaacattttttttttactttgaggacatttcacgtcctctcttttagctattgtaaaatatgcaatatattgttaactacgaatagtcaacctattaggctattgaaccttaaaacttatttcttctatctgactgtatgtttgtacccactaacctccctttatttctttctccactacmcttcccagcttctgttagtcatcattctcttctttatctttaagaaatcagttttctttatctttcattatgtgagtgacaacatgcaatatttgtctttctcttcctggcctatataacttaaaataatgacttccagttctatccatgttactgcaaatgacagaatttcattcatttttatgactcagtagtattccattgtgtagtatgccacattttcttcattcatc

SEQ ID NO: 730541 - DNA, 640 bp, Homo sapiens
tcctctttggtgaggtgtcttttaaggtcttgggctcattattttatttgggctgttttcttattgatgagttttaagagttctttgcatgtttgtgataagtcttttaccacatatcttttgtgcataggatctcccagtctgtggcatatcttttcattttctttatggtgtcttctacagagcagaaacttaatctttatttagtatagtgtaccaattttttcatgtatcattcctttagggttttacctaaagttatagccatacctaaggtcatcttggtttttctcctttgttaccttttatgagttttatagttatgtattttatatttagatctgtgatcagttttgagttaacttgggtgaaagatgtaaagtctttctagacttttattttttgcatctggatgtccagtttttcagcacaatttgctgagaagattttctttgctttwttatattgtttttgttccttttccaaagttgactgtattcatatgggtctatttctgggctctcttttcctttcctttgacctacttttttttaaaccaatatcacactatcttgattacattatttttgtaactttacagtaactgttgaagtctggaagtgtcagtctcttgacataa

SEQ ID NO: 730542 - DNA, 555 bp, Homo sapiens
agaaagacagaaagataaaaataaatatcccatcattgcaaggtccaaagaaagacagtcttaacagtattaaatatttacgtcttgcttttcaaatttctatttttaaaacacagctgcaaattgtgtttatttgtgcaacaacttaaaaaacattttcattttgaaataatgatagatttgtaagaagttgcagaaaaaggyacagggaattcctgtgcaccctttactttgttttctgtcatggtaacatcttgcataattatagtacaatatcacaatcaaaaaatagattatccgaataatctacagagcttattcagattttaccacttttatatgcattcatctgtatgtatgcgtatatagttatatgtgactttatcatgtgtttagatttgtatacccatcacaatctagatacagaactattccattaccacaaagctcccttacgctacctctctatagccacatagacccctaacgacatctaatttttgcacactttctatgtaccaagcactgttctggatactaggaatgcatcactaa

SEQ ID NO: 730543 - DNA, 544 bp, Homo sapiens
cttatataaatctacttatatattgcctctatctatatatttatatattatttttaaaataaacatctaacatagtaaaaaacgttccattttgtgtaaaaaaaacttcaaaactgttcatatgtacttatataaacacagaaattgtatggaagataaactattagaaccagttacttcagacaggaaagtggattacttgttatttttttcttgatacacctcattagcgtttcaatagtcacacgyattattttgtaataaaaataaatttaatcaactaaaaaactacataaaatatcctcacccaagcagctggcagcggcttctctacaaatatgatttctccctgtggagaactttgttgctagttctgatccatgttatttgagtggaacacgagacttgaccatggagcaggaactggctttatgcctgaccaggtcctgcactcgcatctactcatctaacctggagagctcaactgtaaaacctggaggaaccactcatctctttttatggctggtccccagggccccaggga

SEQ ID NO: 730544 - DNA, 630 bp, Homo sapiens
tctttcacttaaattttcaatggggatgtggtgctattctctaaatgtctaaaaggtttcattataaaaactctcataccacttaacttcttttttaagtgttaactttttaaatatttatttccattataaactcaaattttataccaagctatacaccaatgtgtacaaatcccactaggattgcagcagtgataactacatcttctttataataacacttaaaaacataataaaatcttttgatccyagaataacagtcttgttcaaatgattaaaaatcacatatcaggcaaggcgcagtggctcacgcctgtaatcccagcactttgggaggctgaggcaggcagatcacctgaggtcgggagttcacaaccagcctgaccaatatggagaaaccccatctctactaaaaatacaaaattagccgggcgtggtggcacatgcctgtaatcccagctactcggaaggctgaggcaggagaattgcttgaacctgggaggcggaggttgcaccattgcactccagcctgggcaacaagagcaaaactccgtctcaaaaacaaaacaaaacaaaacaaaaacaaacaaacaaaaaaatgacatatcaaggacattcggcattaacacg

SEQ ID NO: 730545 - DNA, 638 bp, Homo sapiens
acactgaagtacaaagaccaatgacactgtgaaacaactacctcaacaagtctgcaaaataaccagctagcatcatgatgatgggatcaaattcaaatataacactgttaaccttaaacgtaagtgggctaaatcccccaattaaaagacagagaatggcaagttggataatgaatcaagacccattggtatgctgccttcaagagagacatttaccaagcaaatggaaacaagaaaaaagcagaagtcgcaatagtactttctgacaaaaggcactttaaaccaaaaaagacttaaaaagacaatgaagggcactacataatggtacagggttcaattcaacaagagctaactatcctaaatatatatgcacccaatacaggaggaccaggattcataaagtaaactcttagagacctacaaagagacttcgacacaataatagtggsagactttaacaccccactgacaatattagacagatcatccaaacagaaagttaacaaaaatattcaggacctgtactcagctctggatcaagtgaacctgatagacatctacagaactctcaacccaaaaaaacagaatatacattctcctcattgccacatggcatttactctaaaattgatcacata

SEQ ID NO: 730546 - DNA, 376 bp, Homo sapiens
aaaatgcaaatttgcaaattgcatccaggaactcatcaaatctgctagatgaattatgtaattcaatttggcaaaatttttgcacacagcacaaatagtttactttggttttcttggattctgttctgagaaggaggtagctggaaaaaaagtgaaaaattacaggatatgattcataaaaatcccacatcttttttgtgtgcttgtacattcttttttgygggaaaatgtttttgtcccacagtaatggctcctcatccttctcaatgagtactttttagtcagaaagatagccacacacaatatttccaagatactcaaaaaaaagtagtcataaggagaagacgcatgtcatttagcagctaaaagaaacatg

SEQ ID NO: 730547 - DNA, 615 bp, Homo sapiens
cttgttacaatatttaaagatagttcatctcacaatgttctttccatttactaagcaatggtaacatagcctctggttttatttgagtccattttggttactatttaataaaactgtctgtgttttttagtttaatatacagccccaaattatacaattgggaaaattaatttttaagccttctttttatacctacgtttgacagcttattaaattcctagtattatttactagtagatttatcaaaaatcatttttattcaccctgtatgagataccatgagaccatgagagagcgtatgtgattttccttcaaagtaagtatcacaaggagatgcaaaattgataatactcttctagcctctcaytcagaacaactgcgagcaataaaatttaaacgggtaagtgaagaaaaactataccaagtgaaactaccctttcaaaaagtgctggtctatttcaaaagaagtgttgatattttcggaaagcctccattctgtccctcagggctatgctccatcttgtaatggtataatcaaaaagcaatggcattctgttcttacaactacatgctgtggataatcctctccacagttcatttgcttctccaggtatt

SEQ ID NO: 730548 - DNA, 615 bp, Homo sapiens
cttgttacaatatttaaagatagttcatctcacaatgttctttccatttactaagcaatggtaacatagcctctggttttatttgagtccattttggttactatttaataaaactgtctgtgttttttagtttaatatacagccccaaattatacaattgggaaaattaatttttaagccttctttttatacctacgtttgacagcttattaaattcctagtattatttactagtagatttatcaaaaatcatttttattcaccctgtatgagataccatgagaccatgagagagcgtatgtgattttccttcaaagtaagtatcacaaggagatgcaaaattgataatactcttctagcctctcattcagaacaactgygagcaataaaatttaaacgggtaagtgaagaaaaactataccaagtgaaactaccctttcaaaaagtgctggtctatttcaaaagaagtgttgatattttcggaaagcctccattctgtccctcagggctatgctccatcttgtaatggtataatcaaaaagcaatggcattctgttcttacaactacatgctgtggataatcctctccacagttcatttgcttctccaggtatt

SEQ ID NO: 730549 - DNA, 603 bp, Homo sapiens
aatgccaaatactatccagctctaatatttcatgattggcctttctttatcttactgtttcacgaaggaacagatgtcacattaggggaggaaattcagtctcaccacccactttccatgtcaacaagacctgttgacatgggtgtccgctactattaaacttactttcaagttaatgttattgtagtattacccaagttgaaaattccatataccatctataagtacatatattgtaatgagttacataaaatattattattaaacgttattttagcagatgacatttacaaagctagtgatgccttatgacatccttttcttgttttctatggtggctaacatggggactctgacaaacacactacatgtggctagtggcttatgggtcaaattataaagactagaggaaagacaaactagcattattgagaactaaatatgtgccaagactgtgctmggtgtttctacatttataatttgtaattttatttaaccctggtgacaactatttaggcaatgtctggtagtgtttttgaagatcacatggctaataggcagaggagctaaaatccttactcagcactaattttaaattgcctc

SEQ ID NO: 730550 - DNA, 608 bp, Homo sapiens
taagttatcttttaagaccattttatttccacagttaattacttaattcttttgtttgtttgtttgtttgagacagagtcttgctctgtcacctaggctggagggccctggatgatctcagctcactgcaacctcggtctcctgggttcaagcaattctcctgcctcagcctcctgagtagctatgattacaggcacctggcaccatgcccggctaatttttgtatttttagtagagatggggtttcaccatgttggccaggctggtctcgaactcctgatcttaggtcatgcgcccacctcagccttgcaaagtgccrggattacaggcgtgagccaccacgcctggccagttgcttaattctaatgcattttctgaaagcttacaagcaagtaaaatcctagaatattgtatctttaaggaggttcctggaaagacccctgacgaccattctggaatacaggttttggataactttaggatcatatcatttggattgggtaaaaattcccagaactctaatgaagaaattgactggattataaaactgcaaacccagcaggaaaagaattaataccaaaggaatactctgccagattttcatgcta

SEQ ID NO: 730551 - DNA, 625 bp, Homo sapiens
aggaccatgacttttcatacagaaggttgctgattcatgtggatttagacagtctccctgaatgtttgttttcttattacaatagccatttccatggcctctgctccatttccactccaacgaggtttactataacttaataatgatactaactactgagagttacatcagactccataggtttaagagtaaagtcctctacaagactgccctgatttcagataccagccacaagttctggggttccctaggccatccacatttctgactgacttgggtacaaattcaggagttccaataaccaacctgccttgggtttgataattcactagaacaactctcagaactcagaaaagcactggacttacaattacagctttgtcagaagaaatacacatagggcaagttctagaagastcccggtatagagctttcatgtcctctcccatgcattcagagcatcaccttccacgtcagtgtattcatcaaccaggaagctcctccaaacctccaatgtccagaatttttattggtgttttattacataggcacaatgagatggagcagggaccctttctagggccttgccagctccttcccccatcccaaacatgaaaattaagga

SEQ ID NO: 730552 - DNA, 606 bp, Homo sapiens
atattattctccttgcagtcaatatcttcaccactcaagctacaactgtcttacatttaaaatatcatgccagggcacccagaggtggattgtcatcaatttgtttaataaagtgctgcctcagcacccatttttaggactgccataagttatttgaagcccagtcatatactgtcacctttggcccagttaaaactttccctccctgtgtggttgtttgcaatacagcccgttttttcctcatctcattgaaccaaacccaacatattccacaggtgctgccgtgataaaacttaatgkttaacaccagagtcttgtaaacaagttccccaattcacaagtgttttctttaaagtaaaaaattcacaacccctgaggaaagtgtaagggctaacacccgtgcaccttaataaagacctggccccacagctcttctctctgtctcttgctccccacccgttggttgagctccctgccacctctagccttcccgtcagcctcctgttgacacccctaacctctatgtgatctgtaagtaataaccttcttgtgtttcatgcatttggttttacttcctcattttgtctcacctgcctgatacacccg

SEQ ID NO: 730553 - DNA, 606 bp, Homo sapiens
atattattctccttgcagtcaatatcttcaccactcaagctacaactgtcttacatttaaaatatcatgccagggcacccagaggtggattgtcatcaatttgtttaataaagtgctgcctcagcacccatttttaggactgccataagttatttgaagcccagtcatatactgtcacctttggcccagttaaaactttccctccctgtgtggttgtttgcaatacagcccgttttttcctcatctcattgaaccaaacccaacatattccacaggtgctgccgtgataaaacttaatggttaacaccagagtcttgtaaacaagttccccaattcacargtgttttctttaaagtaaaaaattcacaacccctgaggaaagtgtaagggctaacacccgtgcaccttaataaagacctggccccacagctcttctctctgtctcttgctccccacccgttggttgagctccctgccacctctagccttcccgtcagcctcctgttgacacccctaacctctatgtgatctgtaagtaataaccttcttgtgtttcatgcatttggttttacttcctcattttgtctcacctgcctgatacacccg

SEQ ID NO: 730554 - DNA, 451 bp, Homo sapiens
ctaagctatgtttctttggagaaatcacttaatttcttggaatattccacagttgtaaaaggagattgttgccagtttataagatattgtgaaaattagagatactatttgatgctctgcaaaaatcatctggcctaattyttggtatttagccttagccatgctattattattaaactcctacctgctcttcttgttcttggatctttctcagtctagctctggaaagagagtatgtcccgagtatgttttgaataaccatggaaatacaaaagtagcccttgacctcaaggaggtttcattttaaataacaaaactgaagttttctgaaaagcatgactcagatttgaaaacagaaaaagtgacctgagattggttttgggggttttagactaagaacctttttggtgaaatcaatggaggaatttttagtgttgatgatctctctgac

SEQ ID NO: 730555 - DNA, 626 bp, Homo sapiens
ctttaaataagaatgcagagatttcatggtctaagaatagaacaatcagcactctttgtgttctattttactgcttcataaataaagttcttcagtccaagacatctgaacatgtatcagaatattcactaattattgtgaacatattttaaaatggcttaggctacagattctttccttacaaatccatcccattgtttggggaatccaattgtagggtgcttcatatcaggacaaaaaaaataaattagtaaacttgtttctttttctaaaaacgtcataatagatttgcaattttccattatatatttattcagcttatttttggaagatgttggtcttgttaagatatcactgagaatactacattactatgtacaacttatattctgggaactgtaagtaacatttagctgcttaccccaaatggccaagtaaatgaacaactgttatgtcttatcttagaaataaaggttcayataatcatctttcagtgcagagtattaacatttgtttgagaagagctcttcagtagaaaatatagctaatatagacactattattctcaataaaaccaaaacaaagctgtaactctgagtctgttctctttcaccccattgcctctg

SEQ ID NO: 730556 - DNA, 580 bp, Homo sapiens
tggttatgggactaggacagggtatacacaagatgagactatcctgtcttgtcttgtggtaccagaaagtaaggatgtgctcagtaaagaaaactatgaaggtttgtccaaaggacacggaagacaactgaaagagctccgaatattcaaagctggaacaagttgtgcaacagaataaactgtattggattataaccaaaagtgtaaaataaatatctatgagtttgtacttatataaatacattattgaataattaaacaggtggggraaatagacaagttttcatgcagaagaacaccaaataaattatgtagacactgttccatcaagatgttggattataactccttactgcttatgtgcagactacacactttgatttaatttcaaagagtagagtaatggactgggggagagatagtaattgtacgttggagaaatctgacaagcactaccttaggcaggtgattagtgataagtcatgttacctttaatatgatgtgctgagaatgattatctctctggtttttgtctccaaaatccactaccctagtgtaaccatgtgaaaaacttctgaag

SEQ ID NO: 730557 - DNA, 593 bp, Homo sapiens
gacagagtctccctgttagccaggctggagtgcagcagcgtgatctcggctcactgcaacctccgcctctcgggttcaagcgattctcctgcctcagcctcccgagtagttgggactacaggcatgtgccaacatgcctggctaattttttgtatctttagtagagacagggtttcaccaygttggctaggctggtctcaaactcctgacctcgtgatccacccatctcggcctcccaaagtgctgggagtacaggcatgagccaccaggccaggctgctttggcgctttttatacctgcctcctccccaccctactcctagctgattgtcctaattggttgttcatgacccatccttgggggatggtgacctgtttgggttttgaaccaatccgatttccctgtttatctgttctgttcatccctgaagtcttacttcagatgagtctcagctcactggagaccaactaggaggaagctgttatctgtctcagagtccttcccacccccacctccagccccctctctcctctggcattggatttgaggtctccagattggcactggcatctatgccatccttcccgttactc

SEQ ID NO: 730558 - DNA, 593 bp, Homo sapiens
gacagagtctccctgttagccaggctggagtgcagcagcgtgatctcggctcactgcaacctccgcctctcgggttcaagcgattctcctgcctcagcctcccgagtagttgggactacaggcatgtgccaacatgcctggctaattttttgtatctttagtagagacagggtttcaccatgttggctaggctggtctcaaactcctgacctcgtgatccacycatctcggcctcccaaagtgctgggagtacaggcatgagccaccaggccaggctgctttggcgctttttatacctgcctcctccccaccctactcctagctgattgtcctaattggttgttcatgacccatccttgggggatggtgacctgtttgggttttgaaccaatccgatttccctgtttatctgttctgttcatccctgaagtcttacttcagatgagtctcagctcactggagaccaactaggaggaagctgttatctgtctcagagtccttcccacccccacctccagccccctctctcctctggcattggatttgaggtctccagattggcactggcatctatgccatccttcccgttactc

SEQ ID NO: 730559 - DNA, 533 bp, Homo sapiens
tgcacatctagacagtgacatcatatacatgttattgaggtccagggtggggcacagaagacaggcccagagtcatgggggcagggaagaacacagaagggaaccccacccactgtctgcctggagaagacctgattctgttgtcactcatttgtctgacttgaggaaatttggtctcctcgtttccaaactgccacagactgcagtgacctctgtgatcagggggtactttgattaaagctctacagtaagggtcactctagtttttttctctgtctccagggttaagcttggtgcatggacacaacagatattcaggataagtwtgttgttgaacaaatacaagtaatgcatttgtgagacctcattctcacttcctttgttttacaaagtcagttgcacatcagcctaaaaacccaggacataattcacagaaatggagcttgaaagcatgactagccagtattaatcaaaggccaagcggctgagcgggcgtggtggacaagcctgtaatcccagcactttggaaggtc

SEQ ID NO: 730560 - DNA, 630 bp, Homo sapiens
gtgaacaccatcagctgaggtggtatagaaaaagcaactcctggtcagagcagggaggaactcatctaaaggggaggctcccaagagctgtagcagagggtcaccaaaggaggggaactccatgtgggattccaaccctgactggttacatggaagtgaacaggacctcgtcgaagagggagaggtctgcgttgcctccaagcagtgcttcttgaaatggtatccccccagcagccgcctcagtatcacctgggaacttgcaggaatgcacattcttgccccaccctggacccgctgagccagactctctagggtggrgcccagacgtctgtgttttgactcagatgacatcggtgcaggctcgagagtgagctactcttccagggacaaccagtgtggtccttccacccatgcgtgtccagggatgaccagtgggtgctggtgttcagggtggtgtgcggacatccattcatttattgcataattattaaaaaaaaaacaacactcgctgagtatctactgtgccctaaaaaatgagaaagactccgctaatgtgtaggcagtcaaccagccctggtcagcgtactcacaggtaggcagacggccgcgcggagagcaccaaggggcaga

SEQ ID NO: 730561 - DNA, 603 bp, Homo sapiens
caatattagggatgtacagtgagactggtcctatatatgagaaaattagtaagcccagctttggaactaggaagcatagagaaaaaaagagagtgagactgacagtaactttgattactcagacatttcatgtgcaatgtgtgaaagagaagaaaatcttctgtgtcattcaagccctagctgccatgcgtttgtggtttagttttggggagattaccactagggcctcagttttctcattggtcaaatctggttgttgagtcaggtattctccaagggttttctaatttctagagccctctaagtctgtgaagagtctctctagccctgtttacacctcaatccaattcaccatctcagccaaaytaaattagtgcttagaaaggctttgctctttctttgactattctttggtatacatggtcctgcctagtgttgtgttggtaaacacttaacattacctgatttaaaatgtttcccaacttttatggtgtgaagattcccatcatagccaatgtcaagctaccaacgtgaggtcaactgactgcatggcagtgccccaccatatagcatttctgccacatgaatacattaggcatcagt

SEQ ID NO: 730562 - DNA, 502 bp, Homo sapiens
actaattcaggcagtagggccattttcatgatattgattctccctatccatgaggatggaatgctccttaatttgtttgtgtcttatttccttgagcagtggtttgtaattctccttgaagaggtccttcatgtcccttgttarctgtattgctaggtttattctctttgtagcaattgtgaatgtgagttcattcattatttggctgtatgcttgtctattgtgggtatataggaatgcttgctttttgtacattgattttatatcctgagattttgctgaagttgctgatcagcttaaggagcttttgggctgagatgatggggttttctaaatataggatcatgtcgcctgcaaacagagacaatttgatttcctctcttcctatttgaataccatttatttctttctcttgcctgattgccctggctagaacttccaatacttgttgaataggagtggtgagagagggcatccttgtcttgtgcccatttgcaaaggg

SEQ ID NO: 730563 - DNA, 616 bp, Homo sapiens
cctttaacaagtgaaactttttttttctgaatgaagcagtagtggaatgaaggttttatctagatgaaaaaataagtatctcatatctctcttgctctttaatcatatgctgctgtactgaaacactatgggcgtctaatttcatttatcacatgaaaggcaatgattcaccttgacttacaaaacaaagtcgaatcagtaatgcaagagtttgaattattttttaaaattaatcccccctccccccaagactcccccaggatctgtattagtatgccatggccagagtaaaacctataaatattatgaggcctacattactcagctgttgccacaataatgcaaaaaatcactccaagactcagtggcttaaaatggtaattatttattctcacataaacatttgcaarttagctggggtttagatgacctggggtggtccgggctgggcttcaagttatgggctgagtccaagtttgctccaggtgtcttccatcttccttggacgcaggcatgtgtatgcatctcaaggcaatgttggaagtgcaggagagccaggcccactgtgcaaatccacagtgaccttgatggcatcatgcttgctaacatcttactg

SEQ ID NO: 730564 - DNA, 662 bp, Homo sapiens
tgagatggagtctatttgtggtgaagatgctgtgaacattgttgaaatgacaacaaaggatttagcatattccataaacttagttgataaagcagcagcagggtttgagagtatttattccaattttgaaagaagttctaatgtgggtaaaatgctaccaaacaacattaaatgctacagagaaatctcttgtgaaaggaagagtcaatccgtgtgcaaacttcactgttgtcttattttaagaaattaccacagacacccyaatcttcaacaactactaccctgatcagtcagcggccgtcaacatcaagacgagatcctccaccagcaagaagatgatgactcactgaaggttcagatgatggttagcatttttttttcagtcaagcatttttaaattaaggtacgtaaagattttaaacataatgctcctgcacacctagactacagtatagtgtaaatataacttgtatatgcactgagaaaccaaaaattcatacaaattgcttcaatgaggtatttgctttattgcagtggtctggaactgaacccacaatatctctgaatcatgtctgtatgtggcttaatatgtaaactgcccacttccgagagaaaagttcaggtacattttgcacatgttttcccttggacactgcaaaaca

SEQ ID NO: 730565 - DNA, 630 bp, Homo sapiens
agaaattaatgcctgatactaagctccctgagggcagggtccctgccattgtcacccaatgcctgtaacagcactggccacagtcagactacacacacacacacacactctctctctctctctctctctctctctcacacacacacacacacacacacacatatatatattttatwtatatatatatatatatatatatatatatatatatatatatatatttggttaaatagaaccataatgtgttgatggaggaagactcacaagctgttggcccaactattccacaagattgccctctccagaaaaatctaagaggaagcagatccattgctggctgacccctcccagatctggctacctcatgagatttgtttgggctggagctgagtttcttcaataaagccgagtttcattcattgcagcccaggtgctcctgagtgggagtgaaggtgcagaagatgtgctgaggcattgtctgcccagcatggaggagggcggggggagggggtgtggcaggggctgttactcagagctgggctgaggctgggcagcgaggaagagccagcccgcagcctggaaaacaagtatccagcagggagccctagctctgcaataaggtgtgctttt

SEQ ID NO: 730566 - DNA, 646 bp, Homo sapiens
atttctccacatcctcaccaatacttattactatctttttttttttttttttttgagatgaaatcttgctctgttgcctaggctggagggcaatggcgcaatctcggctcactgcaacctccgcctaccagttcaagtgattctcctgcctcagtctcccaagtagctcccaccacgcttggctaatttttgtattttcagtagagacrgggtttcaccatgttgaccaggctggtctcaaactcctgacctcaggtgatccatccacctcagcctcccaaagtgctgggattacaggcatgagccactgtgcctggcctatctttctttttgattatagtcatcctagttgatgtgatcagtacatcattatggttttgactatcatcaatccagtagcatcttttcatgtgttaattgaacatttgtgtgtatatatgtgtatatatatatagtgtgtgtgtgcgtgtgtgtgtgtgtgtgtataggtttttttagagacagagtctcactctgtcacccaggttgaagtgcagtggcgcaatcaaccttgaactcctgggctcaagcaatcctcccacctcagcctctcgagtagcagcctaatagtgacaaagatttactcctgttttcttctaagtatttt

SEQ ID NO: 730567 - DNA, 646 bp, Homo sapiens
ctaaaaatatgagcaaaagctggtactaccaggaaattcaaattccatacctgggaatctcagaactcagggaggaataaacattacagggggagcaaacaataatggggagtattgtttgagaaataagaaattaagaattttactgctctaaaatgtaaaagtaaaacaggtgaagtctggattttcttttgtttttatgaagttcagtgggagagcattctcttctgttaaaattgccactaattatgtgttttttctaaatcatattgtctrcttttctccaaaacagttgaataatgtactcattttcataaaattttagaaaaattagtgagtaaatttttggcagttattttatttgacatgtgagtggtatttgccttcagatttcgaattccctgttgggaaagtaatatggttatgttgctgtgactataatattaaaatgcacagacacactataaattccctttcccttaattttctttgcctttcttttctttcttttcttttctgttttttttttttcttttttttttttgagacatagtttcactttgtagcccgggctggagtgcagtggcacgatctgggctcactgcaacctctgcctcctgagttcaagtgattctcctgtctcagc

SEQ ID NO: 730568 - DNA, 646 bp, Homo sapiens
ctaaaaatatgagcaaaagctggtactaccaggaaattcaaattccatacctgggaatctcagaactcagggaggaataaacattacagggggagcaaacaataatggggagtattgtttgagaaataagaaattaagaattttactgctctaaaatgtaaaagtaaaacaggtgaagtctggattttcttttgtttttatgaagttcagtgggagagcattctcttctgttaaaattgccactaattatgtgttttttctaaatcatattgtctgcttttctccaaaacagttgaataatgtactcattttcataaaattttagaaaaattagtgagtaaatttttggcagttattttatttgacatgtgagtggtatttgcyttcagatttcgaattccctgttgggaaagtaatatggttatgttgctgtgactataatattaaaatgcacagacacactataaattccctttcccttaattttctttgcctttcttttctttcttttcttttctgttttttttttttcttttttttttttgagacatagtttcactttgtagcccgggctggagtgcagtggcacgatctgggctcactgcaacctctgcctcctgagttcaagtgattctcctgtctcagc

SEQ ID NO: 730569 - DNA, 590 bp, Homo sapiens
ttgggtgacggtatggttttagaactgtcttccctattcttcctaaatgaagtgggccatttcttctcactatatgtatattcttgtctggccctgagacagaacactggattagaagcactataggttgactaaatatggcagttcttaaatctatatgatgatagtttgcattattttattgttaacttaccatttgcatttttataaacagctttattgagataattcacatactatacaattcacttggttaaaatatacaattcagtggtttttaaagtatattcagaattgtgcaaccatcacagtactaagttttagaacattttaatcacttcctccaaaaaaaaagaaaacyccatttcccctcaactcttccagttgtgtggataaccactaacctactatgtctctagatttgcctattctggacattttatataagtggaaccatataatatgtgatctcttgtgactggcttttttcactcagtgtaatgtttttaatgttcatccatgttatagcatggatcagcacttcatttttatggttgagtaattaatatttgattgtatggagataccat

SEQ ID NO: 730570 - DNA, 562 bp, Homo sapiens
ctatggtttttgctgaaaaatcagctcataatcttattgaggatcccatggtcataagtcacttctcccttgctactttcaagattctctctttgtctttgccttttaacagtttgaatatagtgtttctcattgtggatctatttgcatttatccttagagtttgttgaactttttggatgtgtagattcatgtcttttactaagtttgggaaatttgtggccattattttcttaaatattctttctgctcttttctgtcttcttyatctaggactcccattgtgtatattttgctcaacttgatggtgtcccacagatctcttagactctgctcatttctgctcctcagactgtacagtttcacttcctattttcaagtttattgcctttttcttctgtgtgttcgcatatgctgttgaaatctgttagtgaatcttcacagtatttttcagcacctcaatttctacttggttcctttttaaagtttctgtctctgttgatattctctacttcaatagaatattctttgtactcttaatatttagcagccattgttctca

SEQ ID NO: 730571 - DNA, 625 bp, Homo sapiens
ttaaaaggtagtataaaatagtcacaacatagaagagagtataaactagcaaagcttaacatcccaccctgtcctcaaattaatcacacaagcaattttcccacttcccttgatgtacctcatactctagtcagaataaatgagaagtcatcttccaggcacactaaacaattcttactgcccatacctctcccttttgactctaactgcctacaaatcttaaatatattttggaactcaactgtaagtacatctccttttttactgaatttaccaccagatatctccttagatcacctttaatttccaaaaggtgtttattttgccttcctcaaattatttatatttaatttaatattaatagtgacataaattatgtcactatgtaatttaatcactataaattatatcactatgtaaactaatrgtaatataaatatcagttttagctgctttatatctattagaatttgctggttgaagatattgtcttctcatcttggtgtttctggaagcatttacttagaggtatgcagacatgtttcataaatgagtgtcaattaactctgttaagagatcaataaatatagtaaaacatttcatgaataaagaaaattatttccag

SEQ ID NO: 730572 - DNA, 599 bp, Homo sapiens
tccttatcaaagttatttctttatgctttcctgtgttttaccatcaaagacaattatatttggctcggattttgtactttttcaggaatcagggttttttatataattttttaatcctttatttaacagttgttgataattatccttcaaataaaaaaatgacagtttaaaaatgaccataattaaagcaattacatttcatttattgataggaacttgtgcatggcctgtcactaaataagatttaaaaaatgaataaaaacattgaaagagcatgagcttctttgttacaatgcacatgtaaaaactaaatggcatttttgaagaataaaaattctrtctccttagttcattatgcattgtacaatgagtgccagagcaaagttttatttcattacctacgttttatagattaaataatacgattcttgtattaactgcattggtagacccacaaaagtatatacagatagatgcttaatagtttgaaattagttcaatatagagattttaaacttcatgatgcctgggagactgttaagcttgtttatatctatattctaatttcctgaatggttctttaaaaaacttttttgaac

SEQ ID NO: 730573 - DNA, 432 bp, Homo sapiens
accccgtcctgagccaagcccgggggctgccccccacctaccctaggtgggagggccgttggtcagccacctactagaggcctgggcagggaggcacaaacctgcccaaggaggggcagcctttcacctcatcctarccacctcctgcccccaggctggaccaggagaatccaacccaaatctaaaggtccccctccgtccccatctcctctgaggcctgctcctcctctgggcctcaggaaggcgtctccggagacccccagcccaggcctgcccagtgttcccctctccggcaggcagtccctcttctgggctctcaggggccagccccccagcctgagcggggaggccccagctccctttgttccccaggaggcattccagggatgtttttggtaagataaacagaactcttgaccccaatccggactg

SEQ ID NO: 730574 - DNA, 560 bp, Homo sapiens
accacagggagcctgggctgagatcctctctttcacgatcttgaagatgcctaaccctcctagaagccagcaacatccacagaagctccctcacaggagataaacctgtagggaggcatcaaccatgtgcctacttcagtcacctgcggctggctctcctgcctccagcggtggagtccctgttgctctgcagcagctgtggtgacagagaggagactctcagacagatccagagagccaccttccctgggcccccattttactcctgcctctgggggctggtgatggggaccaggtccagccacatcctagagctgcctggtgctgaatgaagagcagtgtccccaggacagaaagtcccaacccctctaggccccagtaaatcaaaattgagggcsgggaggatgagtccattgcacacatgtgagacataagggcccccacggttgctatatgtaaaactagcactggacgccacacttcctggttgccaaagtaaatgtggaaactggcaagtttgtaagggctctttttcgctctgcagggttttttgacccttg

SEQ ID NO: 730575 - DNA, 641 bp, Homo sapiens
tttaggaggctgaggcaagtggatcccttgaccccgggagttcaggccagcctgggcaatgtggtgagaccccatctctataaaaaaataaaattagctgggcatggtggtgtgcacttgtagtcccagctaattgggagactgagacaggagaatcacttgaaccaggaaggcggaggttgtcgggggctgagattgcaccactgtgctccagcctgggcgacagagggagtccctttctcaaaaaaataataataaaaataaagatggcagtaggaaggtttcagcttgagatgctgtcttttcttctgtttttatgcataaatacaacgaagacgggagaggagatggaaagcaaagatgattaagtgaaataattgtgggaaacaatagagggayagactttgcttataggggatgtggacagagcagaaaaatgggaggaatggggaggattcagttagagaaggaagaaaccggtaccaaggggctggggctttaggccctggggcctccagtgcccgtataaggctgtggcagaagccctgcccatttccgttccttccactccctatctccaccctcacacctccccaaaaacccacttcccttcttacctctgcttctctttgcttgtccct

SEQ ID NO: 730576 - DNA, 646 bp, Homo sapiens
gtgtatcttttcattgtattaactgttgttctacatctgtttggatccattctgtggattcaaaatcatgtagatcaccagtctctaatggttggacatttaggatttatctggtttctcatctgagtgtttattagatgactattggatttccttagacatattcttggaaatagaattgctatatcaaaaattatggaaaatctgaagctattgatatacctaatgctagatgacacattggtgggtgcagcgcaccagcatggcacatgtatacatatgtaactaacctgcacaatgtgcacatgtaccctaaaacttagagtataatataaaaaaaagaaaaaaaaaaaaaaaaaatctgaagctattgatagtcttatttttaattgctctaaaataagtattaatttcttagaaagaattatttatttaaattaagatatttatgcagatgaaatacccaaatattctggtttgctgtttatttttmtcccataactcaacgggtatttatataattaattatacttttcaagtttttcacccctatgttctacatatattgctacccatgtactccatactctattcttttatgcttctttgaattctgtaatttaaaaaatcaaagcaaactaaaaac

SEQ ID NO: 730577 - DNA, 596 bp, Homo sapiens
ggggaagttctgtgctttgcaaaataaaacaaggcttattatgaacagaaaatgtagctctccctatttagttttatatttgcatttagagagtactaaaagtcaacaaaaacttttaaaaaaattaaagtgttcttcatttgtgcaccatgctttgttggttacttggaaagaaagacctttaaaaatattttgttaatcaaaatgttatagattttgattcggtttataatatttagatatctaaaattttctgcaggctttgatttcagaccacacatggactattagaaattactgaacttggcttccctaggatggtttcaagtggggtasacctactcagaagcaggccctcctggatgatagctagcaaattcagtggaacaagactaggaagccctcaataagggacacttggctcattttatatcatgcaatgaaaaagaaattaaataatcttaaaacagacaattcctaagaagggctaaacctttatatcttttgccccttttatgacattactaataacataaattaaatattgccctcctagaaaaaaagatattgaggcagttgttattgtgaatattaga

SEQ ID NO: 730578 - DNA, 634 bp, Homo sapiens
gcagttgtgattacattttatgacgtgaatccttttaaatgcaatagggaagcttatttaaagaaagctggtggcgaatatggttgtcaaccaaatggtctgttatgtatgtctggtactttatgtatcagagtgcttttctccacgtcacctcagtttgatccttacagcgtcctgtgaggaagggaagatgctgttactgctattttctaggtgaggaactggacttgagaggtgatacagggtcaaaaccagatccaaactagattgttaaagtccgtagctctatatatttattttctaagtctctatctgtaaacaatgcatttacttgaatcgacccaggaacctgccaagcttagtgagtttcagtagsggccttcccgcacatgaatgagatcactaagggggaggtttgtaaccacctgtggtgggggcagccaggagtgtattcttcctcctgggttagggcgtcccccttttccctctggttctggtgttatcctcagcgtgacgtgtgtgggctcgtgttcctgtttacctcagggagaatgagaaacggttatgttaccccatcagtgagttctggctaagtaggaataaaagttgtcatagagacttttaggactaggac

SEQ ID NO: 730579 - DNA, 534 bp, Homo sapiens
cctaccagaatgtaaactccccaaggagttttatctgttttctctcttttatctgttttgttcacacctgtgtccctagtgcccagaacagtgcctggcacacctagatgtgaatgaatcccagatggtggtaggaatrggtgtttcagaatgaagtcacagctcagctgcattagatctggtcagaacaaccaactccccagcaagccttttttgctgttggccagaccctcagctcatccctgtccccagggttactaatacaaacattaagttttctccatcaactgcttactatgtaacagggactaagctgaatgctttaaattccttaactcactgaatctacacaacataatgctgctgatgaggaactgaggaggaaacagacacatgcccagtaagagctaggattcaaaggcactacctagctctgaaggcatctgcttcctaattccatttctcccctccctataagctcctgtcccttccttctgcctggtccgtgtgcccaaagctgttccccccaacacc

SEQ ID NO: 730580 - DNA, 625 bp, Homo sapiens
cagagtggctgaaacagagcaagggagggaaagaagggcaggattatttagagacggagctgtagacagggccagtttacataaagtcttacaggccatggtaagcatttggaatttacttccaaatgtaacaaagccattgcagggctacaaacaagcaccggcttgttccaatkaatgtttacaaagacttctccagtgaacaacaaaaattaacagtgattgcctatagggatgagggttatagacagatgtgggtcagggctatgggaacttaaaaagcgttgttgtttttttaaaccacgtaattattagctatgcgcaaaaatgttcagtgaaaacagtgctggttgctgtgaggagaatggcctgcaggggcggaagcaggagatgagaaagctggtgtccttgcctgggcaagaaaggatagtggttctggaagagggtggtgctaatagatgagttgagaagggtcaggaactgggatcttttttgaaggtagcgccaagaaattaaacatggggtgtgagaggaagcatgaatcaggggtgacttgaaagtcatcctagagatctgttgtacaacagggtgactctcattcataacaatgtgttatatgcttgaa

SEQ ID NO: 730581 - DNA, 625 bp, Homo sapiens
cagagtggctgaaacagagcaagggagggaaagaagggcaggattatttagagacggagctgtagacagggccagtttacataaagtcttacaggccatggtaagcatttggaatttacttccaaatgtaacaaagccattgcagggctacaaacaagcaccggcttgttccaattaatgtttacaaagacttctccagtgaacaacaaaaattaacagtgattgcctatagggatgagggttatagacagatgtgggtcagggctatgggaacttaaaaagcgttgttgtttttttaaaccacgtaattattagctatgcgcaaaaatgttcartgaaaacagtgctggttgctgtgaggagaatggcctgcaggggcggaagcaggagatgagaaagctggtgtccttgcctgggcaagaaaggatagtggttctggaagagggtggtgctaatagatgagttgagaagggtcaggaactgggatcttttttgaaggtagcgccaagaaattaaacatggggtgtgagaggaagcatgaatcaggggtgacttgaaagtcatcctagagatctgttgtacaacagggtgactctcattcataacaatgtgttatatgcttgaa

SEQ ID NO: 730582 - DNA, 589 bp, Homo sapiens
attcctggattttatttggttatcaaccatgctcagaggacagttgccaccagatacctggcacatgtcacccaactgtgctctaaacacacgcatgcatgtacagaatttgtcagcatacaaagacttgaaataacaaacaaatgcctgcacttagtaaaggcttggcattcttgaaaatgctgcctcagttttagctggcaataggggacaagcatgtatgtgatggttgcctgcacagattttgagatggacataacacccacactgtaaagtcatcacttaataaatctattgaaaccagtctaacccttaaggggacaattagacctggattctaagaaataaaaggaaggaaacaaaaaaaaatgcagaggaagttcaaatcccaaatcgcaaacctaacagtaaatgggaaatgtaatcagtagatgctgggattgtgcctaygccagagataaatactgggcttgcaaacatcctgctaccacctcttcaatttggaagaaagcgtagtgacaagcagatggtcagcttttgagggaaagtttttagttttgtttttaatggcagaaatgggcaaatgtag

SEQ ID NO: 730583 - DNA, 464 bp, Homo sapiens
tctccattagttttctccctgggacttctcaatatactgtgtgacatactgtgttaaacactgatttatctcctgtctccactagaatataaaatccatgaaagcagaaactctttttttttttttaatatttttaaatcactgtatcttcagcactcagaccaccaccaggcccacagtaggagttcaattgayatttgtggaatgaatgttgaccaactaaagtggaagattagtaaaatttgagagatatctctgaaggcaagttttccctgaatttcatcagagaacagctgaatcaaactcagaagaagccagcaatgtttcagagaaacaactctgtctggacgcaggccttgtttatcctttgaattccagggactgttctctggccactaagacaggagaagaaggttgactctggcagaatctgcaggcgtttggcatgcgtgcgtcttttaggt

SEQ ID NO: 730584 - DNA, 464 bp, Homo sapiens
tctccattagttttctccctgggacttctcaatatactgtgtgacatactgtgttaaacactgatttatctcctgtctccactagaatataaaatccatgaaagcagaaactctttttttttttttaatatttttaaatcactgtatcttcagcactcagaccaccaccaggcccacagtaggagttcaattgacatttgtggaatgaatgttgaccaactaaagyggaagattagtaaaatttgagagatatctctgaaggcaagttttccctgaatttcatcagagaacagctgaatcaaactcagaagaagccagcaatgtttcagagaaacaactctgtctggacgcaggccttgtttatcctttgaattccagggactgttctctggccactaagacaggagaagaaggttgactctggcagaatctgcaggcgtttggcatgcgtgcgtcttttaggt

SEQ ID NO: 730585 - DNA, 464 bp, Homo sapiens
tctccattagttttctccctgggacttctcaatatactgtgtgacatactgtgttaaacactgatttatctcctgtctccactagaatataaaatccatgaaagcagaaactctttttttttttttaatatttttaaatcactgtatcttcagcactcagaccaccaccaggcccacagtaggagttcaattgacatttgtggaatgaatgttgaccaactaaagtkgaagattagtaaaatttgagagatatctctgaaggcaagttttccctgaatttcatcagagaacagctgaatcaaactcagaagaagccagcaatgtttcagagaaacaactctgtctggacgcaggccttgtttatcctttgaattccagggactgttctctggccactaagacaggagaagaaggttgactctggcagaatctgcaggcgtttggcatgcgtgcgtcttttaggt

SEQ ID NO: 730586 - DNA, 565 bp, Homo sapiens
tttaatctcaagaggttactagggtgtgctccaaatatattccgatgctgctgaaattaatcagaaagggaacagttcccagctactatcccatctgcctcaagtagaccaccctaattccttgatcctgtgcttcaagttgttagaaaaccattcaaaaaaagtgtaccaaaaaggggagaaaaaaaatgtgtcatgcaaagaggatgtgttattttatttttttggtttggttttagagtaggttgggttgccgtggttactaggcgatggatggcagcccttggtggcagagaggttcctagcctgggagggagaaacgcagggtgtgtgtgttcccgtgcatgaraagactggattgtatctcactgatgacaggccaacggctgctttagagatggtgagagattggatcttatataaacagtgttttaaccctcttcatcctgcatgcaaacagatccagctgcctgtagcactttaagtctcaagtactgagaggtggggtagagagagtgcctattgtaaacaaaagcaatggatccagcctggatctcagcgccaa

SEQ ID NO: 730587 - DNA, 541 bp, Homo sapiens
tagtggctaccgtattacacggagcaaggttagaaaataggggaatagcaacctgagtgtaaggtttacatcactgaagctgataaagttcatttttagggtcgttatagatttgtgctctcttggtaggcttggcttatttcagcttacagtaatggttacttttccatgctgaatggatcaccagtttgttagtggtcatcttttccaggctcacttytttttttctcaagatctggttcctttacatggtaaacactaagatattcttagcccatccataatgaacaatctaagagttcccttaatatatcacttttttctacatacgcttttttttgttttttttttttttagcctggaatcacccatcttgaaaaactctactaatccttgcaaactgaggatacacatcagtttctctttcagcagacagtagagaacttggcttggaatcacagctcccctatttacgaaaatggtcagctggaaaagttacttaagtgtcctctaattgtttcctcatctgtaaaatgagaat

SEQ ID NO: 730588 - DNA, 491 bp, Homo sapiens
actcattacctgcgaacatttcctttccactgtggggcacacagaagtaaccaggaggctgggcgccgtggctcacgcctgtaatcccagcactttgggaggctgagcaggcagatcacctgaggttgggagttcgagaccagcctgaccaacatggagaaaccccatccctactaaaaatacaaaattagccaggcgtgatggcgggtgcctgtaatcctagctacttgggaagctgaggcaggagaatcgcttgaacccggraggtggaggttgcagtgagccgagatcacgccattgcactccagcagcctgggcaacaagagtgagactctgtctcaaaaaaaaaaaaaaaaaaaaaagtaaccaggacacagcacctaacattcctgggtgcaacactggattgttcttttctcgtttcagttatctgcattcgctgagccatttgctacttgtgtctaatttgatctaagtcaaaagcatacctg

SEQ ID NO: 730589 - DNA, 610 bp, Homo sapiens
tgattcacagcataattaaaaatgaaaaccatatgatcatctcaatagatgtggaaaaaagctttcaataaaatccctagtttgctgcttagtttgttgataaaaaccttcgacaaactagttatcaaaggaacaaatctcaaaatagtaagagccatcaatgaccaacaaacrtcatactgaacaggcaaaagctggaaacacttcccttgagaacaggaacaagacaaggatgcccactctcactattcctgttcaacatagtactggaaggcctagccagtactccacttttcaggcaagagaaaaaaaatttaaaaggcatccaaataggaaaagaagaagtcaaattatttctccttgctgatgatatgattctatatatagaaaactaaagactctgctgacagtctcctaaaactgatcaacaacttcagtaaaatttcagaatgggaaatcaatatataaaaataagtagcatttctatacactaataacattcaaactgagagcaaaatcaaggatgcagttccatttacaatagccacacaaaaaattacctagaaatacatcgaaccaaggaggtgaaagatccctacaaggagaacta

SEQ ID NO: 730590 - DNA, 398 bp, Homo sapiens
cagtcccaatattgcacaatttgctattagagaagaaacatgcaccaaatgaagtaattatcttatcaaaaagcagcactattggcaatctgagaatgaagccaacaacaacttggcctgtcacatgctctgttttgtcacttacgtccccagtataaatgcaaaaatgtgaaaaccgggggcaagattgaacggcaatggatccattctgaagctggscatgagccacttattgaagacataaattacagggctgtcaccatcacccttcctatttgcaaataaatgttgtcatctaattgtacaagacttggagattgtttaacaaatttctctgagggaggcctcagcagcagcttggattccctggacacccagattctatctgtccactttgg

SEQ ID NO: 730591 - DNA, 639 bp, Homo sapiens
gcaaggaaactgaggttgatatcaacatggtggggaggagaggctgctgtgcggaggctcccctgtgctgcaggtcgccctgtgcctggtgccaggggtctccctggggaccccagacccctgtcaagccatagcagcgtcatgccagggctgagtctgcagttgctctccctggggcaggaggggagaagatctggtatgagtccagtgtgagtgcttcacactggtgaagaacaagtttctggagtgagaaagaactggattcaaaatctgagtctggcactgaacactcagggatgttactgtccttcactaagcccagtttcctctcatctagtagggatgataacagcatctaytcaatggatttcttggtcacgaccattgtccagctcccaagaccccatcgccactcaccctcctcaggatggagtgacagtgtgggcctgctctgaagactcagggttggggccagatatttagaggaggtgtttgcttttttctccccttcagccattgagacaatatttgttaccaatactgagattcttcattctctgtttcacttctgactggaggcagcctgaggggaaaacttttttgagagggagaaactgctggaaaggtccctggctcttg

SEQ ID NO: 730592 - DNA, 588 bp, Homo sapiens
gcccctctttctctgcagaagagagagcttttctcttttctctcgcctattaaacctccactcttttttttatttttattttttgagatggagttttgctcttgttgcccaggctagagtgcaatggtgcgatctcagcttgctgcaacctctgcctcctgggttcaagtgattstcctgcctcagcctcccgagtagcacactacaggtgtgcgccaccacacctggctaattttttgtatttttagtagagacagggttttgccatgttggtcaggctggtctcgaacccctgacctcaggtaatccacctgccccagcctcccaaagtgctggattacaggcatgagccactgcgctcagcctaaacctcaactcttaagcttacttcttgtgtgtcggtgtccttgatttccttgatgtgagatgatgaacattgggtatttaccccagacaacaacgccacttcaatacattcctgataggaattaaaaatgacatggaccttttggaaacagtttgatagtttctcatcatggtaaacatacactgataatatgccccagccatcccattctaacagcaatg

SEQ ID NO: 730593 - DNA, 562 bp, Homo sapiens
ctcaggaggctgaggtgggaggatcatttgagcctaggacttccaggccacagtaagctgtgatcacaccattgcactagcctgatcaacagagtgagactgtctaaaaaagatttttttttttaattaaaaagaaaaawatatatatttttacaaatttagcatagtacatgtacagtgtttataaaatctacagtagtatacagtaatgtcctaggcctttgcattcactcactattcactcattgactcacccagagcaatttccagtcctgcaagcttcactcatacttaagtgccctacacaggtacatttttaaatcttttataccatatttttactgtgccttttctatgttttgatatgcaaatacttaacaattgttgcaattgcctacagtatttagtaaaataacatgctatagtatgtacagcatttaatatatgtacagcaatatgtcataaagtttgtagcctaagagcaaaaggctatatactacataccctaggtgtgtagtagattacaccatcaagatttaagttcttgctatgacattcacac

SEQ ID NO: 730594 - DNA, 562 bp, Homo sapiens
ctcaggaggctgaggtgggaggatcatttgagcctaggacttccaggccacagtaagctgtgatcacaccattgcactagcctgatcaacagagtgagactgtctaaaaaagatttttttttttaattaaaaagaaaaatatatatatttttacaaatttagcatagtacatgtacagtgtttataaaatctacagtagtatacagtaatgtcctaggcctttgcattcactcactattcactcattgactcacccagagcaatttccagtcctgcaagcttcactcatacttaagtgccctacacaggtacatttttaaatcttttataccatatttttactgtgccttttctatgtttwgatatgcaaatacttaacaattgttgcaattgcctacagtatttagtaaaataacatgctatagtatgtacagcatttaatatatgtacagcaatatgtcataaagtttgtagcctaagagcaaaaggctatatactacataccctaggtgtgtagtagattacaccatcaagatttaagttcttgctatgacattcacac

SEQ ID NO: 730595 - DNA, 562 bp, Homo sapiens
ctcaggaggctgaggtgggaggatcatttgagcctaggacttccaggccacagtaagctgtgatcacaccattgcactagcctgatcaacagagtgagactgtctaaaaaagatttttttttttaattaaaaagaaaaatatatatatttttacaaatttagcatagtacatgtacagtgtttataaaatctacagtagtatacagtaatgtcctaggcctttgcattcactcactattcactcattgactcacccagagcaatttccagtcctgcaagcttcactcatacttaagtgccctacacaggtacatttttaaatcttttataccatatttttactgtgccttttctatgttttgataygcaaatacttaacaattgttgcaattgcctacagtatttagtaaaataacatgctatagtatgtacagcatttaatatatgtacagcaatatgtcataaagtttgtagcctaagagcaaaaggctatatactacataccctaggtgtgtagtagattacaccatcaagatttaagttcttgctatgacattcacac

SEQ ID NO: 730596 - DNA, 589 bp, Homo sapiens
gtgcagaagttatggaaggaatggaaaggactgcttggatccttgtccatagaggaaacatgcctttccatgctaggagaatgagctggtttgcaagcctcattctgtctcatctgcaggtggtcactcaacatctacacagaccgaaatgatacccagagtagcattttcagttagtggcatagggagtgggctctggaatcagatttctgcgtttgaattcaggctctgacactagctaggagacttctgggaaagtgacttaacctttccaaacctcagcttcctcactgtgaagtgggcatgggactcgcctcaccggacttcakatgaggatgaagggaggccatgctggtaacatgcctggcccaaaagaagggtccagagcattttaactgctgtcattactgactgtctttaatctgccatttcccatgagcacttgttactcatttacttcttttttcaacattcttactatgctacaaggtccctgtgcctgttctcatagtttggttagtacaggttagaaaaataaagttttgcccaaggggtaacaaggttagtctgcagctcttcagggagcaga

SEQ ID NO: 730597 - DNA, 629 bp, Homo sapiens
atgagttgaaggtcctggttgggatgggatgggatcctgagatttgggatggagacatctgggtccatgaaatcccagatctccctgaattctctgggactgcagacatggtccactcctctctgtaagaggctaatgttcccctcttgcttgaattcagaggcttgtgccttgtagtaatgcacacttctctggatgtaycccccatctcttttccttgccactaggccaattactacagtcaagtcacaacataccctagctatgtaagtgctggcctcgctaaaggaaaaggactatgccagttgtcatttttttgccacttcactccaaataaatccttcattgccttctctatgaaaatggatcggagcccctcaaatatttctcctctgccagttggcactatgtcaaactttgtcattagaggctgctggagaaactttgcaggaggaaagtgttttcctccctagtgcaattgtgctgttctcggcagcctcctatggctcctctagctcccagctcctgcagtgtgagcagcttctccactgcccagctctactgcatgcaaatagcagcccccagcagctagcagccacccccagcattcccctgaggagttgcttagg

SEQ ID NO: 730598 - DNA, 596 bp, Homo sapiens
gattttctttttctttttcttttttttttttttgagacggagtctcgccctgtcgcccaggctggagtgcagtggcgcgatctcggctcactgcaagctcagcctcccgggttcacgcctttctcctgcctcagcctcccgagtagctgggactacaggcgcccaccaccatgcctggataattttttgtaatttttgtagagacggggtttcamggtgttagccaggatggtctcgatctcctgacttcgtgatccgcctgcctcagcctcccaaagtgctgggattacaggcgtgagccaccgcgcctggccctttttttttcttttttgaaacggaatcttgctctgtcgcccaggctggagtgcagtggtgcaatctcagtttactgcagcctcagcctcctggggtcaaatgattctcctgcctccgcctcttgagtagctgggattacaagcacacaccaccacacctggctagtttttgtatttttagtagagatggggtttcaccacgttggtcaggctggtctcgaactcctgacctgagggggattttcaatgcctcagtttgttcatctgcaaaatgggtctctt

SEQ ID NO: 730599 - DNA, 629 bp, Homo sapiens
tactatagtcataaatcagccttctagcttttaaatccttattactattcaaaagtaacagcagatgaaagagtgagaaggatcggcagaaatttatcacaaatgctgaacaactcactactgatggtgcatcagcagcaaggttatacctttgtcaattaccctcaaactagaatttaatacacaagtctaccagagattaaaatgaaagctttacctcactgtgttcaaggagctgttttctagaataaaacaaaaatattatctatttactgaaggtcttttatactatgaatacataaaaataagcttcatttgtttgatcttagatttttaaaatgtgactatctctaaactacttaggaacatacawaaaaataaaaatatcagataatagtacaaaaattataacaatttaaaagttatagtcataatttatagtcataatttatagtcataatttatagtcatcctattcaagatatgtcaaaaatttgttctttggttaagacaaaatagattttacagatccctggagattgtacctctcattaataaatgaataggatgaccttctattcgacctatatatacagtgtatacagtactttagatgaccactgttaaac

SEQ ID NO: 730600 - DNA, 607 bp, Homo sapiens
ccgagccctttaaatttaaacaatagtttaaaagattttaaaataaatgataatagaatagactaaaaaaatcttactagcaaattgaaatctcaatactcactggatggaacactgatatacatgactcaaaacagcatcaactattttggggatggcagtttccacattcctacttatattttgaatgtaataaaacttacagcaatttaattttgcatatactgctcattactgtataagatagtctaaagttgtactgggtagcagagagcagcttaggatatacagttttcttctcataattcacacagttttcagagaatatattctgacagagactgaatgtagtgaaaacacatctttcaatgcttaatttcatctaaagaagctctgacaaataaatgaattgaaatttagtgtatcaagtagaacacttagacaatggrcatccacggtatcagaagaggtaggaaaagcaccttcacagaatcttgagaaatggggatggtcaccaaaatatggtacaataggtgatttgaccgtagtgggaattcttacaaaatcctgacaaactatcacttatgcattggatgttgcttagaat

SEQ ID NO: 730601 - DNA, 624 bp, Homo sapiens
atttcctcttagagaggtggctggagctgaaggcatagtcagggtacatgtgcctttttctctatcagacctttcccgaatcagccagcgtttaggctctttctcatcagaccccactaaatatatacaggaattccgacatcgagctctgtcctacaatttaatctggagtgacctaaatgtcatcctaacttctaccctctccccagatgaatgggaaagttttttctctagcccaatcgcatgctgataactgctggcttcaygaaccacacctccaggaaggcattagagcagttccctgaggcgatccccaatggaactatccggccgattccccagatatagctaggcgagactacatggtttcctgccaagttgaagggcttaaaaaggcagcttacaaagctgttaattatgacaaacttaaagaaactacccgaggtaaagaacccagcccagttcatggccggcttagcagcaacccttagacgctttaccaccctagacccagagaggccagaaggccaccttattcctaataagcattttaccacccagtcagctcctgacattagaaaaatcttcaaaaattagattccggtcctcaaaccccacaaaagg

SEQ ID NO: 730602 - DNA, 634 bp, Homo sapiens
ctcatcctaagaaaataagcctgttcctaaaattctaagtccttgctcatttccccattctttttttttttttttttttttttttgagagaagcaagaatatgactgtaatttaacatcaacaatgacactgtgtaacagcacagggaagaggtagtggagagagatggtcaggcttcctgttccttaaccagccttgattttaacagcagagccccagcaacctagaagcgcctcacctagcctcttaatggagtgggaaggggcagggacttggaaattagaggctcaaaatgtaaagaaggctgatggcaagcctggggagaggcctgaraatgagggaagggctgagggctgtgaggagtcctcacacaaagaccctagcacaggtcttcggcagtgaacatgcccctggccctccgcagggtggagtccttggcgtcctcatatgggtgctccttggaggggatctccaggacagtagggatagagtgctggtgggtgtccagggcatgctgcaccatctctgcgatgtactggttgatgaggatgatgccagtgtcatcccggtttagaaattgccggaaagtgtcttcgatctcattgatggtcgtatccttctccaccaccaggaa

SEQ ID NO: 730603 - DNA, 641 bp, Homo sapiens
tgctaaataattacataatttggtaatcagtgatctcttaggtggcaaaacttgattatttgtgatatggttactaaaaatgctgtgcatatttttggtttaaagtttgtattgaggccgggcatggtggctcatgcctgtaatcccagcactttgggaggctgagacgggcggatcacgaggtcaggagatgaagaccatcctggctaatacagtgaaaccctgtctctactaaaaatacaaaaaattagccrggcgtggtggcgggcgcctgtaagtcctagctactcgggaggctgaggcaggagaatggcgtgaacccaggaggcagagcttgcagtgagccgaaatcgcgccactgcactccagcctgggtgacagagtgagaagccgtctcaacaacaacaacaaaaaaagtttgtattgaatctaaaacatttggctgggcatggtggctcatgtacaatcccagcactttgggaagcaaaagcaggaggattgcttgaggccaggagtttgagaccagcctaggcaacatagtgagatcctgtctctacaaaaaaaaattagctgggtgtggtggcaggtggctgtagttccacctactcaggaggctgaagcaggaagatcgtttgagccca

SEQ ID NO: 730604 - DNA, 508 bp, Homo sapiens
tggaatcatattgtatgtattcatgtctggctttgactcaacattttgtttgtaagatttagatttgtatgtagctgttcgttcattttcattgctaaatagtattccattgtataaatatactacagtttattgtattattgatggatatttaggttgtttctagttttgggctattatggattatgccactatgactattcttgtaaagtcttttttttttttttttttttttcctgagacggagtctcgctctgttgcccaggctggagtgcagtggygcaatctctgcttactgcaaccaccgtctcctgggttcaagtgattctcctgccccagcctcccgagtagctgggattacaggtgcccaccatcacacccagctgtttttttgtattttaagtagagatgggtgtttgccatgttgaccaggctggtctggaactcctggcttcaaatgatccacctgcctcagcctctcaaagtgctgggatcacaggtgtgagcc

SEQ ID NO: 730605 - DNA, 596 bp, Homo sapiens
gcaaccaccgtctcctgggttcaagtgattctcctgccccagcctcccgagtagctgggattacaggtgcccaccatcacacccagctgtttttttgtattttaagtagagatgggtgtttgccatgttgaccaggctggtctggaactcctggcttcaaatgatccacctgcctcagcctctcaaagtgctgggatyacaggtgtgagccaccatgcccggctttttttttttttttttttttttttttttttttgagacagtttcactctgtcgcccagactggagtgaagtgttgtgatcatggctcactgcagccttgaccttctgggctcaagtgatcctcccacctcggcctcccaagtaactgggactacaggtgcataccaccatgcttggctaattttttttttttttttggtacttttttgtagagatggagttttactatgctgctcaggctggtcttgaactcctgagctcaagtaatctgcctgccttggtctcccaaagtgctgggactacaggtgtgagccactgcaccttgccttgtgcaagtcttttagtgcatatgtgtatgtaattcttttgtgtat

SEQ ID NO: 730606 - DNA, 600 bp, Homo sapiens
ttttgtaggcttcatgttaagtcataaagatttcacttaaacatttctcaatgaagtgagtactaataaagctggtgtatctttataaacttttctctacattttggatcatttgagtagattggtttttcctgttcatagaattactggatcaaaagatatgtttttaagacccttactgtaaccattttcaaacttgctgcttctcagatacttttattatttttgggaagaaacaaatacttactgggttcctataatttttcacttaaacccttttaaacttatgatatgcttcagacatgcaaaaagatacagagaatgatgtaattaatatctgtgtatctaccacctagcttaagaaataaacagtcacagacttaarattcctgtgcagctcttcctgattataaatgtctgtatttaccaacagtgatgtggatatttaatcttttttttttttttttttttgagacagagtcttgctctgtcaacaggctggagtgttgtggcgtgatcttggctccctgcaacctccacctcctgggttcaagctattcttctgcctcagcctcccaagtagctgggactacaggccca

SEQ ID NO: 730607 - DNA, 582 bp, Homo sapiens
cccaggctggagagtggtaccattatagtgcactgcagccttgaactcctgggctcaagggatcctcctgccttagcctcccaagtagctaagaactgcaggtgtgtgccaccattcccggctaatttttaaaatttttttgtagagacagggtctcgctgtgttgtctggggtggtctctgactcctgtcctcaagcgatcttcttgtctcagcctccagaagtgctgggattacagatgtgacctactgagcctaaactgttttaacgatagcaagactatgcttcattaataggttgggtgtaaaagttgaaacccctaaaagcagcatyttctaagctttttttttttttttttatcatagtaactgattattctgtttaattctctcttttccgggcgttttctctcccagaactcctacccttctgttccaatctaactaagttcctgggacttccctttactgttttcctgaattggatctagtgattactggatgttgtcagataccctgatttctccctcattttgcttgagcacacatttaagtaactcttttttaaaatttatttttattt

SEQ ID NO: 730608 - DNA, 582 bp, Homo sapiens
cccaggctggagagtggtaccattatagtgcactgcagccttgaactcctgggctcaagggatcctcctgccttagcctcccaagtagctaagaactgcaggtgtgtgccaccattcccggctaatttttaaaatttttttgtagagacagggtctcgctgtgttgtctggggtggtctctgactcctgtcctcaagcgatcttcttgtctcagcctccagaagtgctgggattacagatgtgacctactgagcctaaactgttttaacgatagcaagactatgcttcattaataggttgggtgtaaaagttgaaacccctaaaagcagcatcttytaagctttttttttttttttttatcatagtaactgattattctgtttaattctctcttttccgggcgttttctctcccagaactcctacccttctgttccaatctaactaagttcctgggacttccctttactgttttcctgaattggatctagtgattactggatgttgtcagataccctgatttctccctcattttgcttgagcacacatttaagtaactcttttttaaaatttatttttattt

SEQ ID NO: 730609 - DNA, 564 bp, Homo sapiens
aattcaaccactttcatcatctgtatcattactacactgacccaatccaccaacatttcttgcctgtattatttaaaatttctggccaggtgtggtggctcacacctgtaatcccagcactttgggaggccmaggagggtggatcacgaggtcaggagatcgagaccatcctggctaacatgatgaaaccccgtctctactaaaaatacaaaaacttagccgggtgtggtggcgggcgcctgtagtcccagctacttgggaggctgaggcaggagaatggtgtcaacccgggagggggagcttgcagtgagccgagatcgcgccactgcactccagcctgggcgacagagcgagactccgtctcaaaaaaagaaaagaaaagtttcctaactggtttttgtgttttcttcccctttccccccatgatttaaaagctaggttatattctgtcactttcttgcacaaaattctccaatgacttccagtctcactcggagtaaaatccaaattcttaggatggcctataatgtcctacaaaatttgccccctcattgactctttgac

SEQ ID NO: 730610 - DNA, 564 bp, Homo sapiens
aattcaaccactttcatcatctgtatcattactacactgacccaatccaccaacatttcttgcctgtattatttaaaatttctggccaggtgtggtggctcacacctgtaatcccagcactttgggaggcccaggagggtggatcacgaggtcaggagatcgagaccatcctggctaacatgatgaaaccccgtctctactaaaaatacaaaaacttagccgggtgtggtggcgggcgcctgtagtcccagctactygggaggctgaggcaggagaatggtgtcaacccgggagggggagcttgcagtgagccgagatcgcgccactgcactccagcctgggcgacagagcgagactccgtctcaaaaaaagaaaagaaaagtttcctaactggtttttgtgttttcttcccctttccccccatgatttaaaagctaggttatattctgtcactttcttgcacaaaattctccaatgacttccagtctcactcggagtaaaatccaaattcttaggatggcctataatgtcctacaaaatttgccccctcattgactctttgac

SEQ ID NO: 730611 - DNA, 564 bp, Homo sapiens
aattcaaccactttcatcatctgtatcattactacactgacccaatccaccaacatttcttgcctgtattatttaaaatttctggccaggtgtggtggctcacacctgtaatcccagcactttgggaggcccaggagggtggatcacgaggtcaggagatcgagaccatcctggctaacatgatgaaaccccgtctctactaaaaatacaaaaacttagccgggtgtggtggcgggcgcctgtagtcccagctacttgggaggctgaggcaggagaatggygtcaacccgggagggggagcttgcagtgagccgagatcgcgccactgcactccagcctgggcgacagagcgagactccgtctcaaaaaaagaaaagaaaagtttcctaactggtttttgtgttttcttcccctttccccccatgatttaaaagctaggttatattctgtcactttcttgcacaaaattctccaatgacttccagtctcactcggagtaaaatccaaattcttaggatggcctataatgtcctacaaaatttgccccctcattgactctttgac

SEQ ID NO: 730612 - DNA, 564 bp, Homo sapiens
aattcaaccactttcatcatctgtatcattactacactgacccaatccaccaacatttcttgcctgtattatttaaaatttctggccaggtgtggtggctcacacctgtaatcccagcactttgggaggcccaggagggtggatcacgaggtcaggagatcgagaccatcctggctaacatgatgaaaccccgtctctactaaaaatacaaaaacttagccgggtgtggtggcgggcgcctgtagtcccagctacttgggaggctgaggcaggagaatggtgtcaacycgggagggggagcttgcagtgagccgagatcgcgccactgcactccagcctgggcgacagagcgagactccgtctcaaaaaaagaaaagaaaagtttcctaactggtttttgtgttttcttcccctttccccccatgatttaaaagctaggttatattctgtcactttcttgcacaaaattctccaatgacttccagtctcactcggagtaaaatccaaattcttaggatggcctataatgtcctacaaaatttgccccctcattgactctttgac

SEQ ID NO: 730613 - DNA, 638 bp, Homo sapiens
tcactattataataaatacacctccatctatctagatcctatctagatcaccattataataaattacacctccatctatatagatccttgagcacatgggtaaaagtttctctcaagaagacacagaaatagaaccgctgggtagcagagtgtgcctccaactttaccagtcatttaaacttgctacttttccattttatatacagctaagtacaccatgcagatgataaaaggagtcagatatccagcctggaatgcttctatctaaggaacsttgatatctaatcatatagcactaacttttggtataaatgatcaaactgctatttcataaaaacaaaacaaaaaaaccccacaaatgattgtgcattcaagtccatcaataaggaatagaggtacagcattttcaaagaaagctgtgaattacaaagctgtcttagcagaaccctcacttcattctgagacaggagaaatatttttaaaattacatctatggaatattaaataaatctacctctcaatataagaccttatgtttctccatttaaacaaacaaccattcgccaaaaaagaaataaccttttgtgtcttaatgtgccacttactgccattttcaagacagtttagcttacttaaga

SEQ ID NO: 730614 - DNA, 638 bp, Homo sapiens
tcactattataataaatacacctccatctatctagatcctatctagatcaccattataataaattacacctccatctatatagatccttgagcacatgggtaaaagtttctctcaagaagacacagaaatagaaccgctgggtagcagagtgtgcctccaactttaccagtcatttaaacttgctacttttccattttatatacagctaagtacaccatgcagatgataaaaggagtcagatatccagcctggaatgcttctatctaaggaaccttgatatctaatcatatagcactaacttttggtataaatgatcaaactgctatttcataaaaacaaaacaaaaaaacyccacaaatgattgtgcattcaagtccatcaataaggaatagaggtacagcattttcaaagaaagctgtgaattacaaagctgtcttagcagaaccctcacttcattctgagacaggagaaatatttttaaaattacatctatggaatattaaataaatctacctctcaatataagaccttatgtttctccatttaaacaaacaaccattcgccaaaaaagaaataaccttttgtgtcttaatgtgccacttactgccattttcaagacagtttagcttacttaaga

SEQ ID NO: 730615 - DNA, 511 bp, Homo sapiens
agccgaacttggcttatctgtaacagacctgaccctcccccactccattcccatcccttgaactttgaccttttctccccaacaaaggccacctgctttcctttctctcgctgtccccaggagatgccctgctctgaatttccctgtgaaaaggcatcaacctcaaactctacaagacaatggagggtcttgcatacgcctagggaggcagttgtgcctgggaacatggggctgggccttttctyggggagccacggtggcacgaggaaagcaggcacccaaggcagcgggcactggggccccaaagtggaacccaagagcagggtctctgccctcagcagcccccagtctgggggagggtgggaagaggacaccgataatccccgttttgatatttttttgtgccacatgatcggcaggaaaggtgagacagacacagggcacaggagagttggaggctgtgggcagctgagaacaggaactgcaaagaccccaggcaagaggaagctct

SEQ ID NO: 730616 - DNA, 584 bp, Homo sapiens
gggggtatggcattgggataaacactggggattcttcatggtagagacctcaccatctgtgcttctgaggcactggggccaagaaagcatcttgcacaaaatcaaaagtcagcaaatgttgacctgaactgaattccctgctctcagagatcttataacattgtcatagaacaacaacaacaacwacaacaacaacaaaatttcacccagaaacactgcaatttatggcaaatcatttagtcccagttgaaaacagctgtgtggtatggtactttgggcattaaaaaatttacacctgtcttagtccattttgtgttgctataccagaataccatagactgggtaatttataaagaagaagaatgtatttctcacagttctggaagctgggagttcaatattaaggtgttggcatcttgtgagggctttcctgatgctttctcccatggtggaagacggaaggggaaagggcaagagagcaacagagcgagcaaatggagctgaactcatttttataccaaagccactctggtgataactaacccactcctgagataacaacattaatccactcatgagggcag

SEQ ID NO: 730617 - DNA, 611 bp, Homo sapiens
tgccatgcccctgcagatccttccatctttcatctttcttttttctttttcttttgtttttttttttggagacagagtcttactctgctgcccaggctggaatgcagtggtgtgatctcagctcactgcaacctccacctcccaggttcaagcaattctcctgcctcagcctcctgagtagctgggattataggcgtgtgccaccatacctagctaatttttgtatttttagtagagacaacgttttaccaagttggccaggctggtcttgaactcctgacctcaggtgatcctcctgccttggcctcccaaagtgctgggattacaggagtgagccactgtgcccggcagattctctcatcttgttttgatagtacagactaagcactgggaygagaaggggggtgacttcttaaagacatgctacttactaaaaacaagtctttttcaaaacttgtattatatccaagcattttaataaagacaaaggccagacaaggaggctcacaggtgacacaacacaaactaatcaggagacaagacacctgcttatgggctgtaccttctgccttgatatgtagtcagttcttcctgaaggatggaagctctct

SEQ ID NO: 730618 - DNA, 606 bp, Homo sapiens
agactgctgaatgttgtgcttgctgcctgtaaattagttaagaagtgccttataggaactctttgtagtttgtggctgcgataaacctttctggtattctgtacagtaggaagggccacacaaaccatagatcatttaggatacatccttagaatagggcaggtggtcacaaaggctcagattgctcttcatttcccaaccggaacacaccagtgtggatgtccactgtctcctgctcaagatgaattctgtcttcttctggtcatggcaccatgatattcctttggggaaatgcctttccctgccacacagacacgagatttggtgctgacaccgtcctgttttagccgaccagcatattgcatctccctggccactgtgtgtcactgtgtacagtgtgactgtgattaagacggttcaacgataatcagtccttggtcctttgytagaacgtttgaaggagcttccagctgccatcttgccaccatgaagggagaggctgcctaggagtgaaatcctcaaaaatgaagaagagacaagagataatgagaacagattcctggtgggttctttgaatccctggatccagtcatacccaagctacat

SEQ ID NO: 730619 - DNA, 480 bp, Homo sapiens
acagtcttttctttagggatgatgtttgagtagatgctgaggggcacctggcttaagaagggctggagatggttagagttagagaaggattactggaaaggggaagggtcactgataaaaggccctcctgtgagtagcttatggggcagatgtattctgtggattctggtttgtgagataaccaggactgttcatgagcaggctggctttcagacaattgattttacctggtatcaggatccaatcatccgtccttcstttccttttgagaggaaaggcactggaagacaggctgaatgtgtcctcttggtgcctttctcagtgctctgaagttggcatcagaggttgtcactggatgagtgaatctgctaggtgacttgggggattgtctttgatgtctgtttgctctgccctgccatctgtaactcagtggccagtgtgttctcttctcccacctagagaagggataaacagttctac

SEQ ID NO: 730620 - DNA, 629 bp, Homo sapiens
taccatgttggccaggctggtcttgaattcctgacctaagatgatctacctgccttggcctcccaaagtgctgggattacaggtgtaaggcaccgcacccggtctcttctagggctcttaactggggtttatgtttaattcttttaagttttcccctcccctagctctatgcatgctctctgggtgatcacttcccattattattattatttttttttttgagatagggtctcactttgtcacccargctggagtgtagtggcgtgacctcggctcgctgcaacattgacctcccaggttcaagcaatcctcctgcctcagccccccaagtagctgggaccacaggcgtgcactactatgtctgactaatttttatatttttggtaaagacggggtttcgccatgttgcccaggctggtcttgagttactgagctcaagtgatccacccatttttagcctcccaaagtgctacgattacaggcgtgagctactgcgtctggcccttcctacctttctaaggtatttggcatgtttcctttttggtgcctttctctgtgctgttctttttgctagaatctgagtcctccttctccccacttcaaaaagggaaatcctacttatcttttag

SEQ ID NO: 730621 - DNA, 629 bp, Homo sapiens
taccatgttggccaggctggtcttgaattcctgacctaagatgatctacctgccttggcctcccaaagtgctgggattacaggtgtaaggcaccgcacccggtctcttctagggctcttaactggggtttatgtttaattcttttaagttttcccctcccctagctctatgcatgctctctgggtgatcacttcccattattattattatttttttttttgagatagggtctcactttgtcacccaagctggagtgtagtggcgtgacctcggctcgctgcaacattgacctcccaggttcaagcaatcctcctgcctcagccccccaagtagctgggaccacaggcgtgcactactatgtctgactaatttttatatttttggtaaagacggggtttcgccatgttgcccaggctggtcttgagttactgagctcaagygatccacccatttttagcctcccaaagtgctacgattacaggcgtgagctactgcgtctggcccttcctacctttctaaggtatttggcatgtttcctttttggtgcctttctctgtgctgttctttttgctagaatctgagtcctccttctccccacttcaaaaagggaaatcctacttatcttttag

SEQ ID NO: 730622 - DNA, 587 bp, Homo sapiens
ccttttacttctctcattcactgctattgagcaccataaataaatgtcaggtgtgtgtgtgtgtgtgtgtgtgtgtgtgtacaaattacagagtttgctgattagaaaagtaaaatttagtgggatctgataattagatctctcagttgcacagactattgaatatcaagttggaatgtacaaaatcaatttctcttttacctaaaatgcagtatgtccaagattctctgatcttcactattcttaaaatctttgggcataaagttgatcttcaattcataataaaacacaatgtaatctgatagagttgagattgtacttaatttatatcttgrtatgtagttacgaagtaggaaatattttctagataccaaactctggtctagactcttttcataaatgttgaatcctcatcctggcctgtaaggaagactctccctttaggaaactgaatctcagagaagttaaggaagttgacatgaagcacatcaacaaataatcataacaacagtgacactggttgtgtagacagagagttgttggctgtggcaggcgctacactctggattgtgaagccaagcctggtc

SEQ ID NO: 730623 - DNA, 587 bp, Homo sapiens
ccttttacttctctcattcactgctattgagcaccataaataaatgtcaggtgtgtgtgtgtgtgtgtgtgtgtgtgtgtacaaattacagagtttgctgattagaaaagtaaaatttagtgggatctgataattagatctctcagttgcacagactattgaatatcaagttggaatgtacaaaatcaatttctcttttacctaaaatgcagtatgtccaagattctctgatcttcactattcttaaaatctttgggcataaagttgatcttcaattcataataaaacacaatgtaatctgatagagttgagattgtacttaatttatatcttggtatgtagttaygaagtaggaaatattttctagataccaaactctggtctagactcttttcataaatgttgaatcctcatcctggcctgtaaggaagactctccctttaggaaactgaatctcagagaagttaaggaagttgacatgaagcacatcaacaaataatcataacaacagtgacactggttgtgtagacagagagttgttggctgtggcaggcgctacactctggattgtgaagccaagcctggtc

SEQ ID NO: 730624 - DNA, 587 bp, Homo sapiens
ccttttacttctctcattcactgctattgagcaccataaataaatgtcaggtgtgtgtgtgtgtgtgtgtgtgtgtgtgtacaaattacagagtttgctgattagaaaagtaaaatttagtgggatctgataattagatctctcagttgcacagactattgaatatcaagttggaatgtacaaaatcaatttctcttttacctaaaatgcagtatgtccaagattctctgatcttcactattcttaaaatctttgggcataaagttgatcttcaattcataataaaacacaatgtaatctgatagagttgagattgtacttaatttatatcttggtatgtagttacgaagtaggaaatattttctagataccaaactctggtctagactcttttcataaatgttgaatcctcatcctggcctgtaaggargactctccctttaggaaactgaatctcagagaagttaaggaagttgacatgaagcacatcaacaaataatcataacaacagtgacactggttgtgtagacagagagttgttggctgtggcaggcgctacactctggattgtgaagccaagcctggtc

SEQ ID NO: 730625 - DNA, 596 bp, Homo sapiens
ccaagattagaagtgggccatcgatccaacattgtcctttcccaggctagatctgagacatggggagagttataggttagcaggatgctgtatgtggggaagagatcaccaggtcacagcctatagtctgtattttgcttaaaatcaagcacatgtggggccaggcacagtggctcatgcctgtaatcccagcactttgggaggctgaggcaggtggatcacgaggtcagsagaccgagaccatcctggctaacatggtaaaaccctgtctctactaaaaatacaaaaaaattagccgggcgtgttggcgggcacctgtagtcccagctactcgggaggctgaggcagaagaatggcgtgaacctgggaggcggagcttgcagtgagccgagatcacgccactgcactccggcctgggcaacagagcgagaccccatctcaaaaaaaaatcaagcacatgtggttcagtaaactagtgaggggaggcctacgaagcattaaacttcccaccatttggaggtacagcaatttaacaggactacagctctattcaagcaaaagaccggttaggctcttagactctaaattcaatgaag

SEQ ID NO: 730626 - DNA, 565 bp, Homo sapiens
caaaactgtggacatttctgcccgtgagagttagaactgaagctgtgggacttcctccctcaaagatcttcaaaataagttactatctcatctgtcaatatctctctgggacaaatgaggtatgtggaaactggaaagaaccctggactgggagtcatgagtccagttctgcttcacaagggttttcggaaagtcacttttcacctgtgactcaactacctgatgtggaagtgaggggccagcctagggccttgcctytaatggttgggtgggggtagaaactcttggtattgctatccagatgctactcccgtttccacctccggctcctttccaagctactctttttccccttaatttttttttcatgaaaatgtatatatagtaaagcatacaaatcttaaggggacagcccaattaatttttacaaatacatacctgtgtaaccaccatggagatcaagatacagaccacgatcagcaccctaaaaagaatacttgccgcttcctcaaaagcaaacctctactccaacgtttttctacctcagtgaagtttgggaacgttt

SEQ ID NO: 730627 - DNA, 565 bp, Homo sapiens
caaaactgtggacatttctgcccgtgagagttagaactgaagctgtgggacttcctccctcaaagatcttcaaaataagttactatctcatctgtcaatatctctctgggacaaatgaggtatgtggaaactggaaagaaccctggactgggagtcatgagtccagttctgcttcacaagggttttcggaaagtcacttttcacctgtgactcaactacctgatgtggaagtgaggggccagcctagggccttgcctctaatggttgggtgggggtagaaactcttggtattgctatccagatgctactcccgtttccacctccggstcctttccaagctactctttttccccttaatttttttttcatgaaaatgtatatatagtaaagcatacaaatcttaaggggacagcccaattaatttttacaaatacatacctgtgtaaccaccatggagatcaagatacagaccacgatcagcaccctaaaaagaatacttgccgcttcctcaaaagcaaacctctactccaacgtttttctacctcagtgaagtttgggaacgttt

SEQ ID NO: 730628 - DNA, 573 bp, Homo sapiens
ctcaatgacacttatctccctctggcatttcatataattcacttgtactttttgttgattgtctgtctgccccaactacaatgaaagctccatgagggcagggatttttgttgcctttattcattgccatatccccagagtccagaatggaatccagccccttggtaggagcttaacaaatataaatgaatacataaatttgagcaagtaacttaccaagctcatgtcctgtctctcttaaaaggatggcatgagaattaaatacaatatcattgctayagggaaaaataatggccaacatatattgagtgcttattcagtgccagcttttaaatgtgctaagtgctttacataaatcaccttatttagtccccacaaaaatcctatgaggcgagtattcttttaaccttcattttacaggtgaggaaactgaggcttagaaaagttgggtcacctattcaaggtcacgcaaaattcagacccatatttgtatgagctcagaaccagtactatttttttttctttattattttaagttttggggtacatgtgcaagatgtgcaggtttgttac

SEQ ID NO: 730629 - DNA, 593 bp, Homo sapiens
cccacgtctccactgtagccagttgccggctgctaggagctgctggagccgaccactgcccggtgctgtcgggtctactcccagtctgttctgtccaacctcagtactccctttgttcccaacttggggactgcctgtcacgctcctcatggtgcctgttccagttttgttgaattgttggattggctgctcctgttggaactggaggtccatgtagcatctccctctccaaattctgttcacttgcaccttgtcctcrtctccaaccttctcttggagttcacaaggtcaggaagctgaagacatgctttcaccagtgtgaggatgatagagattttgtcttcccattggcctcagctcagcaggctctaacattctaagccctggagtatacctggaccacacactagccaaagctcctgactggttttcctgtgtgggatttctcatggctggtgagtttgctggctgccagacctgtggcaccctgggacccactggatcccagtctctagtgtcgtcctgcacgcatggtagagcccattctgcctgatggaggaagcagctaaggctcaggcaccctggtcagggat

SEQ ID NO: 730630 - DNA, 405 bp, Homo sapiens
tgaattgtgctgtgcctacaggaggcctataaatatattagttccctatcatgtctccttctatcctccagcccaacaaggcagcagaaatccacacctcatgctgttaagtcatgcggcaggcatggatgtgggcacattatgaggaagsctggtgctttgggttgtttctccagtgctggtccacatgaatacatctgatttgttcccttgttccccagaacacatatgcacattatggccagccagagttgtttgggagtggcctggttcaaactatcaccctagtatcccaatcttgttaactaaccagcctgtctgaaaactttgcataaggcctgggtgcctgtctgaaggatcaagacactagccagccccaggaagctcatctatccgttctgtctc

SEQ ID NO: 730631 - DNA, 609 bp, Homo sapiens
tcatgaccagggcttatataatactgggaaagggtatatgtgattcagaatgtttgtgtagaacaattgaagtcctataacatcaaggttgttttgacctcagggcaggatttacagtaggtacctactctcacacaagaaacatcaaataaactggaaatcttagaggacttcctagaacaagggttaatcagaagttaaagtgatggattagcatccaagttggagttgctttggcctccacagcacctcctctttgttaggcgctggaattgctgttagcaatacagacacaattcttgctctcaaatgcatagcctagtagaggagacagatcagttatacatacataaaggcacagataacagtaatagcaatagtaaccctttctgaaaggggtagtcgttttcaagtatttatrgttcacacatacacacacaaaccaacccagcaagcccagtataatttccctacttttacagatgagggcattgagattgggagaaatgaactggcttccttaggttccaacagaccataggtagaggctcagcctcaagttcttctcgtctatgcaaagtgacctcctgtgcaaaaggatgagtaaat

SEQ ID NO: 730632 - DNA, 617 bp, Homo sapiens
tattgcaggattccatttatataaaatgtccagaattgacagatctagagacacagacaatggatcagtggttgcctagggttggagggaggcaggaatggggattgacagctaatgggtacagagtttttttcagggtgatgagaatgttctacaattgattgaggtaatggttgcataaatctatgggtatactaaaaaacatgtagttgtatacttgaaacaggtgaatggtatatgctatggtttaaatatcccctccagaacttatttcgaaatttaaaatgtaattgccattgtgatggtattaagaggtgggtgggagctttgagaggtgattagatcatgagggccctgccttcatgaatgaattaatgctgttattgcaagactgggttagggttccaaggagccagcttctggtaaaaggataggtttagcccccatttttaytgtcctgcatgcacacgtgcacaccctgtggtactgcagcatggaatactgctgcatggagcttctcaccagaggtcagcaccatgctcttggatgtttcagcctccagaactacaagtcaaataagtctcttttctttataaattacccagtccatggtactc

SEQ ID NO: 730633 - DNA, 529 bp, Homo sapiens
gcgatggctctctgccactgcactgaatggctaaaattgaaaaggatttttgttagcaaggatgtggagcaaatggcacacccacacatgctgacaggaatgtttggaaaactgtatcacagtttctaattaagtttaatatgcttctcagctgtgacccaacagttctactctcaggtatctatccaagagagattaaaaaaaaagtaagtcagactgggcgcggtggctcatgcctgtaatccyggcactttgggaggccaagatgggcggatcacaaggtcaggagttcgagaccagcctggccaatatggtgaaaccccgtctctactgaaaatacaaatattagctgggcttggtggccggcgctgtagtcccagctactcgggaggctaaggcaggagaatcgcttgaacccgggaggcggaggttgcagtgagccaagatcacgccactgcactgcagcctgggtgacagagtgagactccgtttcaaaaaaaaagaaaaaaaaagtctacaaaaagaattg

SEQ ID NO: 730634 - DNA, 560 bp, Homo sapiens
tgttacagctcctaaggcggcgcgtctggagttgttcgttcctcctggtgggttcgtggttttgctggcttcaggagtgaagctgcagaccttcgcggtgagtgttacagctcataaaggtagtgtgaacccaaagagtgtgcagcagcaagatttattgcaaagagcaagtgtgaaaggggacccgagcgggttgccactgctggctcgggcagcctgcttttatcctcttatctggtagcacccacatcctgctgattggtccattttacagagagccaagtggtctgttttgacagggtgctgactggtgcgtttacagtccctgagctagacacaamagttctccgtgtccccactagattaggtagatacagggtgtcgacacaaaggttctccaagtccccaccagagtagctagataggagtgtccactggtgcattcacaaaccctgagctagacacagggtgctgattggtatatttacaatcccttagctagacataaaggttctccaagtccccaccagactcaggagcccagctggcttcacccagtg

SEQ ID NO: 730635 - DNA, 578 bp, Homo sapiens
ttaagaccatgtggaagctgtgaaggctcatagcttgcaccttctgaagcagcagcctgagctgtacctgggctgctttgagctaaggctggagctaaagcagccaggatgcagggaacagtgtcttcaggccgctcatggtggcagggccctgggcctggcacaccaaaccgttctgtcctcctaggccttygggcctgtgatggaaggggctgccatgaaggtctgtgaaatgccttggaggccctttccccattgccttggctattcgctcttgctttccttttagtaatgcgaatttttgcatctggcttgaactgttcctttggaaatgggcttttcttttctaccacatggccaggctgaaaattttccaaacttttatgctctgcttcccttttaaatataaattccagcttcaagttatttctttgctcgtgcacatgagcataggttgttagaagcagccagaccacttgttgaacaatttgctgcttagaaaaattattcagccagatccataaatcatcattctccagttcaaagttccacagatccatagggcagaggcataatgc

SEQ ID NO: 730636 - DNA, 659 bp, Homo sapiens
caaattttacctaccaagactagagaacaagaaaatttccatgtgtgcttccaggataaaatcattagaccttattagttgaaagactttgaagaacactgtaacttcagtttcccaatctgtaaaatgggggtaaaaagcataactatctccaattgtgtcctgaattaaatgagataattcatgtaaagcactgagctgagttcagggcatctattaaattcttaataagtgctagcatcattattaccatcattcctggtagtccaggataccttttcttttcttttctattttttgctacagggccacccactcagtctgctccccaggctggaatgcagtgcacaatcatagctcactgtaaccttgaactcctgggctcaagcaatcctcccacctcagcctcytgagtagctgggactacaagcacgagctaccatgcttggctaattttgaaatttttttgtagagactgggtctcatttttgttgcccaggctggtctcaaacttatggcctcaagcaatcctcctgtctcagcctcccaaagtgctagaattgcaggcatctacactgcacccggtctcaggatactttttcaatggactttaattccttcatactttctgttttataatattttggagagtgggattt

SEQ ID NO: 730637 - DNA, 575 bp, Homo sapiens
tgtggttttttttgcatgtacgtagagatggggttgcgtcatgttgcccatcttgaattcctgggctcgagagatccgcctgcctcagcctcccaatgtgctgggatcacaggtgtgagccaccttgcccagccatttcttttgtgtagtatggaatcttagtttaagccctcagtttaaatgtattatataattgaggtgctagrtgtacagaggtactagaactacagagcttttctcattaatgtatgttccttctgatgttgaatatttagaaaactgaatattgtgtttggagccaagggatattacacttgaaatatggtcatttggtgaacaggtatctcatttgtaggctatcattatttttggtgaacaggtatctcatatgtaggctatcattaattttggcagtttcacattaaaatacctgcctggaaatacctgcccagttttgccagtaatgggaattgcaggttaaccgttggtcttctatatgtggctctatgatgtggacaagacttatagctctttactttaactgagacaacaatgttggtgatccaagtctagaa

SEQ ID NO: 730638 - DNA, 575 bp, Homo sapiens
tgtggttttttttgcatgtacgtagagatggggttgcgtcatgttgcccatcttgaattcctgggctcgagagatccgcctgcctcagcctcccaatgtgctgggatcacaggtgtgagccaccttgcccagccatttcttttgtgtagtatggaatcttagtttaagccctcagtttaaatgtattatataattgaggtgctaggtgtacagaggtactagaactacagagcttttctcattaatgtaygttccttctgatgttgaatatttagaaaactgaatattgtgtttggagccaagggatattacacttgaaatatggtcatttggtgaacaggtatctcatttgtaggctatcattatttttggtgaacaggtatctcatatgtaggctatcattaattttggcagtttcacattaaaatacctgcctggaaatacctgcccagttttgccagtaatgggaattgcaggttaaccgttggtcttctatatgtggctctatgatgtggacaagacttatagctctttactttaactgagacaacaatgttggtgatccaagtctagaa

SEQ ID NO: 730639 - DNA, 602 bp, Homo sapiens
catattgttaaaagcagtagttgttccatttaattgctaagtagtagtccattgtatggatattccacaattcctttatttactagttaatggatattggggttttttttttttccaggttttgggtttatttatttatttatttgagacggagtctcgctctgtcgcccaggctggagtgcggtggcgagatctcggctaactgcaacctccgcctcctgggttaaagctattctcctgcctcagcctgctgaggagctgggactacaggckcatgccaccgcactcggctaattttttgtatttttagtagagacggagtttcaccttgttagccgggttggtctgatctcttgagctcgtgatccgcccacctcaacctcccaaagtgctgggattacaggcatgagccaccacgcccggcccagtttttggctattacgaataaatctcctctgaatatttgcaacatagatctttgtgtggacatatattttcatttctcttggttaaaaatccaggagtagaaattgcaggattgtagggtaagtgtgtttatagtttttaaagtaacggcctattttgcattcccactggcaatg

SEQ ID NO: 730640 - DNA, 645 bp, Homo sapiens
ggaacaatgcaactaccaccacgcaactgatactctcagcctgagtttcctaaaacaggccaggctgcgagggggaacagaacggaagccataaggaatcaaaccaggacacaaaagaaggcaaaccagctccgcgaggggcctcctctttctcaagcaggcattgaaaaaagtgtaagaagccctctcttgccgccttccttccccttccattttgtgtatctgaagggtagagacagccctgaatattcactaaacaagttaaaacttctcagtttaacaactggcacggggctcagcccttcacagagcagcaggccgctaggccctctcagcaaccccaccagacctaactctcagtccaggctttccctccaccagcagcccccaaaaataaagatcagacccccaccccatctcctattggatggcagtaacccctgacactcctgtttcagggatgctgaggttrtgctgtaccaagacaaggtaggatcaggtcaggccaacagggaggagagtcacaaaccctttggggaccttcccctcaggtcccagccccacacctcctggggagactgaagaaaaacatgaggaaggcagggagctgcatgaacaggtaggtggagatctgcctgctcttct

SEQ ID NO: 730641 - DNA, 567 bp, Homo sapiens
aggggtctagaacttacaggatccagtttccctctggtccagttgcagagagggccgttgtggcaggacacaactgtattttttttttttttgagacagagtctcgctctgtcgtctaagctggagtgcaacggcgcaatcttggctcactgtaagctccacctcccaggttcacgctattctcctgcctcagcctcctaagtagctgggactacaggcatgtgccaccacgccgggcttattttgtatttttagtagagacggggtttctccatgttgggcaggctggtctcaaactcccgacctcaggtgatccgcccaccttggccttccaaagtgttgggattacaggygtgagccacagtgcctggcctaaaattttaattattaatgtttatattttattgtaaaatacacaaaaatttacaatttgaaccattttaagtgtacaattcagtggcattaagtacattcacactgttgtacaactatcaccactgtccttttcagaactttctcatcatcccaaacagaaactctgcaccctttaaataactccttgttcct

SEQ ID NO: 730642 - DNA, 583 bp, Homo sapiens
gcaaatattttcgcccattctgtaagtcatatgtttactctgttgatagtttctttagctgtgcagaagctcttagtaaaattaggtcctacttgtcaatttttgttgttgttacaattgcatttgagtccttatcatgaaatctttgccagggcctatgtccagaatgtacttcctagtttacttctagagtctttatagctttgggtttcacatttgtctataatgcaccttgaattggtttctgtatatggtgaaaggaaatgatacattttcaatcttctgcatatggttagccagttatcctaccactatttactgaatagaaagtcatttccccatygcttgtttttgttagctttgtcaaagatcaaatgattgaggtgtatggctttatttctgtgctctctactctgttccatcggtccatgtgtcttttttttttttttttttttttgagaaggagtctcactctgtcacccaggctggagcgcagtggtgcgatctcggcccactgcagtctccacctcccaggtacaagcaattctcctgcctcagcctcccaagtagctgggattacaga

SEQ ID NO: 730643 - DNA, 599 bp, Homo sapiens
ttttgaaggttcataacaaaaaagaatgataaatgtttgaaatgttggctatgctatttatcctgatttgattattataaattgtattacatatcaaaatatcactttgtatgtaataaatgtcaactaaaaatagaaaatgaaatatatataatatatacatatatatatatatatgccattcatcatttgttagttrtatgtgcataaagcatctctttccaacttatggattgtcattgattcattcttttacaagctttattctttcaaaaaatctgtactgaacatgtaatatacacctacaacaggtctaggcaattgagttgcaactatgacataatagactggaattcttattctgttgggggttacatttacataggaaaaagagatacggacctatgattaccaagatacagaagaaacatatacatcatgctagagagtgataagatttgaggaataaaaacacaacagggaaagaaataggaagtgtcaggaaaggagattgcaattttagatattatggccatgaatggccttactaaaaatgtaacctttgaataaagttctgcatgaggtaaggcactaaacca

SEQ ID NO: 730644 - DNA, 619 bp, Homo sapiens
ttcactatcatgagaacagcacaggaaagacctgtcgcccttattcaattacctcccacctaccacaacacatgggaattcaagatgaggtttgagtggggacacagccaaaccatagtattccacccctggccccaccaaaatctcatgtcctcacatttcaaaacaaatcatgctttcccaacagtcctccaaagtcttaattcatttcagcattaactcaaaagtccacaatccaacctctcatctgagacaaggcaagtcccttccacctacgtgcctgtaaaatcacaaacaggttagttacttcctagatacaatggaggtatgggcattgggtaaatacagccattccaaatgggagaaattggccaaaacaaaggggatacaggccccatgcaagtccataatccagtggggcagtcaaatcttaaakgtcccaaattatctccttcgactccctgtctcacatccaggtcatgctgaagcaagaggtgggtttccacagtcttgtgcagttctacccctcctggctgctttcatgagctggggttgagtgtctgtggcttttccaggctcacaatgcaagctgtcagtggatctaccattgtggggtcag

SEQ ID NO: 730645 - DNA, 623 bp, Homo sapiens
gtccaactacaatatttaaagactctgcgtttgaaaatttcatgactcattggcagaaataggacgaccggatctgcatctcccagaaaacatctctccaaacactatgacagggattccccgctgactactgtcctcagaatcagggaatacgaaatccagaagtaacctcaagagaaatttagcccaaactctatcttgccattttacagagaggagaaactagagaacagatgcagaaagagtggggtctggaggaaattactggttttccagctatgctttcgaaggctgtgatgtccaacaggaataacatatgagctacaaaaaacttaatatgtaatattaaattttgtggtagtcacattgaaaagagtaaaaagaagccaggcacagtgacacatgcctataatcctagcactktgggaggccaaggcaaaaggattgcttgaggtcaggagtttgagaccagcctggggaacatagtgagaccttgtctccacaaaaaaattttaaaaattagctgggcgtggaggtgcacgtctacagtctcagctactagggtggctgaggcaggagaactgtttgaccccaggaggtcgaggctgtagtgagccaagatg

SEQ ID NO: 730646 - DNA, 616 bp, Homo sapiens
tctagggtgtggtccaggaacctgcatcccaacccccagtgattaaggtgagctctttgcttacagctgtgtcggtgggggtgggggcacagcaagtgttagtggaatgaatacatcaagccagggtcatcagctgctactcatctcagcggagcccacagagcaaagaaataggaacccttctctggcacaaggaacttacataactgactttaaaattgtgttcatttcatgtcttaagcttgggttgagttttttkttgttgttgtttttgagacagggtctcactccgttacccaggctggagtgaagtggcgtgatcatggttcacagccttgacctcccaggctcaagtggtcttcccacctcagcctcctgagcagctgggactacagatgtgcaccaccatgcccagctaatggttttacatttttccgcagagatggggtcttgttatgttgcccaggctgggtcatgcttactcctgaataggtaccacagtcacatgattccaagttcagagtctccctcctgccctgtgccttacccacctgcaggtggaggtagtgacagtgttacccgtttcttatatgtctttccaaataaatgttatgca

SEQ ID NO: 730647 - DNA, 616 bp, Homo sapiens
tctagggtgtggtccaggaacctgcatcccaacccccagtgattaaggtgagctctttgcttacagctgtgtcggtgggggtgggggcacagcaagtgttagtggaatgaatacatcaagccagggtcatcagctgctactcatctcagcggagcccacagagcaaagaaataggaacccttctctggcacaaggaacttacataactgactttaaaattgtgttcatttcatgtcttaagcttgggttgagtttttttttgttgttgtttttgagacagggtctcactccrttacccaggctggagtgaagtggcgtgatcatggttcacagccttgacctcccaggctcaagtggtcttcccacctcagcctcctgagcagctgggactacagatgtgcaccaccatgcccagctaatggttttacatttttccgcagagatggggtcttgttatgttgcccaggctgggtcatgcttactcctgaataggtaccacagtcacatgattccaagttcagagtctccctcctgccctgtgccttacccacctgcaggtggaggtagtgacagtgttacccgtttcttatatgtctttccaaataaatgttatgca

SEQ ID NO: 730648 - DNA, 620 bp, Homo sapiens
aataaaaaaatggagaaaaaagaaaactttaaaaaactaaacgaacactcataaatgtgtattgtttctataaatgtagtagaaagttgaataggctttagtgttaaggacctagattcaaattctgactttttgatttcctggtttcaggacattggtagggaggttacttagcttctcttagcatccatttcttcatctgtaaaatgaagccaataatactgaccttacagatttgactygaggaaaatgtgagtcacataaaatatccagcattaatactggcattctattccttctcctgtcttttacagtcctacataaatgcaatgtacgtgcaattacttatattttttgtacttcaataaagttttgtcataatttagtattgctgaaggcacagaacacagctgtaattctctatgttaaaaaaaaattagataatgtcacatttaagttaaaaacatacaatccttggctgagcgcagtggctgtaatcccagcactgtgggagaccagggcaagaggatggcttgaactcaggagttcaggaccggcctgggcaacgtggcaagaccctgcctctactaaaaatacaaaaaaatagttgggcatggtac

SEQ ID NO: 730649 - DNA, 619 bp, Homo sapiens
agagaacaggatggataggagaagtgtatagaaggtagcccctcagcactcatccctcatgggataatcaggatgatacaaagggaaaagaagttaaggatgattgagtggaggttttgacgtgctacccagaactcttcaagaccaaaggacttattcctctagctcctgggagaattgcccttggctgaagacagccatcttgtccaagatcacactgccttcctggacagcccacatccaatgactggtcaacatttgggtgtaaaagctattttccagacttctcaacccaactcaagacaactttgaagggccatccctgcttcaaatctcccagagggcttggatgaggccttggttgagactttgttgcagctcaacttcctcttctttccaacctgcttttttcccttcccttccacaggtgggatstgaagagctctttctaatacacctcattatgttaatatccatctcagagtctgctcctcaggaaactcatgcctgcaatgtctatcctcctggcttgagaagtctgtagatggtgttgtcattcactgatttgtggaatagagaaagaggaggtaatttggagtgaatgggagggagattgtga

SEQ ID NO: 730650 - DNA, 617 bp, Homo sapiens
gtaatgttttacattatagctagatgacctggaagagttggtgcctaactcaccaccaggaagtggggagacgtggagaagattagtttcacggatatgtattctgatcactaactaaaattacatttctaggcttgtttatattcacactraagcaatgtctcaagccttttgttgacttccattgttttggtagcatgagccacgagctgaaaagtgaatgcagtggcaagacacattttcctccagagaaatgccaagtatgtgaaaaagagacagtgagaagaaactgtaagaacagtaaggccaaaaggccaccaggtgaaaatggttctgctgaaactccatctgaattccactccagttttcatctcactggacaccaccacatccaacatcatctttggtgcatggatttcataattgctcacaggacttggatattattctcagcatgattttggttgaatgacctcactaatattcatggttgtctactatgttgtctccaatctggggaggaaaggtcttattagaagacgaatttaattatatatacaattatatttatatatgttacatatatagataaatgacaaaaattctgcttcagaaaa

SEQ ID NO: 730651 - DNA, 617 bp, Homo sapiens
gtaatgttttacattatagctagatgacctggaagagttggtgcctaactcaccaccaggaagtggggagacgtggagaagattagtttcacggatatgtattctgatcactaactaaaattacatttctaggcttgtttatattcacactgaagcaatgtctcaagccttttgttgacttccattgtttyggtagcatgagccacgagctgaaaagtgaatgcagtggcaagacacattttcctccagagaaatgccaagtatgtgaaaaagagacagtgagaagaaactgtaagaacagtaaggccaaaaggccaccaggtgaaaatggttctgctgaaactccatctgaattccactccagttttcatctcactggacaccaccacatccaacatcatctttggtgcatggatttcataattgctcacaggacttggatattattctcagcatgattttggttgaatgacctcactaatattcatggttgtctactatgttgtctccaatctggggaggaaaggtcttattagaagacgaatttaattatatatacaattatatttatatatgttacatatatagataaatgacaaaaattctgcttcagaaaa

SEQ ID NO: 730652 - DNA, 617 bp, Homo sapiens
gtaatgttttacattatagctagatgacctggaagagttggtgcctaactcaccaccaggaagtggggagacgtggagaagattagtttcacggatatgtattctgatcactaactaaaattacatttctaggcttgtttatattcacactgaagcaatgtctcaagccttttgttgacttccattgttttggtagcatgagccacgagctgaaaagtgaatgcagtggcaagacacattttcctccagagaaatgccaagtatgtgaaaaagagacagtgagaagaaactgtaagaacagtaaggccaaaaggccaccaggtgaaaatggttctgctgaaactccatctgaattccactccagttttcatctcactggacaccaccacatccaacatcatctttggtgcatggatttcataattgctcayaggacttggatattattctcagcatgattttggttgaatgacctcactaatattcatggttgtctactatgttgtctccaatctggggaggaaaggtcttattagaagacgaatttaattatatatacaattatatttatatatgttacatatatagataaatgacaaaaattctgcttcagaaaa

SEQ ID NO: 730653 - DNA, 596 bp, Homo sapiens
ggtgggaaaactggagaaattaaaataaagtctgtagattagttaacagtattacaccaatggtaattttctgattttcgtaattctgctatagtaatataatatgttaatattagggcacagtgagtacaattctctgcataatttctgcacttttctctaagtttaaaattatttcaaataaataaataaaaatatagtgtgatgtttctctagcatcttctgaaggtgactaaggttttaaaaaatatgtttatgaacttaagattttaaacatattttatttgttataatccattataggtaaaattgtcccatctttgaccagtggtaacatattcaggttggatcctgagtccttttgacataatcctaatagtatttgatagcttccttactttgtaatatgtaaatatayttatacattttatgctccagacctggaatcacttatttctcccaggactcctaattccttttagtgggcaatggtctttagagaacataatatgggtgctagaggtgctaattttgctgttagtcattgttttggagcactttctgtggacagaggtagaaaatattttttgcttgtt

SEQ ID NO: 730654 - DNA, 605 bp, Homo sapiens
tgtatgcttttaattatgtcttgaggccaaaattattgcccttgggaatacatttccaattacataatggaagtcaggaaagaaaatacttttaattacaaaagtcactgggctctaaccttcggtgatccgtttgccaamtggagagaggcaccaggagagctcacccttgcctcggtgcgcactgtgagtcggccggtggagggtggctttggggcctgagaacccttgagagaaggctggcaatgccactcacaggctggatgacctgtggcggccatgctacataacctccatgagcctcaatttcctcgtctgagaaatggggagaatgacacctactttgtagggttgccgtgaggattaaacacagtcacatgtgtatagtacctagcatgtatggttcttcctctctcatccttctcctaccatcctctcgtcgaccatgtaatcactgatatggcaacaaaaacttgatcctagaataaaaggttaacaagttcctacccttaagacgtaagtttcctcaagaaacttaggtggcagaacagggccgaggaaagtaccctggcttgggagtcagagaaatgtggctttgtctgttt

SEQ ID NO: 730655 - DNA, 605 bp, Homo sapiens
tgtatgcttttaattatgtcttgaggccaaaattattgcccttgggaatacatttccaattacataatggaagtcaggaaagaaaatacttttaattacaaaagtcactgggctctaaccttcggtgatccgtttgccaaatggagagaggcaccaggagagctcacccttgcctcggtgcgcactgtgagtcggccggtggagggtggctttggggcctgagaacccttgagagaaggctggcaatgccactcacaggctggatgacctgtggcggccatgytacataacctccatgagcctcaatttcctcgtctgagaaatggggagaatgacacctactttgtagggttgccgtgaggattaaacacagtcacatgtgtatagtacctagcatgtatggttcttcctctctcatccttctcctaccatcctctcgtcgaccatgtaatcactgatatggcaacaaaaacttgatcctagaataaaaggttaacaagttcctacccttaagacgtaagtttcctcaagaaacttaggtggcagaacagggccgaggaaagtaccctggcttgggagtcagagaaatgtggctttgtctgttt

SEQ ID NO: 730656 - DNA, 432 bp, Homo sapiens
gaataaaaactgtcactttcctaggacaaagttaatatgctccagtgacccatcaaagtcaaaatcccacctggccaatttactaaagcctgaggcctaatgctacccacccagggtgcatgagctaaaaaaaaataataataataaattgtaaaaagtagccatatggsaagctatagaaagttaccacctaccaaagtaaaaaaaaaaaaaaaaaaaaaaaaaaaaaaacatgactcccacttctattcctacttggtgaaacaaaaccccgaggccattcttttggatcacttagggtcttgcttcaacaagatgcttcaatctccacagttccctttcttaccaaattctgctccttatctattgccaagttggctagtccaatatatgagatttgagggcttaaagatttaatatacaacactcttc

SEQ ID NO: 730657 - DNA, 620 bp, Homo sapiens
agccctcttaatcatacactccctttctcaaatacacatatttcaaagttgagtcttgaagtaaagcattcatgaaacagcagactcttgccttgggtcatcataattaaaggccatttgagctcaggagtttattttgagttctttatagtggccacttgtactaggtcactcttcttcataaaggacctctcttatatatttcatcatgttacctttttaaaaaattgttgacatgtctacttcgtatwatcagaagagaaatattcaagggtaaagctctcctcttatctccttggtatcccaggtacttggcatagtgtttggcccatgatcatctctcatgactattacttaaatacatatgcacataactaatcagatattactttcagatgaatggctgatttagagatgatacaattagtaaaccatcacttctgggtatgaaaaatagatttgaattgtcaggaagaaaataatcaatataagaccaaaataaataccataaacatgttatatctaaaatatgcaataaaaacctatcccgaaatctctgagaataaatttttaggtggaaaagcaaacccagttaacatgctttcctgtcttctgagctc

SEQ ID NO: 730658 - DNA, 620 bp, Homo sapiens
agccctcttaatcatacactccctttctcaaatacacatatttcaaagttgagtcttgaagtaaagcattcatgaaacagcagactcttgccttgggtcatcataattaaaggccatttgagctcaggagtttattttgagttctttatagtggccacttgtactaggtcactcttcttcataaaggacctctcttatatatttcatcatgttacctttttaaaaaattgttgacatgtctacttcgtattatcagaagagaaatmttcaagggtaaagctctcctcttatctccttggtatcccaggtacttggcatagtgtttggcccatgatcatctctcatgactattacttaaatacatatgcacataactaatcagatattactttcagatgaatggctgatttagagatgatacaattagtaaaccatcacttctgggtatgaaaaatagatttgaattgtcaggaagaaaataatcaatataagaccaaaataaataccataaacatgttatatctaaaatatgcaataaaaacctatcccgaaatctctgagaataaatttttaggtggaaaagcaaacccagttaacatgctttcctgtcttctgagctc

SEQ ID NO: 730659 - DNA, 525 bp, Homo sapiens
aaaacacagaatttgtcagacttgaaaaaaaatgcagttttattctgtttacagaagtaacattgtaagcatatgtatgaatacatagttaaaaaggataaagacaaaaataagtctaccatatattaacaaaaagaaaaattatgtggttaaattaayagtgaaaaaagtagatcttaagtagaagtgcaaaatataaagatgtacatttcaaagtcataaaagggttaagtccatagcaagctataaaatcacaaagttttcaatacctaattagcacaaaatttaactgtataaagcaaaaagttgaaagaactaaaggagtcatatacaaatctacaatcataggctatgaccaatttcaataactaatagaaaaagcatacgaaagaaaaggatacagaagtttagaatgacattaaccaaactgacctaatttggcttatagaacattatatccaacaattgcagagcactctttaccatgtatatcatatatatatatgagaaatatgatatatatct

SEQ ID NO: 730660 - DNA, 634 bp, Homo sapiens
aattccatagcttttcattaacactgggttgtagaagacaactgaatgttaactcagtatggactgtggaggtgagaggttaattctgtttggattgacaccagaattatttccctcacttagatgcatacagttttgaaaataagaatgggaaatatctctaacaactraccaaataactcactcagaaatgaagtacaaactcattcttaaaaatcaaagagaaaggccgggcgtggtggctcacgcctgtaattccagcactttgggaggccgaggcgggcagatcacgaggtcaggagatcagaccacggtgaaaccctgtctctactaaaaatacaaaaaattagccgggcttggtggtgggtgcctgtagtcccagctactcgggaggctgaggaaagagaatggtgtgaacccgggaagtggggcttgcagttagccgagatggcaccactgcactccagcctgggcaatagagcaagactctgtctcaaaaaaaaaaaaaaaaagaaaagaaagaaagaaaagaaagaaagaaaataaaaaaagaaatcaaagaaaaccgaacctcattctgatttctcttacaagtttgagggaaaaaaaagaaagacaaagcatttaataaatt

SEQ ID NO: 730661 - DNA, 653 bp, Homo sapiens
tgaactacgtgtacttgaaaactcccaaatcccacttctaatcaaataccctatagaaatgcattaacatatttagcaagaaatgtataattgttcaacagaagattggatattttatgcgataggcactccatatagtactatatagcaataaaaacaaacacatggcaatatggacaaatctcacaaaaatgtgaagtgaacaaagccagacatagaatatatagtataaaactgcacacacgcacacacacacacacacacacacacmccatgtaacaggcaaaattaaactacagcaataagagtatttgcaagcttttgggaggaaggaggagccacaagagggtttcttgagttctggtgatgttctatttcttgacctgagtggtgtttacataattaggttcactttgtgataactgaattgaaaattttattatctgtcccctcttctatatgtgtgatatgtcataaaaaattaagaaactgaaaaactaaagagacataacaacaacaacaaaaatagcaaaaataatttttaaagtaattctgccagagttgggtgagtgagtagctaaaaggcagttacacttgtagctctaatgtaataacatcaacacctaaattcaaactgcagatatattataaat

SEQ ID NO: 730662 - DNA, 653 bp, Homo sapiens
tgaactacgtgtacttgaaaactcccaaatcccacttctaatcaaataccctatagaaatgcattaacatatttagcaagaaatgtataattgttcaacagaagattggatattttatgcgataggcactccatatagtactatatagcaataaaaacaaacacatggcaatatggacaaatctcacaaaaatgtgaagtgaacaaagccagacatagaatatatagtataaaactgcacacacgcacacacacacacacacacacacaccccatgtaacaggcaaaattaaactacagcaataagagtatttgcaagcttttgggaggaaggaggagccacaagagggtttcttgagttctggtgatgttctatttcttgacctgrgtggtgtttacataattaggttcactttgtgataactgaattgaaaattttattatctgtcccctcttctatatgtgtgatatgtcataaaaaattaagaaactgaaaaactaaagagacataacaacaacaacaaaaatagcaaaaataatttttaaagtaattctgccagagttgggtgagtgagtagctaaaaggcagttacacttgtagctctaatgtaataacatcaacacctaaattcaaactgcagatatattataaat

SEQ ID NO: 730663 - DNA, 588 bp, Homo sapiens
atttttatttttttctctgtatatttttttctgggtgcttttagggtttttatatcaatgatttcatcaatttaattataatttactttgattttgtgtctatgtgtgttttttttttaaatctagctttgggttgatagaacttcttggatctatggtggatagttttcatcaaatttggtaatgttttggccatgatttctttcactaatttttatgtttctttctttctcttctcagtttctaraactccaacagcacagctgttagaacatttgctgttgttccacaggccacagaagcttttcttctccttcttcccctcctcctcctctgtcttccctgttttttcctttttactctctgccttagtttcaatcctttctattgctatgacttcaggctcattgatctttatttccttttttttctttttcacttatgtaatataagctgcaaaatagtggtgaactatactaaggggtatagccctctgctgagtgtggtcttttctttattttccaaaacagcccacgtaggtaaaggttattttaaaaacttccaccccacaaaaagtaacttttgata

SEQ ID NO: 730664 - DNA, 606 bp, Homo sapiens
ttaatgtgataaacaaatcatagtttattactttttaaataatttttgaaattgctaacattgccgaacacttattttggacttctgtattttctttctaatcgtacttttttccaatagaggcagcttatttaatacaaaaatggaattttatttgtaaatttttgaaattttgtttgatttcaagtracttgttaagttctatgtatttcccccgtctcttttcattgttgttttcattatgtagaaagcttatcaggaagtgagaatgcccttcctattgccttctctgtgtccatgtgttctcattgttcagttcccacttacaagtgtaaggtaaagtctgaaaattgctttacaatccttatgaaagtccacacgtttacaaaacgttatcataacattgagctgatcttaaaactacattaaaatacgcagagggagagaaaattaaagaggtagagaaagaaagaggggatcagaagggagggtgagggagagagaacatgagcgatcatgatatggacagagacagaaagagagagattgagatcctgagaaacagagcatttccttacacatggaaaagcaaatggaatgaatggg

SEQ ID NO: 730665 - DNA, 582 bp, Homo sapiens
ttcccaactgcaaaactgtttatttacagaagatcatgaggaacagggtagaaaagatgatgtgtgtggtgaggtggggggtgaacagtgaagagttatactttttgagtcttcctttttatgtaattcagatgtttggagctatattaatattttgcataaacaataaataaaataaagatgtgaaaagaaaacctgaaaagtacacaaaatgagacaaacagacttatctatatgtaagaaccccattgaaggagaaaaatattaactcaagtaatttttgaatacaatattttgactatatcttcagactaaagacaaaaattataaagaaagattgaactttagggtaggaagttttgcatgggttagcatttycaaaattactttctgtgcattctagtgtatcctaggattaagcaataagtaaatagatgaggacaatgggaaccaggtttctcactgttggaaaaggcaattataaatatggataagaaaatgtggaatgaatcctatgttatttaagtgtaattagatgttggaattgaaagaatcagtaaaaaactcatgatacatattatc

SEQ ID NO: 730666 - DNA, 632 bp, Homo sapiens
ctttgagcagtagttaggtcatgaggatggagcttcctctctgttctccaccatgtgagaatacagatggctgagaaaacagccatcagctgtcagaaaaccagaaagaatgccctcagcagacactagatctgccagcaacttaatattggatttcccagcctcctgggaagataaatgtatatactttaagccacccatcctgtaagatatttgttatagaaggctgaaatgactgaaacagatgtaaacctacctattcaagagcagaatgaaccaccaacaggaaycatgcacaggaacctagcaatcaacctgttggaaactcaagaaaaataaaaattttgagagcagttggataaacaaggcacattttctgtacgaaacaattcaaactatttcaaatttctaatcagaaatcatggaggctagaaggatggcacaatattattaaattgttggaagggaagaactgacagcccagaattatatagtcagtgaaaacatcattcaacaatgaaagtaaaataaagaaattctcagatgaaggaaaacaaagtgggtttgtagccagctgatgtattctgaaagattttccaaaggaatcttttctggcagaaggaaaagttacc

SEQ ID NO: 730667 - DNA, 571 bp, Homo sapiens
tgtttctacaatttcatgcttgctgtcttctaattttattttgtctcatttaattttctttctttatgtttccagaactcacttctttcatggggaattctgttccgccattctacacatttatttgttaggaaacaattcttcttaggtctccggtgtttctgcacatcatgtaccagcttttgttccagaatgtctttgcaaagatgtttgggtagcatatatctttgaagacagaaatagtgtttcccttcagaatagagggcaaatttgttgcctttcaagatacttaaaatttctttctccaggacaaattctgggtaggtgtgcttgcacttcctttaagaattgctttgcccaagcctggggatcatcgtacatgatgtacacccagtgtgtgtgcagcaaccttcggrgctttggtgccaaagggaactgatacaaatgtgaatctcagaaaattccattcacagtggcttcaaaaataatgaaagatttagaaatacatttagcaaaagaaatacaaaactaataatatgaaaactacaaaatgttgttaacagaaaataaa

SEQ ID NO: 730668 - DNA, 495 bp, Homo sapiens
taatatagccatacattggaatattatttggacgtaaaaataaagtattaacacatgctacaatatgggtgaaactcaaaagcattacgccaaatgaaagaagttagtcaaaacttttacaaactattatttcattcacatcgaagtaaaaaacagggaaatctatagagacaaaaagtagattaaatgctttcttagggctaagggaaggggaatagacagttggaggaayggacatctaaacgtttcagagatttttttaaggaaacgaaaatctaaaattgactgtgaagatggttgcacatatccgtgaatatattgaaaaatattcctttgtacactttaagtgcgtgaattatatggtttgcaaattctgtctcaataaatctatttttacaaaacataaagctcaggctgcatgctgcaccactagtaacaatgtcctttgtttttactctggaaacttatgtcttttgccagcatccatgagtctgt

SEQ ID NO: 730669 - DNA, 637 bp, Homo sapiens
cttttgccagcatccatgagtctgtggcagcctgaccctcataagtaggataaaatctcagagccttcacctttcttaataatatttccttaagaaattttcaacatttcaacacttctgccttctctgagcggaatcatcttgggtggaaacctggctggagtcaggacagtgaactttccctgtactctggagcttaagcctgtgctaaagctgtacgatgtaaatttagaaactttcaggggctacatttaactgattgtggaataaattagtttttaatgagaaagaagagagctaaaagaaaataatcaatattgtagtgttcctgaagtccagtctgaacctggcccttcctatctatggcttggctgttccatggaaataccccacattcttccaataactrcatatttttgcttcatgtaactactaaaagaacctgtactattttaattttaagcaattattttaaattaagtgaaaaaaattacatatccttttcttcatcatcatcctatactttgccaaggcattgcctttttttaaacattttatttatatgtgttattctaaatgtaatagttgttattttgttcaattttattatcagagatataaataaaaggtttaaagt

SEQ ID NO: 730670 - DNA, 633 bp, Homo sapiens
aactgcacttgaaacctttaatttaaattataaaatatgtgcataagagaatataaacacaaaatgtggcttatgagagaaataatcaaatgatacaccaggaaaatatatacactgcaatcgtgattggttataattagaaaaaggactaaagactaccttggaaaaagwtgaaaatcttaaaactgcccaaacaggggcatcttaattcgttaaaaaccactggcccccagggtatttgaaaacagtatgagtaggagaaaggtcaagttgatatttggaagtgccagccactcttatgtggtgatttctatatcctagtttgactgatttgaacttttcatttattcactcattcactcacttacttattcaagaaataattttcttatgtgtcagaaattggaattatctgcatatgggaggcgacttggaatgcaagtttatagattttgtgccttgggcaattgttaaaaatgtgttttctcactagtttgcctcttctacggtatggtttctcttcagttatgaagagcaaatgatttagatccaccttaatccctacaattcccgttggctcactggaaaggttggttattctcagtgagttgaaaaaatattttcttctgattc

SEQ ID NO: 730671 - DNA, 623 bp, Homo sapiens
ctactttctttttcttgaattttaatattcctaaggactaaaacagtattttgaaatcctttgaaaatctcagaacctcaatcaggtaatgcactctgtggtagcttcatacatatttattgaccaactgactgattgaatgaggaaagagataaaatatcagagaatacttacacactcaatctgctagcagtgtttgctcttaactcaaaattatttggaaaacacatggaaagatgcctgtctctgtggcagtctgttgactagaaatttagttcctgcatctccatatgctaccagtacttcctccaaatagcatttctgaagttggctaatttatggctgcatggtgcatttgcccctcctcatcaggtgccataatctattttccttatctttcacttggtctgttktcccctatcgacaagaccttctttgccccaccaagggagaatttcacattctcttcttactctgaagtacaattcttatagatgacagatttctttttttatttgagcctaaggttttcttttttcataacatacattaaacatgcaccataaaaaattttaattaacttggcagtaaggagcaagaagaaaaatttagtgataagctca

SEQ ID NO: 730672 - DNA, 607 bp, Homo sapiens
gccactgcgcctggccctgaatgagtttttgtagtcctttgaagaatgtcattagtagtttgatagaaatagtattgaatctgcaaattgttttgagcggtatggccattttaatgatattgattctttctatccatgagcatggaatgcttttccatttgtttatttcatctctgatatctttgagtggtgttttgtaattcttattgtaaagatctttcacctccctggttagctgtactcctaggtattttattctttttgtggctattgcgaatgagattgcattcttgatttagccctcagcttggacgttgttgttgtggcagaatgctactgattttttcacattgattttatatcctgaaactttgcttamgttgtttatcagctggaggagcttttggacagggactaaggggtttgctatgtatggaatcatactgtctgcaaacagagatagtttgaccacctctctccctacttgggtgctttttatttctttgtcttgcctgatctctctgtctgggacttccactgttacgtagaataggagtgatgagacagggcattttgtcatattctggttttcaaagggaatgcttcc

SEQ ID NO: 730673 - DNA, 600 bp, Homo sapiens
tagtctacttatatgttcactataaattcttgtgtttgccaaggtgtttggactacaaacatgttcacaatgagctaggtttaaaatctacttccatcaaacatactgtcgtatctaaaaataccttaccgcatacakataagacaaatcagacagcagggatagtaaatcttaaggaaactctttatctcttaacatataagtgtatgcataactgagaaataattaagttaaattatactgggctttactcaacactaatataaaatctcatattttctatgagggaatatacatctactttatataaaatcagttttcattcatttacactgtttgaataacatctcaaattgcaatttgaagttttatttaagctgactttcacagttctcacaagtatcaagatctgataatgctacttaatgtggctttgaagtagcagaatgaaggtttttaaaataagaatagatgggcctcattctactaagagataccattcaaagcaagaaataatacaacatggttaagcagctcaggttactcttccctcactgaggagattttctataaaagagtctgaaggagaattaacaatgt

SEQ ID NO: 730674 - DNA, 682 bp, Homo sapiens
gcagaagaaattcctaatagcttgaattatgtaccaagaaagggtaccttctgtcatagggtgataattataatttctaaactatggttaatgtttaagtgaaatctgaaaagctttgtcttaatagagctagagagggagaaaaggggacaaataaaaatgccaggaactcctcatcccttttctttattttcttttttttttttttgagacggagtctcgctctgtcgcccaggctggagtacagtggcacgatctcggctcactgcaaactctgcctcccgggttcacgccattctcctgcctcagcctcccgagtagctgggactacaggggcccgccaccacacccggccaatttttttgtatttttagtagagatggggtttcaccgtgttagccaggatggtctcgatatcctgacctcgtgatccgcctgcctcggcctcccaaagtgctgggattacaggcgtragccaccgcgccctgcccctcatcccttttcttttcctccctccctcccccctcatcccttttctctctctctgagtttttttctcagacaaggtcttgctctgtcacccaggctggactgcagtggtgtgatctcagttcactgcaacctcggcttcccagggtcaagccatcctcccactttagcctcctgagtagctgggaccaca

SEQ ID NO: 730675 - DNA, 632 bp, Homo sapiens
gagtccatgattcctgggcatgtgaggaagctggttaggagctcagccaaaacttaaactctcaatccagcactctttacactcccaccacatctgagctgagacttgaaggggtggggcatgggtgattctggtcccagggactagagcctgggggctcccaccttttcctctggttctgcactgacctgccctctggttctgcsctgacctgcccttgccaagcccactgggccggcgaacagttgtttccattttccctgcagcctctgttctgggaaccaggccagcattcatagcctttcccctccttttctttttgtaatagaaactgctcagggctgccaggagccagcagtgtgctccgcggctcaccgtttggctggactggaggtgaagcttcttggtggctccttcccagccttctatggaagctggaatccactctcccgaggccatttctcctcccggggttccctctctgcagcctcaaccccccagtgccctttgtcccctaaagcgagcagtttgttttcagtccaatacctccaggggatgggggggggcgcctggaggagtgtcccaggagagggtcccaccagccacgctgccctgaacccccttaaaatggg

SEQ ID NO: 730676 - DNA, 652 bp, Homo sapiens
ccctccaaggccggtgtgtgctactaccgcgcgtgggactcttgacatctaagtatactcagccctcactgcagcaccgcatcccaccagcaggaagcgctcctccttctccaaagaatgaatctcctttcctcttcagggccttcctcatgaggttcccaggccttgaaagctcttgcccatggtggcttatctacgatcccctctctatgggctgaaagctctatgcatgctttttgtgcwcatctgttgggtttactaccctctgtttagcacttacgtgctaaagatttagtacctggtacataatcacctgttgagtgactcagcttttaggtgttcttttctggcagccaaatagagacttcctgcagcagctcctgaagtgggaaagctttcaacaccaccatgcaatttggaatttctccaaaattctgttacctttgtaccaccatgaaatgaaaagccaacaggacacattacaaagcaactatgatcatttttaaccactattattattattttgagacaaggttttgctctgttgctcaggctggagcacagtggcgcgatctcagctcactgcaacctccgcttcccgggttcaagcgattctcctgcctcagcctcctgagtagctgggactacagga

SEQ ID NO: 730677 - DNA, 494 bp, Homo sapiens
ggggtggggcagtggtgagaaacctttgattcctgggtggccacgtggtcacccatgtatgaggcggcagctgtgttgagagtgtaaaccgaaaataaaattctaagccccgtgaccgactgaatgggcctactccctcttggctaaggagatcacacctaaaacctgaaaaactagtttaggccatgacaggaatgagggtgctgatgttagagtaggcagctaggcagacatgagaagggcaggagaggaggtttcccctgcccaattgccagcaatgttaggcaaccatcaggtgaaggtggttgttaaactgcctaaaataataattggtagtctyccaatagatgaaaaacacctgaagctggtgatcagcagcttcccaaaaagatctgaggatttgggcaagcaggcttaatcatgcacactaaggggcaaaatggcagagtttcactggtgtatgaccttcttctaggaacatttgactggtgtgg

SEQ ID NO: 730678 - DNA, 560 bp, Homo sapiens
atggcagcaagctacagacaccactctgtactttgtttcacttactttataattgaagatcatctgatatcagcacatttagttctatcctcatttctttttaatggttgggcaaaactccattatttaaaccagtccattactgaacacttggatatttccagtcttttgcttctaaaaataatgcttcactgactaccactgaacatacacgtatacgtgagtgcataatttgttctgtataataacatttttaggccgggcgtggtggctcacgcctgtaatcccagcactttgggaggccgaggcgggtggatcatgaggtcaggagatcragaccatcctggctaacaaggtgaaaccccgtctctactaaaaatacaaaaaattagccgggcgcggtggcgggcgcctgtagtcccagctactcgggaggctgaggcaggagaatggcgtgaacccgggaagcagagcttgcagtgagccgagattgcgccactgcagtccgcagtccggcctgggcgacagagcgagactccgtctcaaaaaaaaaaaaaaaa

SEQ ID NO: 730679 - DNA, 510 bp, Homo sapiens
ggtgctgtatgaagacaaagaaacttgttacaatagactcttaacaacaaggcattctggttgccagataattggctgcagctcataaattacctttttttcctttcctgggttcttgttcctatcaaaaatcagtagtagcctcatagagtcataactaatcccaaattagtgagtcttaactctaaaggattgaaagaaagacaaataaaatgctaatgctcttacatgctataggattttaaattgagaaatagcaaacatgaatagatgggacctgtatttgcttaattccagtagactaaatactytggcctaaatagagttgtcaatctcataaacccaagaaatactcagaaacaagaacattcaagtaactctgaattttgaattgctagttacagttcacttgacaggatgcaactataatgtacaaggcttgggaataaatttaagatatctgaataggggttttgactctgccactacaaaaaaactatatactcacta

SEQ ID NO: 730680 - DNA, 527 bp, Homo sapiens
tcagaaaaggagcttatagataatggtaacagtacaacatatgttatattcaactttagagagaaaagactgactatggacagggtaactggatatgtgtttgggatctcattcccacctcttccaccaacagtaccctggtttcccatgaaagagtttgcttcccactcattcttggtcacgtaatttgtgttggatggaaccccattcccagctctagggatgagccataagatcactttttgctatctggagtcaagtgcctatggaaggccagagttttagtggaaataaagagtataggaattatgagattggttggttgcttttaagtacacacacacacamaaaaaaaaagggaaagaaagaaagaaataaaatgatgaggtttggggtatgactgatctctgatctcgtcacccaggtactgagcatagtacccaataggtagtttttctagcccttgcactcctcactacctccccttctaatagtccccagtgtctgtggttcccatctttgtgtcc

SEQ ID NO: 730681 - DNA, 527 bp, Homo sapiens
tcagaaaaggagcttatagataatggtaacagtacaacatatgttatattcaactttagagagaaaagactgactatggacagggtaactggatatgtgtttgggatctcattcccacctcttccaccaacagtaccctggtttcccatgaaagagtttgcttcccactcattcttggtcacgtaatttgtgttggatggaaccccattcccagctctagggatgagccataagatcactttttgctatctggagtcaagtgcctatggaaggccagagttttagtggaaataaagagtataggaattatgagattggttggttgcttttaagtacacacacacacaaamaaaaaaagggaaagaaagaaagaaataaaatgatgaggtttggggtatgactgatctctgatctcgtcacccaggtactgagcatagtacccaataggtagtttttctagcccttgcactcctcactacctccccttctaatagtccccagtgtctgtggttcccatctttgtgtcc

SEQ ID NO: 730682 - DNA, 602 bp, Homo sapiens
tccccatacacacatacacacacacacacaccctattggttctttttccctggagaacccttacatcttaactaagtaatcaaatttagcatcaaaaagtatgagacaaactaacattacacagcataaactatgagggattcttgccaaaagtattaaaccttatccaatcaagtatttgttttattttatttttactttctgaggcctggcagaaccaatcaagtctgacttctggttttctaaaaatacaggagttagagaaagaaattggactacactcagacaaattcagaaygtgagaactttctttgtgcttattttttttttaatatttaaaaaaagagacagggtcttgccattttgcgcatgctggtctccatctcctggcctcatgctatccttctgcctctgcctcccaaagtgctgggattacaggtgttagccaccacacccagccagaatgtgagaactttctagaaaacaattggcctggcacctttttaaaaaagtattatatgtcaagagactacagaaacataactatatgtaatgagtatccattataaaattctcagtttgaaaaaaattctatgaaagac

SEQ ID NO: 730683 - DNA, 615 bp, Homo sapiens
acttctcaagagaaaagattgtttataactggaacctataattttatttcattgtgccagaaaagtagcttttaaatttataaattctacttttttcccttaaactcctaccctaaaatacttccaaatgtagaacttctgaaggctacatatgatatagagctacttcaggattcccagagtttggaaaaatgatttctgaaagcactatatgagataaaagtttcaagtatgacaactctaatttttctaccccattttgtacagctcttctacatattttgctcattagcaccttcttcacaatgtattgttttatatatatatatatatatatatatatatatatatatatatatatwtatttattttacttctatctaaggccctgaatctgctgacatatgacttgtagctccttggtaggtaaaggtcaatatatagtaattcttgtgtgccattatcttgaggagcaggatgtttgcatagactaaattgtcttcctatatattgctgctttagttacaaaggttaaaattgtaagtataaaatggaaaaaccagtgagggacagaggaactttggatgtaatgggcctctggatgccctgagaagc

SEQ ID NO: 730684 - DNA, 627 bp, Homo sapiens
ggtgggtatcctggctgcaggccggacgattgtgtgagcccatgagtgtgcgaggcatggggtgtgagttccagagactctgggtgacagggaggtttgctgtgtccctgcctgtgtgtctgaagaggcctggcccccaggatgcccccgccaggattctccattctcacgtctcctgccrccctgtccccgtgttcgagtgggccctccagtcccccatccgcaggggtcccttccagccattctctccaagccctggcagggctgacctgggtcccgcctgacctctccatgggtgctgccgctggggcctgtgcccggacgtcctggtaggagggtgggactgctgaggccgggaggggcctcaaggtggtcgtgactgtccgccagccccctgggtggtgcagagcagtgcggagcctgcggctgtggagcccgtctctcctgcctggctcgtagcagggctggccgtggccctgcagggggcagccctgggcagcagaggatgagcgtgcctgccctccccggccacatccgcgtccccatcctgcctggccgtcctggggcccagcaagccgcaggtccctcctacgtgcctcccccagaagagcacagagagggaagccc

SEQ ID NO: 730685 - DNA, 673 bp, Homo sapiens
ccctcaggggcgactccacggatggatccctgaaccccggctcaggcttctgctcactggtcgggtgggttgtcgaggtgggctcacagcaaaggcctcccagacccccattccccaagggaccaggtctggctgggaactcctgcagcccagccacgggatgcctcccagcccccacaatcccatgcactgggcagggatgccagggggcctttttctttcccctcgaattctatctctgtaaggaaggacatcccctcaccctctgcactgcccagccctggcccccacccccctcagacctgggagccccccgagttctctctgaagcttggcccatgcacacgagcacagccctggcttctgggaggtgctgctcagatgctccctgagcgagggagccagcagctcagccggccccggggcctttgcacctgccgtttcctgccccaggatggtgtccccaggtaccctccatgtctcggcccmtgcacctgcttgtctgtccctcctcggctacccaggcttgcccggcgttctccacccacttctcgcatgttatcgcgggaccccctcgcggagttgtttgctggccctctctctccctgccggccgctgggatgctgtgagttccggagggcaaagctgggtctgtgtggctcctgtcccatct

SEQ ID NO: 730686 - DNA, 384 bp, Homo sapiens
  misc_feature 382, 383, 384: n = A,T,C or G
ccctgatcctttcaagggggaaagatggcccatggtagcgatggggagcctgggatcagggaggtacacaagcccaggatcacatagcaagcagggctcccctggggccaagactgacccctgctccctccacccggcctggagcccctcctcccactgctctgtatcccatcccactgacatgggcacggggtcatgactagggtggggggtcatgcctggggcctgacaggcamcaccgtggccacagcccaccccctgcctgctgtggctgccacacaagccagccattcttggcaagacaaaggccggctggggcagggtggctctggtgcctccctggtgggtgtctggactctgcaggacgtcagtaagtggatcnnn

SEQ ID NO: 730687 - DNA, 640 bp, Homo sapiens
catggacgtttgaccatttcagctgtatttctataagtttatatgttcaagttggccaaacacagtttctctggaatcttttcattggcaaaatggcccactgctttatattgggcatgtgtggaaggtgagtggcgtgcatgtgtgtatatctctgtacgtatggactgattgagacagggtcccgctctgttgctcaggttggagtgcagtggcacaatcatggctcactgcagcctcaacttcccaggctgaagggatcctcccacctcagcctcctgagtagctgggactacaggcacatgctaccatgcctggctagttttttttttattattttttatagagacagagttttgccatgttgcccaggcccacctcagcctcccaaagtgctgggattacaggcgtgggccacggcccagccttctggggcatttaaatatgaaataaagttattaatacrctcaaggcaatttgccaccacacccacctgtaagtgataataatgtatgtggtttgcaaagccacagtgcttatcaaccagaaagcagaagcgcctcttctcttcaagcagagcctctttgcaaccatctgcaatgaatttctggatttcactctgacgagaagtaacggtctc

SEQ ID NO: 730688 - DNA, 591 bp, Homo sapiens
cttttctcccctgggggagccactaattcagactgctattaaatatctagccgatattttatattttcacacacacgtatatatttagtcaagattaacataaaattttgctttgtgtgttaaaaaatacttacataaatccttaaatggtatcacataatacatttcactcttacatcttatttctttattcagtgttayacttctgagatctgctcaccttggtctgtactgaccaaggttcttcctatttaacttctacacggtatccctttatgatggtttaagtgtccacgtagcaaagctacagtattcagtcaattaaacactaatctaggctgggcacgggagctcatacctgtaatcccagcactttggggggctgaggcaggaggactgcttgagtccaggagttgagatcagcctgggcaacatagtgagaccccgtctctaccaaaaacaacaaaaaaaattagccaggtggggtggcatggcgtgtgcttgtggtcccagctacttagaggctgagatgggagaattgcttgagccagagaggtcgaggtcacagcgagccacgatcacacaaccata

SEQ ID NO: 730689 - DNA, 591 bp, Homo sapiens
cttttctcccctgggggagccactaattcagactgctattaaatatctagccgatattttatattttcacacacacgtatatatttagtcaagattaacataaaattttgctttgtgtgttaaaaaatacttacataaatccttaaatggtatcacataatacatttcactcttacatcttatttctttattcagtgttatacttctgagatctgctcaccttggtctgtactgaccaaggttcttcctatttaacttctacacrgtatccctttatgatggtttaagtgtccacgtagcaaagctacagtattcagtcaattaaacactaatctaggctgggcacgggagctcatacctgtaatcccagcactttggggggctgaggcaggaggactgcttgagtccaggagttgagatcagcctgggcaacatagtgagaccccgtctctaccaaaaacaacaaaaaaaattagccaggtggggtggcatggcgtgtgcttgtggtcccagctacttagaggctgagatgggagaattgcttgagccagagaggtcgaggtcacagcgagccacgatcacacaaccata

SEQ ID NO: 730690 - DNA, 610 bp, Homo sapiens
gtggctcacgcctgtaatcccagcactttgggaagccaaggcaggaggattgcttgaggccaggagtttgaaaccagcctaagcaacacagggagactgtgtctctacaaaaaataaaatttaaaaaaagactagaaaatttcattctattttaattactagacaaaggttttacatttgcctatgaatggaatggttcaaaatcactttcctttgtagtttaagtgtggatgattatactgggtttaaggtccacagataccataactctatatagttatgtttatttcttggcaatgccaggaaagcgttcaggttgaagctttggcaattagcaagctatcaaactttggaacaatgtctcgtccacaccggcctccatcagatgagggattgtggaaccctgccccagaattcaagcaggttttaaattytgaacttcatagggaataagtaatgcctataagactgaagtaaaaatcatttcttcaaattcctactaggataataccagtatccacgtttgctttgttcttagaggtacatgttcttatttgaaagaatgaaacctgaggtcaggagttcgagaccagcctgaccaacatggcga

SEQ ID NO: 730691 - DNA, 574 bp, Homo sapiens
aaaattgatggtagtcaaacagagggagggaggtagattttgaatgattcaaagcaggagtgttttgaagataaacagaataactaaaaagaaagactcagatgaaaagcctagatttaaagcatttgaatcaagaggtggtaatctaggaattaggttgatttctttttttttaaatttgtgtagctttttattttattttttattgtactttaagttttagggtacatgtgcacaaagtgcaggtttgttacatatgtatacatgtgccatgttggtgtgctgcacccagaagactggttaatttcaataacctaaaaatccacaaggtgggagygtttcactgaagccagttgttagagaaacgttagaaccaacttcctttttttctgtcccttcttctctgctttcttcttttctcctcctcctcctcctccctttactctccttcttctctctctttctaatcatgaaaacaaacgaaaaaaactatgagcaagagcacagaaaaaagactagcaaagactgcagttattgaaagtatcagatacagaaaataaaataaaataactat

SEQ ID NO: 730692 - DNA, 625 bp, Homo sapiens
ttctcatcctttcccctggagtcaccaacatccattgtatcattctttacctttgcatcctcatagcttagctcccacttatgagtgagaacatacgatgtttggttttccattcctgagttacttcacttagaataatggttttcaattccatccaggttgctgtgaatgccattaattcattcctttytatggctgagtagtattctgtcttatgtatataccatagtttctttagtcactcattgattgattggcatttaggctggtttcatatttttgaattgtgctgctataaacatgcatgtgcaagtatcttttctcatataatgacttcttttcctctgagtagatacccagtagtgggattgccagatcaaatggtagttctacttttagttctttaaggaatctccaccctgtattccatagtggttgtactagtttacatccccaccagcagtgtagaagtgttcccttttcattgcctcctggccaacatctgttatttttttatttttttgtttatggccattcttgttggaggaagacggtatcgcattgtggttttgatttgcatttccccgatcattagtgatgttgagcatgttttccatatgtttgt

SEQ ID NO: 730693 - DNA, 612 bp, Homo sapiens
tcttgatagcgaaaggtagaaaagatagatggtaaatagatagatagatgatagataaagaaaatacatagctgttccagaaaacagaaatggataacttcatgaaccaaaagcagagtaatatactttagaaagggagcaggctggaaaactcacagttgcaaagcaaatagaatttccaactgcctcttgtagccccttcctggaagtagtcacaacccagggtgtttcgacttcttcccctkttttttgtttgtttgctgtttgcttttttgtgggtttttgttgttgttgtttgcttttttaaaaaaaattccctttccctgcttttttgtcacagcagtctttgtcacttcaaacaccacaagttttctttttcaaaaaattatatcaacctttcaattaaaatgcaacatgtctgaaacttgatatctagagaggtgatatggacaaaggagcccttgttactgcacgtttctgttctccagacttcaccttgcacacaagaacagacaatgcacaaaaccacttccttatggactgaaattctgaaatccttttatgactggcgtttcctaacccttcaacttcccctctcccatgctgtgaatg

SEQ ID NO: 730694 - DNA, 612 bp, Homo sapiens
tcttgatagcgaaaggtagaaaagatagatggtaaatagatagatagatgatagataaagaaaatacatagctgttccagaaaacagaaatggataacttcatgaaccaaaagcagagtaatatactttagaaagggagcaggctggaaaactcacagttgcaaagcaaatagaatttccaactgcctcttgtagccccttcctggaagtagtcacaacccagggtgtttcgacttcttcccctgttttttgtttgtttgctgtttgcttttttgtgggtttttgttgttgttgtttgcttttttwaaaaaaattccctttccctgcttttttgtcacagcagtctttgtcacttcaaacaccacaagttttctttttcaaaaaattatatcaacctttcaattaaaatgcaacatgtctgaaacttgatatctagagaggtgatatggacaaaggagcccttgttactgcacgtttctgttctccagacttcaccttgcacacaagaacagacaatgcacaaaaccacttccttatggactgaaattctgaaatccttttatgactggcgtttcctaacccttcaacttcccctctcccatgctgtgaatg

SEQ ID NO: 730695 - DNA, 694 bp, Homo sapiens
agttactggcaagcatctaatttatgtcaaatctaatattattttcctagagtgaaagttttccctgtcttgtcttagtcctaaggaaactttttaagattttctttttcagaagaagatgaattgtgaaagcaaagttgaataacacatgttaaaatttgttgtgaggaarcaaaatgtgtcacacccatttaaaaacacttgatatatatatatatatatatcccaaaaatacttaaaaatgactgaacatcggccatttcttttaacattaaatgttaaagaaaaatttcaagtgttatattttaatcaaaaccaaagcttttgagtaatttgagaggggagaaaaatggagatgggaagcttttgcaggagaattttttgctcagacccagttcaaatttgtgattccatttaggtatattattatttccataactctgaagtttctgaaacaaatgtccttctttttgctgactgtctcagatgtacctagctgtgatggtagacagtggtgttgttaaaatggaagatgaagcatttcaggaagtcacaaaaagcaactggtgttcactgagcatcaatcacattgagcttgacaggcaatgcgtagccatgactcagccatcccctcaaccagaactctccaatactgtgtatcattgcctccattttcatagaggcagtgaccgat

SEQ ID NO: 730696 - DNA, 631 bp, Homo sapiens
caatttcctttactaattcatttaatgaaatctattggtcataaatttttttatgtgtgtatgtctgaaaataatctcattccaccttcattttgtcaacattgtattattacctttttcaaacatccagcaaagttgaaagtattttatggtgtaaacctataccacatagatttgtattttactgcatttgcttgattaatatcayctatctcttcatctactcatccctctagctatcactatattttgattcctttggttcatgtcaaagtaaattgcacagttcatacactttctcctaaatgcttcagcatgtatatcactaaatagatgtttgtaattaattaacttttcttttggttatatgtatatatgtacagtgaaatgcacaaatactatgcctaaagttactgagttttgactaatccttactcctgtgtaatccaaagaaatttccctcatgccccttcccagtcaattcctttcctttcccacccaattcctttcctttcccacccaaagtcaacgactgttctgctttttccattatacataagttttttctgttctagaattgtataccctcttgtgtaaggcttctttaaatcagtataatgttttggggact

SEQ ID NO: 730697 - DNA, 631 bp, Homo sapiens
caatttcctttactaattcatttaatgaaatctattggtcataaatttttttatgtgtgtatgtctgaaaataatctcattccaccttcattttgtcaacattgtattattacctttttcaaacatccagcaaagttgaaagtattttatggtgtaaacctataccacatagatttgtattttactgcatttgcttgattaatatcacctatctcttcatctactcatccctctagctatcactatattttgattcctttggttcatgtcaaagtaaattgcacagttcatacactttctcctaaatgcttcagcatgtatatcactaaatagatgtttgtaattaattawcttttcttttggttatatgtatatatgtacagtgaaatgcacaaatactatgcctaaagttactgagttttgactaatccttactcctgtgtaatccaaagaaatttccctcatgccccttcccagtcaattcctttcctttcccacccaattcctttcctttcccacccaaagtcaacgactgttctgctttttccattatacataagttttttctgttctagaattgtataccctcttgtgtaaggcttctttaaatcagtataatgttttggggact

SEQ ID NO: 730698 - DNA, 631 bp, Homo sapiens
caatttcctttactaattcatttaatgaaatctattggtcataaatttttttatgtgtgtatgtctgaaaataatctcattccaccttcattttgtcaacattgtattattacctttttcaaacatccagcaaagttgaaagtattttatggtgtaaacctataccacatagatttgtattttactgcatttgcttgattaatatcacctatctcttcatctactcatccctctagctatcactatattttgattcctttggttcatgtcaaagtaaattgcacagttcatacactttctcctaaatgcttcagcatgtatatcactaaatagatgtttgtaattaattaacttttcttttggttatatgtatatatgtacagtgaaatgcmcaaatactatgcctaaagttactgagttttgactaatccttactcctgtgtaatccaaagaaatttccctcatgccccttcccagtcaattcctttcctttcccacccaattcctttcctttcccacccaaagtcaacgactgttctgctttttccattatacataagttttttctgttctagaattgtataccctcttgtgtaaggcttctttaaatcagtataatgttttggggact

SEQ ID NO: 730699 - DNA, 572 bp, Homo sapiens
atcttcctacaccccacacaaccaaatgttcaattttcacaaagtgttgttagtcgaggcaacacttcacagtgaggcgtgatgctcacagagctgagttgtagcacgttattaagccactgatagtgcatgagcccaacccaagacactccaaccaacaggtccctccagtggcacatgctgcacttcactctccttgcagcctcctgggagcagctyctggtgaatttttcaactctttctttgtgtccagatacctcactttagtaggatttggagtcataaatgaaatactgagctgagaactagaaagggtgggaagcaatggagtgcagttcattcacttattcactctttcactcactcaacagaccttgcctagctactctgtgccacacagaatattggtgttcttatggaactttagagtccagtggggagatccatattggacaagtacttaaggtcattaaacaatggaagatactagacaggagaactgcccagtgcaatggaagcatatgagaaagggtcccaaagtggcctggggtgtcagaggatgccctccgggg

SEQ ID NO: 730700 - DNA, 630 bp, Homo sapiens
aagcattatggagtgccaatcaataaagggcgggaacactgatattgcccgcccaatctgggcaccagaatctcgcctgtagccatcagacaggacccatccttcctgaccaagcttccagacacttcctggaagagctctttaatttggctcaaatgaaaacaacaaaaatgttccccgtacaaatccatgctgtgaactgagctctatgcagtttaccacacacagttaacgtaaccaagattattttcaaaaaccacaggaaaggtagagtgagatttctcccctatcagagtcactggaacacaacaccagccatgactacagaactgcgtgggtccaatccagtgggaattcctcttctggcctcccctccttcttgttgttctcattccctgcttgtcggtgctatgtttgggtctccttccatcagctcctcatggtctgyagaccacttagagcgtttacaccgcagtggccccgagttttctgtaagcaccaaagtctgacctgctgacacctgaaaaggctgttttgtgctgaggcccaaaatgccacttgctgattattcatcccccagaggacaagattaggtgacaaaagtttagggagaactacagcttccttatc

SEQ ID NO: 730701 - DNA, 620 bp, Homo sapiens
aatcttaaggaccttcagaatgatagtaaatctattctgcctatgctctagacatgaaacaacaaagcctggatgacagcacatctgtttatagcatggtttattgaatattttaagctcactgttgagaaatactgctcagaagaaaagactcctttcaaaatattcctgctcattgacaatgcacctggtcacccaagagctctaatggagatgtacaaggagatgaatgttgttttcatgccttctaacacagcatccgttctgcagcccatacatcaaggagttaaaatttaaactttcaagtcttaatatttaagaaacgcatttcataaggcgatagctgccatacgtagtgattcctctgatagatctgggcaatgtaaatttaaagccttctggaaaggtttcactgttctcaataccattaagaacatttgtgattcatgggaggaggccaaaatatcaacatktaacaggagtttggaagaagtagattccagccttcatggatgatgttgaggggttcaagacttcagtggaggaagtcgctgcagatgtggtggaaatagcaagagaaggggagttaaaagcggatcctaaagatggaactgaatttc

SEQ ID NO: 730702 - DNA, 528 bp, Homo sapiens
ttaaaaagtatggaatgaaatgtgctaatatgttagtaatggttattgcagaccagtgaaatatagataatttttttttctatatacattttggggacatttttcattgaaaaatacgtgttggagataaagatgggaacaatagatactggggactactgggggtcaagggctggaaaattacctattagacactatgctcactacctgggtgacagcgtcattcttgccccaagcctcagcatcacacaatatacccatggaacgaacgtgcacatgtaccccctgaatctaaagtaaaagttgaaattacttytaaaaaactacatgtaatctggaaaatgtagcatatctcatatgatttggctgtgtcctcacccaaatctcatcttgaattttagctcccacaattcccacatgtcatgggagggacctggtgagaagtatttgaatcatagggatgggtctttcccatgctcttcttgtggtggtgaacaagtctcacaagatttgatggctttataaagg

SEQ ID NO: 730703 - DNA, 465 bp, Homo sapiens
ggggggcctaaaagaaaataaagggaagcaacgtggggggatcctgctaatctggccgagactcccaggagtaccccaatattcatcccctccttctcccattgtgagagaatgcttgaaaacttgactcagctgggtacctggctgcccaaaatttwaaaaaaaaatacatttcctggactgcctgcagctaactgtggctacatcacttagttctcatcagtgagatgtaaatacaagtgttgggcagctgccgcaaataatctcctcaagagagagcctgcgtgagcctttgtccttttctccttcctcctgtactctttcaggctgtctgggaagcagatgtgatggctggagttggagcagccttttagactgtgaggtaacttggaaatagaggcttcaaacagtgaagcaaagatagagggactctagagcctggaggattttgtgcaacagaatagc

SEQ ID NO: 730704 - DNA, 465 bp, Homo sapiens
ggggggcctaaaagaaaataaagggaagcaacgtggggggatcctgctaatctggccgagactcccaggagtaccccaatattcatcccctccttctcccattgtgagagaatgcttgaaaacttgactcagctgggtacctggctgcccaaaatttaaaaaaaaaatacatttcctggactgcctgcagctaactgtggctacatcacttagttctcatcagtgagatgtaaatacaagtgttgggcagctgccgcaaataatctcctyaagagagagcctgcgtgagcctttgtccttttctccttcctcctgtactctttcaggctgtctgggaagcagatgtgatggctggagttggagcagccttttagactgtgaggtaacttggaaatagaggcttcaaacagtgaagcaaagatagagggactctagagcctggaggattttgtgcaacagaatagc

SEQ ID NO: 730705 - DNA, 627 bp, Homo sapiens
caggggcccagcagagcatcatttccttcatctccactacagccctctcaggtggtggagcagccccactgtagacgggaggaaaatgaggctcaggaaggtaagccccttgccccaagtcacactaccagcaactggcagggtgagccaggattcaaaccagagtccctcagactgcagagccagcccttgagaaccagtaaatctactggggaatgtccttcccatccccggatatagacctttcctacctggtgagaccaccttcacctcggtgctgcggctgactgcctggctcccctggtaggcactgcacgtgtaggagccctcatccctggcccgcamgttgtaaatgagcagcgtgccatctggggactggtggacacggtggccatcagcctgcacaggtagcccgttcctggaggagagaggacactgggagagccatcaagggcctctggaggtctgggagacagagggaagaggtaatcaaaggccattccagagccaaccgttcccaccccttgagagcaaacaggtggaggacagggagaaatcaagaatgaccaaggtttctaggttgggttactgggtgatgatggtgcccctccaaccttgggagatcca

SEQ ID NO: 730706 - DNA, 478 bp, Homo sapiens
cccaccgtgccggcctgcgtgctggctgtggtccctcaggcttgtgtgctgttggtacctttctcaccagtctggcagtcagtgatccctgttgcatgggggccatggtagtagttttggctacttctgtttgttaaccataggtacaacacaaagcatttgtaaataatgaactccaatcattgccgtttctgcctgcagcctggaattgtctcgccatttaaacgagtattcctaaaaggtgaaaagagtagagataagaaagcccatgagaaggtgacagagaggcgccctctgcacactgtggtgttgtcattgcctgagcgcrtcgagccagacagactgctgagcgactatattgagaaggaggtaaaggtaagtcgtcatgggccacaggacgtgcctgccaaacgacagtgacggtcatgcttgtatccaccagacactcttgagtttataagacacagccacacaaaca

SEQ ID NO: 730707 - DNA, 600 bp, Homo sapiens
ctataagaaggctcctgtgagagtagagtcaaagaaaagactttctagaagcttgagaataatgcccttctcccagccctcccctgcacacctgtcccatgaagtcaggagggtgagacttacaggcattgatcatctggagacttctgaaggcaggagcagggtaagaatcgaggcagagtgcaaagagaatgggaagtactgttccctagagacaaggacttactccgatttgagtcttgcatttctcactgggcacaggagaggccctggtgtttctctggcctaaaatgatggagcatagggtgtagccagtggagcagaggacctgctgccccatggagggcctccaggctgagcaaagggctccccaaacagaaaagaggtggaggcacacacgtctcaaggggcccatgggccgtggctgctctattctggwgaagggcgtcctccacatgagagaggtcagccccccaaataaaactgtgcatggtcacatagcaagccccctgccagctgagactgctgcatctcccaccctctaacagcgtcagtgacagatggggcacaactgggcaggaaccagaatcatcccctctt

SEQ ID NO: 730708 - DNA, 600 bp, Homo sapiens
ctataagaaggctcctgtgagagtagagtcaaagaaaagactttctagaagcttgagaataatgcccttctcccagccctcccctgcacacctgtcccatgaagtcaggagggtgagacttacaggcattgatcatctggagacttctgaaggcaggagcagggtaagaatcgaggcagagtgcaaagagaatgggaagtactgttccctagagacaaggacttactccgatttgagtcttgcatttctcactgggcacaggagaggccctggtgtttctctggcctaaaatgatggagcatagggtgtagccagtggagcagaggacctgctgccccatggagggcctccaggctgagcaaagggctccccaaacagaaaagaggtggaggcacacacgtctcaaggggcccatgggccgtggctgctctattctggtgaagggsgtcctccacatgagagaggtcagccccccaaataaaactgtgcatggtcacatagcaagccccctgccagctgagactgctgcatctcccaccctctaacagcgtcagtgacagatggggcacaactgggcaggaaccagaatcatcccctctt

SEQ ID NO: 730709 - DNA, 577 bp, Homo sapiens
cttacgcacccacatggctgtagaacctgctgtctggccagagcgcttgcccctcctcaccaaccaggcagagagggggtcacagcagacagaggctagagcaagcctttccctgcatggaaaaggagcaccctggtgaccactggagaatggcctacagtccatgaatttaaaaaaaaaaaaarggggggggggttgttgggggaggccaggcgtggtggctcatgcttgtaatctcagcattttgggaggccgaggcaggtggattgcttgaggccaggagttcaagaccagcccggccaacatggtgagaccacgtctctgcaaaaaaatatataaattagctggacgtggtggcacacaccagtagactcagatacttgggaggctgaggcatgagaattgcttgaacctgggaggctgaggttgcagggagatacagattgcagtgagccaagatcacaccactgcactccagcctgggtgacagagtaaggttctgtctaaaaaaaaaaaaaaaaaaaagaaaaagaaaagaaaagaaaaagtggggcgggggcaaggaattttgaataaa

SEQ ID NO: 730710 - DNA, 577 bp, Homo sapiens
cttacgcacccacatggctgtagaacctgctgtctggccagagcgcttgcccctcctcaccaaccaggcagagagggggtcacagcagacagaggctagagcaagcctttccctgcatggaaaaggagcaccctggtgaccactggagaatggcctacagtccatgaatttaaaaaaaaaaaaaaggggggggggttgttgggggaggccaggcgtggtggctcatgcytgtaatctcagcattttgggaggccgaggcaggtggattgcttgaggccaggagttcaagaccagcccggccaacatggtgagaccacgtctctgcaaaaaaatatataaattagctggacgtggtggcacacaccagtagactcagatacttgggaggctgaggcatgagaattgcttgaacctgggaggctgaggttgcagggagatacagattgcagtgagccaagatcacaccactgcactccagcctgggtgacagagtaaggttctgtctaaaaaaaaaaaaaaaaaaaagaaaaagaaaagaaaagaaaaagtggggcgggggcaaggaattttgaataaa

SEQ ID NO: 730711 - DNA, 620 bp, Homo sapiens
attaaaaaaaaaaaaaaaaagaaacactttgggagcctgaggcaggcggatcacctgaggtcaggagttcgagaccagcccggccaacatggtgaacccttgtctctactgaaaatacaaaaattagccaggcatggtggcgggcacctgtaatcccagctacttgggaggctgaggcaggaggatcgcttgaacccaggaggcagaagttgcagtgagctgatactgcgccattgcactccagcctgggcgacagaccaaaattctgtctcagaaaaacaaaataaaacaaaacaaaaacaccaaaacttggctggacacggtggctcacgcctgtaatcccagcactttgggaggccgaggtgggcagatcacaargtcaggagattgagaccatcctggctaacacggtgaaaccccgtctctaataaaaatacaaaaaaaattagctgggcgtgatggcgggcgcctgtagtcccagctactcgggagactgaggcaggggaatggcatgaacctgggaggcagagcttgcagtgagcagaggtcgcaccactgcactccagcctgggcctcagagcgagactccatctcaagaaaaaacaaaaaacaaaaaacac

SEQ ID NO: 730712 - DNA, 482 bp, Homo sapiens
ctggactcgcctggcacttacagaggacaggtagtctcgggcccaggcccgtcggcagccccagtcctgacgaagcccttgcagggcccccatggcggccaccttggccttgatctggggcatgtctgaaggggggatgttcttcaccagctgcygggcccgccacctgggagagggcatgtagtcagacagatgctggccatgtgttcatgtgctccctgagccccctctccacagaggaagctgagccctcagcctggtgctgcctgcctttcatgtcccaacctctgccggcctctctggccttggccccttgtgcctaacgcttgttcctggaaggtgacccagggaccagcagtcgcccagtgtcctcctgttctgagcatgctctgtgcccctccttctggagaactcctactcagccctcaagaccccgctcagatgcagaatccccttacttcccagccctaatgggcctcccc

SEQ ID NO: 730713 - DNA, 600 bp, Homo sapiens
attatgagataggtgttaaaaatagatgtttaataactctactatttcattgtggaagcaacatgaaatattgtgacaactatttaagatgtgtggagaaacactttgaagaaaatgcattaaaatattaggtctttaacatatggaatttgggaatttattctattttataaatgtttttctctattttaaatactttttacaatgaccatacaagatatgtattacaataagtagggtccctgtatcccattatgtaagtccttaaactgacagtgcatggagtgaatctagcccagagacatgctttatttacttgacacagagttgtgaaatcttgaatttgaaggccttttcatgaaacctaaggggttttcaagggagaatttaatgtttcaattactccctattattttgcatttttaaaaaakctattactatgtttctatatttttatatcacctgcatgagcactgtagacatttgagtttgcaacccctctaaaccattgtaactcatttgatctccaaaactatcctgcatttatcttctaaatacttgccattctttagctttacttcaaatagcaaagttttcaga

SEQ ID NO: 730714 - DNA, 510 bp, Homo sapiens
attcaatagattaaatagaaacatgggttaaaatcagacacatttttttttccaaatctagttctcagattcttcagtattctgttttccttagttaaatgcatgactttgattttcctagatgtagagacaattagctgcctccaatattaaataactttgaatgtactccttcagaattttaagtctttctttcgtttcagttatgtatcttacaatgacataaactgctatgggaactatagtaaaattcagtaatgtraaatgtgtgttattcttccaccttcttacatcttgcctatgctcatattcagttaaacaacaattgttgtttttaaaaaacaagctaagtttctataaaattaatttgactatggtgaatctgaataggccaaagcttttagaggcattaattctctttgaatgtaattgtttttctctggttgagagattacttcaacttctacatgctgtgtcgagctataagagaagcaaatgtaggattgtaat

SEQ ID NO: 730715 - DNA, 616 bp, Homo sapiens
cagtagtgtgtccccgcttatctgagggagatatgtgttccaagacccccagtggatgccggcaactacggatagtactgaactctgagtataccatgtttttgcctatatatacatacccatgacaaagtttaacttattaatgaggcacacagtaagagattaacaacagtaactgaataaaatagaacattacaacagtgtaccgtagtaaaaggtatacagtgtggctgtaacttttgcagtttaaggtgcagcagcaaaactagcatgaatttcttttgcctccttcacaattttatagatagaattgttcttaccatagagcttaggaactcaacatactgtttttttttctttccttacttttcacttaaaggaagcactttatggtttctctttggcatatctgcattgccagcatcacaccagcctcactgctcttgtgctttggggscattattaagtaaaataacggttagctgaacacaagcattgataccccgacagttgatctcataactcagagacttgtgggcaggtagtaaaacagtctggatacactaacagagggatgattcacatcctagatgggatggtgcaagatttcatcatg

SEQ ID NO: 730716 - DNA, 589 bp, Homo sapiens
tgatcatcttgtacttggtattgagagagaaatcttaaagagctcagttcagggaataggatataaaaattgctcagtattaaacaatgttaggccataagtcagtggaaatgtgtttttttttttcctacccttttggtaggaaatgtgtatcagtaaaatgttgaaggactttctgtggtgtgatcaagtaaagtatcatcaaggaggaggaatttggggctttgaagactaggtagtgtaagatcrttcagtgaagaatggggagagtatctgaagcaagaggaatatctaatgaagtccacggacagtaagatctgaaagaatttggccacccactcttctaacaccaagagtagagaatataaatgagagtgttatccgagaggaaaaaagagaacgtttggctgatcctagggaatttcggttagtcattaattcaattcagttctcatcaagtgtcagaaaaaaatgccagctaagcaacaatttcagaagattaagacaatggaaagtgctaaagttgtcactgccccactcaccaaatggcagtgaggctgttctatagatggaagctattcagcaaagg

SEQ ID NO: 730717 - DNA, 561 bp, Homo sapiens
cttttctagtgaccaagaaccccatgtattagtccattctcacactgctaataaagatatactcgatactggataatttataaaggaaagaggtttagttgactcacagttcagcatggctgaggaggcctcagaaaacttacagtcatggcagaaggggaagcaaacgtgtcgttcttcacaaggcaggcaggaaggagaagaacaagagcccaatgaagggggaagctcctcataataccatcagagctcgtgagaactaactcactatcatgaaaacaggttgagggaaaccatccccatgattcaggtatctccayctggtcactcccatgatgtggggattaatgttaactacaattcaagatgagatttgggtggggacacggccaaaccctatcaccttgtctgccttttgtcctaaaggcgtcattttacctttattgtactgggcagtaagaaaccttccctttcctcaggagggagacactatttgtgtcgtctcatttctagagctgtttgctttataagcatccttggaagatagtccagaagaaagtg

SEQ ID NO: 730718 - DNA, 613 bp, Homo sapiens
aatagcaagcatgtttaacttgcttctaaagaggtgtcatggtgcagtggaaatctcaccaggctaagcctcatgagtccctggtgtgagtctaacccttaaggaaagttgtagatgatcctgaagaagtcattgcacatccttggacctctgttttccccagaaaaataaaagggagcaggggctagattaaacgtccatcttagatgctttaggggctgcagacattcttaaggctaactggatctaaggcattgggtacaaagctgaattgcctttaggccaacacctgcctagttaggtttctctacatttctctctggagcaggatgttcagctttgggcactggtttgggtcacaggattacaaaactttcaaagatcactacagaaacttagcctttacaagatggacacaacrctcaggagtttccactgtgatggaaactcctctggacttgtgttattgtggtgatcgacccccatatttgtatccttttacacttggcagaatcatgccacgtggttctcccagcaggccctcgcccctgctttgcagatgagaaagttgaagctagaagatgttgcatgatttgcccatgtcatgcagtag

SEQ ID NO: 730719 - DNA, 601 bp, Homo sapiens
gaagaggaagtggagagggagcaaaaataggggattgagaaaaagatgggagaggctgggcgtggtggctcacgcctgtaatcccagcactttgggattaccgaggcaggtggatcacttgaggtcaggagtttgagaccagcctggccaacatggtgaaaccccgtctctactaaaaatataaaaattatccaggtgtggtggcasgtgcctgtaatcccagctactcaggaggctgaggcaggagaattgcttgaacccaggagggggaggttgtaatgagccgagatcatgccattgcactccagcctgggcaacagagtgaaacttcatctcaaaacaacaacaacaacaacaacaacaacaacaacaacaaagacaggagagaggagaaagagacagactgagaagacgcaggaacaaagatgggggctcgggggcacagaggaggggaggcaggctggggactgaggactgggcactgggatatctgttgtcacctccatgctacagcccccaccctgagccagaaagaggcccatcctctcatagcctccttgaattctgcccaaagtggacaaggggggccagggcaaggcgg

SEQ ID NO: 730720 - DNA, 601 bp, Homo sapiens
gaagaggaagtggagagggagcaaaaataggggattgagaaaaagatgggagaggctgggcgtggtggctcacgcctgtaatcccagcactttgggattaccgaggcaggtggatcacttgaggtcaggagtttgagaccagcctggccaacatggtgaaaccccgtctctactaaaaatataaaaattatccaggtgtggtggcaggtgcctgtaatcccagctactcaggaggctgaggcaggagaatygcttgaacccaggagggggaggttgtaatgagccgagatcatgccattgcactccagcctgggcaacagagtgaaacttcatctcaaaacaacaacaacaacaacaacaacaacaacaacaacaaagacaggagagaggagaaagagacagactgagaagacgcaggaacaaagatgggggctcgggggcacagaggaggggaggcaggctggggactgaggactgggcactgggatatctgttgtcacctccatgctacagcccccaccctgagccagaaagaggcccatcctctcatagcctccttgaattctgcccaaagtggacaaggggggccagggcaaggcgg

SEQ ID NO: 730721 - DNA, 611 bp, Homo sapiens
acatgagccttacccaacagaagcctactccagtggtttccaaaatgtgactagcagcttaacaccatctggaaattttttggaaatgaaaattccaagatccgacttcagacctactgtgtcagaaactctgggaatggtgcctagtaatcagtgtttaacaattccaggtgattttgatgggtgcttaagcacactaaagtttgagaatcattgctctaacccctgaatgtacaacatatgctctgwtttaagtaatttcttcagcctatttcattaactctccccatattatcaccaagtgcaatatttcctaaactttgttgatttttcatacatttttcaagtccccattaacctgtattgtaattttctttaaatgttttctaaatctgcacatattttatgctaatttacattaaatttatttaaaaatgaagtatatcaataacaataaaatcagtagttctggcaataaataaaaagtaattataaaactaaatataacaaccagggattatagatatcaaagtgggatatagaagggtgagtgtagttatcaaggtgttaaacaaaggacttttgttttgatagaactattctgtatcttg

SEQ ID NO: 730722 - DNA, 611 bp, Homo sapiens
acatgagccttacccaacagaagcctactccagtggtttccaaaatgtgactagcagcttaacaccatctggaaattttttggaaatgaaaattccaagatccgacttcagacctactgtgtcagaaactctgggaatggtgcctagtaatcagtgtttaacaattccaggtgattttgatgggtgcttaagcacactaaagtttgagaatcattgctctaacccctgaatgtacaacatatgctctgatttaagtaatttcttcagcctatttcattaactctccccatattatcaccaaktgcaatatttcctaaactttgttgatttttcatacatttttcaagtccccattaacctgtattgtaattttctttaaatgttttctaaatctgcacatattttatgctaatttacattaaatttatttaaaaatgaagtatatcaataacaataaaatcagtagttctggcaataaataaaaagtaattataaaactaaatataacaaccagggattatagatatcaaagtgggatatagaagggtgagtgtagttatcaaggtgttaaacaaaggacttttgttttgatagaactattctgtatcttg

SEQ ID NO: 730723 - DNA, 611 bp, Homo sapiens
acatgagccttacccaacagaagcctactccagtggtttccaaaatgtgactagcagcttaacaccatctggaaattttttggaaatgaaaattccaagatccgacttcagacctactgtgtcagaaactctgggaatggtgcctagtaatcagtgtttaacaattccaggtgattttgatgggtgcttaagcacactaaagtttgagaatcattgctctaacccctgaatgtacaacatatgctctgatttaagtaatttcttcagcctatttcattaactctccccatattatcaccaagtgcaatatttcctaaactttgytgatttttcatacatttttcaagtccccattaacctgtattgtaattttctttaaatgttttctaaatctgcacatattttatgctaatttacattaaatttatttaaaaatgaagtatatcaataacaataaaatcagtagttctggcaataaataaaaagtaattataaaactaaatataacaaccagggattatagatatcaaagtgggatatagaagggtgagtgtagttatcaaggtgttaaacaaaggacttttgttttgatagaactattctgtatcttg

SEQ ID NO: 730724 - DNA, 617 bp, Homo sapiens
attttttccctgaggcatccattatattatctctatttcgtttctgattttgacagttctctatttcttagtctaggcaagggcttgttgattttgtttatattctcaagaaatcaactaagttttgtttttttttcttttttcttataattttaattcccaaatattgtttattaaacataattgtatacatttatgggaaacatcgtgatgttttgctatatgtatacaatatggaatgtttaaatcaatctaacaatctacaacctcgcttaccttttttaatggtgatacatttaaaatttactttcttaattattttgaaatatatgattattattgaccctagttamcctgctgtgcagcagatcaaaaaactgattactactttttttctgaaactttgtaaccatcaatcaataatgctccttttcctctctctccactcccactccagcctctggtaagcatcattgtactttctacttgattggctttaagtttatcagattctacatgtaagtgtgattgtgcagtatttttctggctgtgcctatcttatttctcttagcataatgtcctccaggtatatgtattttgtatatatacctctcttc

SEQ ID NO: 730725 - DNA, 615 bp, Homo sapiens
ttgtcttcttcactataagaaaaaaatgcaaaatcaggaaaaatgtatctaaactattacttttacaaaggcaaaaacagcctgtttgctatctaatcagtcctgttgataaaactcaggctgtactgttctcttcagagagaggcaaatggggggagttataagatttgcrccctactgctgttagtagaatgaacaagacagagtaaaagccacaagtggaattgtgctagtatttcctctataattaacccaacacttaggtagcctttaaagtgaaaggagccctccaaatgatggaggcacacaggaggtaattatgtgctttcaataaatgcctgaaagctcacaatttctttggggagatacaatctctggaaaggcttgcattgtcactccaatttcatttatttattttaacaaattgtatgttctgtggaggaactttatttcccaaaaagatgaacgtataataaaccagttctttattttaaaacttatggtgagagaaatttcaattttagataattccattgtctataaagagtctctattaaattagcttaagttccaaaagataatgccacattattattgtaggtagccattataatt

SEQ ID NO: 730726 - DNA, 615 bp, Homo sapiens
ttgtcttcttcactataagaaaaaaatgcaaaatcaggaaaaatgtatctaaactattacttttacaaaggcaaaaacagcctgtttgctatctaatcagtcctgttgataaaactcaggctgtactgttctcttcagagagaggcaaatggggggagttataagatttgcgccctactgctgttagtagaatgaacaagacagagtaaaagccacaagtggaattgtgctagtatttcctctataattaacccaacacttaggtagcctttaaagtgaaaggagccctccaaatgatggaggcacacaggaggtaattatgtgctttcaataaatgcctraaagctcacaatttctttggggagatacaatctctggaaaggcttgcattgtcactccaatttcatttatttattttaacaaattgtatgttctgtggaggaactttatttcccaaaaagatgaacgtataataaaccagttctttattttaaaacttatggtgagagaaatttcaattttagataattccattgtctataaagagtctctattaaattagcttaagttccaaaagataatgccacattattattgtaggtagccattataatt

SEQ ID NO: 730727 - DNA, 599 bp, Homo sapiens
ctttttcctcaatgtggaaaaatagaacaagttaatttctattttattctcaaattttaaagcaggatttatgcaatattttagccagaaaacaataaaatttatgagggaaaggtattgttacagggggaaaaaagtattttacaagttaaaaattgtctaatrccacaattaccctccacaacccccttcccgtgcattcctccacgtacctacaaatctcacaccactcctatgtgtgcaaatggtgtggtagagttcacagtgataggggagagaaattgaagatcaagccttacttaattcttagctcatttggacatgataacacggggagtggaaagaactgatggtcaagagacccgatcatacttcaccattaggtaaataagctacatagacatgggcaatgtcgcttaccaactacagggctttgttttcctcttttgtgaaatgagaggcctttataatagttctaagttctcttccaattctctgcagttgaattcaagtaagatagtctcgtggatagtgtcttattcttctatttcctttctccttcaccatcttttcactctttagaagggctagttaactat

SEQ ID NO: 730728 - DNA, 626 bp, Homo sapiens
gctgggagagaacataaagcctgagcccaccttagggctgcagagtgcagccaaggagtgtcaagtagagatctgcacccagcacttgagtgggagaggagcccacactttcagagcactgtgacggagcatggttgcaattgtgaggaaataggagycaggtgactgagcaagagcctttaactactggctattacactcgggcaccatctactggattacatccgaaacttcaacaccaaaaatattttgctgatatacccccctgtgaaaccaagaacaagaattgagttaaaaataaagagccacataaaaccttgatcttctgaaaacatccagaaaagaattcaactgactgcattcaaattaataccacagttaaacatcaacccacagagatgagaaagaacatcaacctacgaagataagaaaaagccaggacaagaactctggcaactcaaaaatcagggtgtcttttttcctccaaatgatcacattagttccccagcaagggttcttaactcggctgaaacgtctgaaatggcagaaatagatttcagactatggagaggtctgaatgagaaagatcattgagattcaggagaaagtcaaaacctaatccgagg

SEQ ID NO: 730729 - DNA, 626 bp, Homo sapiens
gctgggagagaacataaagcctgagcccaccttagggctgcagagtgcagccaaggagtgtcaagtagagatctgcacccagcacttgagtgggagaggagcccacactttcagagcactgtgacggagcatggttgcaattgtgaggaaataggagtcaggtgactgagcaagagcctttaactactggctattacactcgggcaccatctactggattacatccgaaacttcaacaccaaaaatattttgctgatatacccccctgtgaaaccaagaacaagaattgagttaaaaataaagagccacataaaaccttgatcttctgaaaacatccagaaaagaattcaactgactgyattcaaattaataccacagttaaacatcaacccacagagatgagaaagaacatcaacctacgaagataagaaaaagccaggacaagaactctggcaactcaaaaatcagggtgtcttttttcctccaaatgatcacattagttccccagcaagggttcttaactcggctgaaacgtctgaaatggcagaaatagatttcagactatggagaggtctgaatgagaaagatcattgagattcaggagaaagtcaaaacctaatccgagg

SEQ ID NO: 730730 - DNA, 691 bp, Homo sapiens
aatactattcagccttacaacagaatgaaactcctttattcgtggcaacatgaatgaacctgaaggacattatgtaaagtgaaataagccaggcacagaaagactaacaatgaatgttctcactcatatgggaatctaattgatttcatagaaatggggagtaggatgattaacagaggcagrtgcagtgtggggagcaaggaatgagagagattggtcaatgagtaaaacattacgttagacaggaaaaataaattctggtgttctatttcagagtaaagtgaaaataacagtgttgtgtatatttcaagatcgctccgggaaaagattttgagtgttgtcaccagaaagaaataataaatgtttaaagtgatagacatgagatttcatctcatgcaaagtacacatgcactgaaatgtcacactgtactcctgatacagtttgaatggttttcctctccaaatctcatgttgaaaggtaatccccaattttgaagagggcatctggtgggaggggtttgggtcatgaaggccgatccctcatctcattgggttggtgctgtcctcatgatagattgaatgctcactacatctggtaatttaaagtgtgtggcacctactcctttgttatttggcttccactcttgctatgtgatgtgcctgctcccatttcaccttccaccatgagtac

SEQ ID NO: 730731 - DNA, 691 bp, Homo sapiens
aatactattcagccttacaacagaatgaaactcctttattcgtggcaacatgaatgaacctgaaggacattatgtaaagtgaaataagccaggcacagaaagactaacaatgaatgttctcactcatatgggaatctaattgatttcatagaaatggggagtaggatgattaacagaggcaggtgcagtgtggggagcaaggaatgagagagattggtcaatgagtaaaacattacgttagacaggaaaaataaattctggtgttctatttcagagtaaagtgaaaataacagtgttgtgtatatttcaagatcgctccgggaaaagattttgagtgttgtcaccagaaagaaataataaatgtttaaagtgatagacatgagatttcatctcatgcaaagtacacatgcactgaaatgtcacactgtactcctgatacagtttgaatggttttcctctccaaatctcatgttgaaakgtaatccccaattttgaagagggcatctggtgggaggggtttgggtcatgaaggccgatccctcatctcattgggttggtgctgtcctcatgatagattgaatgctcactacatctggtaatttaaagtgtgtggcacctactcctttgttatttggcttccactcttgctatgtgatgtgcctgctcccatttcaccttccaccatgagtac

SEQ ID NO: 730732 - DNA, 551 bp, Homo sapiens
aggcaaagattttatgacaaagactccaaaagcaactgaaataaaaattaggttgggcttaattaaatggaaagagtttctgcacagcagaagaagctatcaacagagtaaacagcccacaaaaagatgagagaaaatatttgcaaactatrtatctgacaaagatctaatatccagaatctaaaaggaatggaaacatatcaacaagcaaaaaacaaactcattaagaaacggacaaaggacatgaacttttcaaaagaacacatacaagtggtcaaaaaaacatgaaaaaatgctcaacattactaatcattagagaaatgcaaattaaaaccacaatgagataccgtctcaaaccactcagaatggctatgattaaaaggtaaatatataatagatattgacaagattgcagagaatagcaacacttatatgctgctggtaagaggataaattagttcagcctgtggaaagcagtttagacatttctcaataagcttaaaatagaactaccatttgacccagcaatcccattattggatatttaccca

SEQ ID NO: 730733 - DNA, 603 bp, Homo sapiens
tacttttgtggttattcaagggcgtgtccagtgtggcaaacatttgagtctccagatgtgcatgtttctggctgagatcaaacaggacaacgctctgtcttcttggttcagctctcaaactgtaaactagcgttctttctgcaggctaccccggtgccacattttccatgttcttgtgctttttgttgataattttactgtttaaaatggccctcaagtgtaatattgaagtgttatacagtgttcctaagcacaagaaagctgtaatgtgactttacagagaaaataaatgtgttagataacctttggtaccgatttaatgttaacaagtgaaaaatacagtacttccagaaaaaaaawaaagagaaaatttaccaatctgtatgtgagactactcaagaaagtgctaaagtagcaactatagtgtgctatgaagctatggcagagatgagtgactaaatgtgtgcatgcataaaataacagctaataaaaagaaaacaaataacagtcacaacagcaaaaccacagtgggcagcactattgtgaggttgaaagccaaagaaatttatgatcatattatctaagatcaagaaaatcttaaac

SEQ ID NO: 730734 - DNA, 603 bp, Homo sapiens
tacttttgtggttattcaagggcgtgtccagtgtggcaaacatttgagtctccagatgtgcatgtttctggctgagatcaaacaggacaacgctctgtcttcttggttcagctctcaaactgtaaactagcgttctttctgcaggctaccccggtgccacattttccatgttcttgtgctttttgttgataattttactgtttaaaatggccctcaagtgtaatattgaagtgttatacagtgttcctaagcacaagaaagctgtaatgtgactttacagagaaaataaatgtgttagataacctttggtaccgatttaatgttaacaagtgaaaaatacagtacttccagaaaaaaaaaaaagagaaaatttaccaatctgtatgtgagactactcaagaaagtgctaaagtagcaactatagtgtgctatgaagctatggcagagatgagtgactaaatgtgtgyatgcataaaataacagctaataaaaagaaaacaaataacagtcacaacagcaaaaccacagtgggcagcactattgtgaggttgaaagccaaagaaatttatgatcatattatctaagatcaagaaaatcttaaac

SEQ ID NO: 730735 - DNA, 595 bp, Homo sapiens
gtgtttcttatctcttgatcctcttagaatccttttctttttgtctttgagtttcaatagtttgattattatgtgttttgctgaactcctttttgggttgaatttgattggagatctttgaacttcttgtgcctggatgttggtttctgtctccagattagggaatttttcagccattatttctttaaatatggtttttgcccctttttctccttctcctccttctgcaactcctattatataaaggattggtctcccataattcctacaggctttcttcgttctttttcattcttttgtctgtttscccctctgactggataatttcaaatgttctttcagctcactgatatttcttctgcttgagtctgccattgaaacttttaattgaatttttcaatccagtctttttattcttcatctctaggatttctatttggttcttttttattgtttctatttatttgtaaaactcctcatcttgtttgtgtatttttttccaaattttttaaaatttctattggtacttttttttaacttaagaggattattctgaattttttgtcaccccataaatctccatttctttagggtc

SEQ ID NO: 730736 - DNA, 474 bp, Homo sapiens
gagtacacacataagcgaattcacactcatgcagacagatatagaaatacatacatatgcaaattcatatgcatacagatatagaaatacacacggccacataggtatgggtgcgtgtatatttgaacacatgtatgtgtgctagaagcaatgatggcctcggggggaacaagcacamctgggacccagatcttggtttgttgataccatgctctaaaaggaaccagagctccttggagaaatgactgattttgggttagagaagagaaaacataaattgagcctggaatatcttgtgtcagaaagtaagtctttaaaaaaaggagggatggccgggtgcagtggctcatgcctgtaatcccagcactttgggaggccaaggcgggcggatcacgaggtcaggagatcaagaccatcctggctaatacggtaaaaccccgtctctactaaaaatacaaaaaattagctgggcat

SEQ ID NO: 730737 - DNA, 600 bp, Homo sapiens
tgtatttttagtggagacagggtttcaccatgttggccaggctgttcgcaaactcctgaactcaattgacccaacccgcctcggactcacaaagtgctgggattacaggcatgaaccactgcacccagtctgattttacctgttcgtttttcttagatgcctttcattaggttgagaaagcttccctctatatttcyagtttgcctagaactttttatcagacatagatgttggattctgtcaaatgctgttcctgcatgtattgagaggatcatacaaattttcttttagagtttcctggctttcttcttccagttaggcttatattaaaacctcattggatcctccgtaatttttaaatttctctttcatattcttcataacctagtctttatgaggcattctggataatttcactgattctatctgccagacctctaatttgctctttagctttttgtaatcttgtgtttactgtatctgctcttttatttcgacaacttgatttttatttctaaacgttctactggttcattttcatatctacctagtaatttttaagtcacttgtttctcaattttttattccatattttaaagt

SEQ ID NO: 730738 - DNA, 681 bp, Homo sapiens
ctcactttgtctgcaacctgtacctgctacactctattgggctcatatcttagatccgcctttctttcgccctgtcacctgggcagacacccgcttcccagcctataataacgtgactgcttggctaggagggatagatttacccccagtggggtccctcaataatggcacacattggactaaggtgccagatagcctataataacgtgactgcttggctaggagggatagatttacccccagtggggtccctcaataatggcacatattggactaaggtgccagataacactacatataactccactattctcccactgtatgtaaattataaaggttttaacccttactgtgtatctctgcccaarcacaattatggctaaatcatggcaaagaaaatgccttaacagctttagctgcaggtggcctcaaaccaggtaatacaatcaatgccgctttcccaaacattccttcctgtgctaaaggacaaagctgggaaagtaacggatttcactttagctgggaggtctgtcacaggggacaagcccgtggcctccagtgaggcaactataacatcttagactggagcccccacggccatttgcagggcagccttactaatgtcctcacctgtcatgactcaatcagcatttcattgccacgtcccattcccctatgatt

SEQ ID NO: 730739 - DNA, 474 bp, Homo sapiens
ggctggtcttgaactcctgggcttaagtgatctgctcaagtcggcctcctgaagtgctaggattgcaggcatgagccatcatacccagccttaaatcatatattttaaatttagttatatcattttttttttctttttgagacagagtctcgctgtatcatcyaggctggagtgcagtggcacgatctcggctcactgcaactcctgcctcccggattcaagtgtctcttgcctcagcctcctaggtagctgggattacaggcatgcgctaccatgcctggataatttttgtatttttagtggagacggagtttcactattgttgtccaggctagtctcaaactcctgacttcaagtgatccgcccgccttagcttcccaaagtgctgggattacaggtgtgagccactgtgcctggccgttatatcattcatctttgaaaatctaccacctttcattttgttcttcgtaacaa

SEQ ID NO: 730740 - DNA, 474 bp, Homo sapiens
ggctggtcttgaactcctgggcttaagtgatctgctcaagtcggcctcctgaagtgctaggattgcaggcatgagccatcatacccagccttaaatcatatattttaaatttagttatatcattttttttttctttttgagacagagtctcgctgtatcatccaggctggagtgcagtggcacgatctcggctcactgcaamtcctgcctcccggattcaagtgtctcttgcctcagcctcctaggtagctgggattacaggcatgcgctaccatgcctggataatttttgtatttttagtggagacggagtttcactattgttgtccaggctagtctcaaactcctgacttcaagtgatccgcccgccttagcttcccaaagtgctgggattacaggtgtgagccactgtgcctggccgttatatcattcatctttgaaaatctaccacctttcattttgttcttcgtaacaa

SEQ ID NO: 730741 - DNA, 615 bp, Homo sapiens
taaagatctgctttatatgggaacagaggacttaattctgtctgacagaaactaagggcaggctgataaagtctgtatgaatcaagggacatgttaattataagtatggatagaatttcaacagggagcttggataggcaacaaagacatgagatgccagcaaagcaaaagggaagactgtggaggtacatgcagtagtatgtgcaggggagggaagacggaagctagaaacgtggactggagtgagccttgaatgtcatcctaaaaatatggactttatggccgggcacggtggctcacgcctgtaatcccagcactttgagaggccgaggtgggtggatcacctgaggtcaggagctcaagaccagcctggaagacatggagaaatcccacctctactaaaaacataaaaattarctgggggtggtggcgggtgcctaaaatctcagctactcggtaggccaaagcaggagaatcgcttgaacctgggaggtggaggttgcagtgagccaagatttcgccactgcactccagtctgggcaacaaagcgagactgcatcaaaaaaaaagagggggggtacttttttctgtaagaaatccaaaaccattaaggat

SEQ ID NO: 730742 - DNA, 560 bp, Homo sapiens
cctttggatacctggttttcctatcctgactaaaccattatataaactcacaaaaggaaacctagctgaccccatagatcctaaatcctttccccactcctctttccattctttaaaaacagccctagaagctgctccccacactagctctccctaactcatcccaacccttttcattacacacagctgaagtactgaactgtgtggtcggaattcttacacaagaaccaggactgcgccctgtagccttttttgtccaaacaacttgacctcacaattctggggtgccctcatgtttgcatgcrgcagcagctgccgctttaatacctctggaagccctcaaaagcacaagctatgctccacttaccctcaacagttctcacaaccttcaagcattaatatcctgctcacacctttcacacttactgtctgcccctcaactcctccagctctattcactctttattgaaactccaacagtaactattgcccatgggcctgatttcaacccagcttctcacttagcacccaacacaagtcctgaaccacatcttatgccc

SEQ ID NO: 730743 - DNA, 476 bp, Homo sapiens
atttgtttatgatgtgtcttggtgtgcatttatttgggtttattcttcacggggttctttatgccttttgccagatttgggagatttgtagccattatttctttgaatgcttttccagcccctccttctgccttcatcagggactccaatgacatyaatattagatcttttgttatttccctgaggccttgttctgtcttcaagttcactgatttcctctgtctttattctgccctttaacccatgctaaagcttttttcttttgcttagtgcatttttcagttctgaaatgtctgttttgttctctacatcttctctttgctgaaactttatttttcatttgtttcaagcatgttcatagttgctcgtggaagcattttgaggatgcctcttttagaatctttgtcagataattgtaagtctacgtcatcttggtattggtgtctatagattgtctttttttgtttgaaattatc

SEQ ID NO: 730744 - DNA, 599 bp, Homo sapiens
ctttaaaaaaatatttaaagtcggccgggcgcagtgtctcacgcctgtaatcccagcactttgggaggccgaggtgggcagatcacctgagttcgggagttggagaccagcctgaccaacatggagaaactccatctctactaaaaatacaaaattagctgggcgtggtggcgcgcgcctgtaatcccagctactcaggaggctgaggcaggagaatcgcttgaacccgggaggtggaggttgcagtgagccgagattacgccattgcactccagcctgggccaacaagagcgaaactctgtctcaaagaaaaaaataaataaataaaaaatatatgtatatgtatgtatgtgtgtgtgtgtrtatatatatatatatatatatatatatttaaaatcaacttttaaagaatagcaatagtaaaacagtcctgcttacagtgttccttttcctgaagttgtaattgtcagaactatgtgggaagtttgcttttgtcttcaccaaatctgttaaggagccaggttgcagttattctgaatggacagagatgttttcactgaaaaggaggggagtctgagagtctctgtaaggaaaaagtg

SEQ ID NO: 730745 - DNA, 647 bp, Homo sapiens
acccatatatttctttcatatttttattacttctatagtcactttgacttcggaagtcttcacagtctttttactgaaacactgggatggttttcatggaagggaagaagcaggcaggaggttaagaagaaaacaagaacatggagtcctcacttctcaggataaacactcattatactgtatattgccaacgggccggttggcaatgttctgataacttcacagattcatagattattcctgcattttatctttttgttgtgtctaataaccctgaaggctcaagttccctgaaataatcacacagcagcctctyacttattacaacatttagaaaattatattttatcctcccagatacttcttttgcccagctttcaccttcccttctaccctgtcaaaaattccttgagatttttttctctctcctgttcacacagtgaaataatccctgctatgaaatcttgcaggttccccaacccaattctgaatcgccacccccagcatcagtgctgtgcccttgactttgagtgagccgtgtggttccgggagccagggttgccttcctcagcattgtctcctcatctttcctctctcttctattattcagtgaaccaagaaccggtgtgtcttcagccggagaatat

SEQ ID NO: 730746 - DNA, 564 bp, Homo sapiens
gaggtaggtatgtgtcttagggggtattataaaaaagtatgaatatgtcaggggattcataaacctcggggatacaggattttactcatcacccctagaggcaaagacggggatgttctttcagtacctagctagagatattaatttgccatttgcacttttttttttttcaaatttccctgggtacaataataagggtccttgtaaaatatgcagcaccccccaggctggtctcctggaggttttcgstcaaggaatcttggatggagcctgtggaatgcacgtgttagctaccccatgttattctctgtaaaaaacaatttcaagaagcggtgctataaacaccatacctgcaatatggacaccgtgagcacacaagtcaggtgaattcaagccagaaagtatctgccccatctacctgtggatgttgatgctcagctcccaacaatgcatacagatgacactttttccagagaagcaagagagatgtcagaaatggaagcagtcaggcttctctctagcttggcggcacataaagaactcagcgcccgccatggggaagcc

SEQ ID NO: 730747 - DNA, 630 bp, Homo sapiens
actgatatgatttggctgtgtccccacccaaatctcatcttgaattctagttcccataatacccatgtgtcatggaagggatcaggtggagataattgaacgatggaggtgtttccccccatcctgttctcaggagagtttgttctcaggagatctgatggttttataaggggcgttacccccttctgtttggttcttctccttgctaccaccatgtaagatgtgacttcactccttgttcacctttcaccatgattgtgaggcctccccggccatgtggaactgtgagtccctaaaacctctttatctttataaattacctagtmctgtgtatgtctttatgagcagcatgagagcatactaatacacccacaaacataagaataatctgtttcacttaaactacaccagtttaaacatgaatcacatccttaaaataccttcacaacacctagactagtgtttggccaaatatctgggtaccatggcctagccaagctgacacataaaacttacagtctcattacctattaaagaatattggtcaaacaatatagctcctctccccaaatcaattttttttcctaagagttaaaaaatatttgacctcacttccttctctatctactg

SEQ ID NO: 730748 - DNA, 537 bp, Homo sapiens
ttatagttggaggcttcaacaccatgccttcattaattgatagatcaaacagcccaaaaactcaataagcgtaaaattgacttgagcaggactattcatagacttgatctaattgacatttagagaatactccatccaaaaccagaattcatattgttctcaagctctcagggagcattcactaatatattctatgttctgagtcayaaaacacattctaaaaaatttaaattgacaaaaatcatgcaaactgttttcttagaacacaatagaatcagactagtaatcaacagatagatagatggaaaatccaaaatatttggagattaaacaacacatttctaactaacatgtgaattcaagaagtctcaagtccaggctggacttaaactccagggctccagcaatcctcctatctcagcctagaaagtaaccggtacagcttaaattatggcttaaaaatatttttaaataaatgaaatgaaaatacagcttatcaaaatttataggatccagcacaaacaccacttagaaatt

SEQ ID NO: 730749 - DNA, 537 bp, Homo sapiens
ttatagttggaggcttcaacaccatgccttcattaattgatagatcaaacagcccaaaaactcaataagcgtaaaattgacttgagcaggactattcatagacttgatctaattgacatttagagaatactccatccaaaaccagaattcatattgttctcaagctctcagggagcattcactaatatattctatgttctgagtcacaaaacacattctaaaaaatttaaattgacaaaaatcatgcaaactgttttcttagaacacaatagaatcakactagtaatcaacagatagatagatggaaaatccaaaatatttggagattaaacaacacatttctaactaacatgtgaattcaagaagtctcaagtccaggctggacttaaactccagggctccagcaatcctcctatctcagcctagaaagtaaccggtacagcttaaattatggcttaaaaatatttttaaataaatgaaatgaaaatacagcttatcaaaatttataggatccagcacaaacaccacttagaaatt

SEQ ID NO: 730750 - DNA, 586 bp, Homo sapiens
tagagcaatagtaactctcattcatttctagtgggaatgcaacatggtacaaccaaagtggaaggcagtctggcgatttttcaaaaagctaaacataaccttgtcattcaacccagcaatcaagctcctagggacttattcaatagatttgaaaacctatgcacacacaaaacttgcatgcatgcagatgtttctagcagttttaatcagaatmattaagaacgagaaacaaccaatatatccttcaattggtctatggacaaactcttgtacatttataaaaggcaatattcagtaataaaaagtgagctatcaagctgtgaaaacacatatatagcatcttcagttacattaccaattaaagtaagtcaaactgaaaaggctgaattattatgtgattcccattatctgacactctggaaaaggtagagttttcatgggactggaagaggtgaggagggataccaatgggttcacatatggggattctttaaggcagtgaaattcttctgcatgaaaagtgcaatgatggatagagggcattatgcatttattaaaacccttatgtccttacagcacacagttg

SEQ ID NO: 730751 - DNA, 586 bp, Homo sapiens
tagagcaatagtaactctcattcatttctagtgggaatgcaacatggtacaaccaaagtggaaggcagtctggcgatttttcaaaaagctaaacataaccttgtcattcaacccagcaatcaagctcctagggacttattcaatagatttgaaaacctatgcacacacaaaacttgcatgcatgcagatgtttctagcagttttaatcagaataattaagaacgagaaacaaccaatatayccttcaattggtctatggacaaactcttgtacatttataaaaggcaatattcagtaataaaaagtgagctatcaagctgtgaaaacacatatatagcatcttcagttacattaccaattaaagtaagtcaaactgaaaaggctgaattattatgtgattcccattatctgacactctggaaaaggtagagttttcatgggactggaagaggtgaggagggataccaatgggttcacatatggggattctttaaggcagtgaaattcttctgcatgaaaagtgcaatgatggatagagggcattatgcatttattaaaacccttatgtccttacagcacacagttg

SEQ ID NO: 730752 - DNA, 644 bp, Homo sapiens
agaaactgtttttaattaaagagcaaaaactatcaatacccatttttaaacaagaaatctttagaagttatggaaaactctactctagaaacctttttcagaaacaatgacagaggtatagcaaattgtacacttagtttcaacagcaccatctgttggggagctgaaacaatgtcagccatcagagttaggtgggtataatcattttgctaattgtttactaattaaaaaataaagattgtaaaaaagtctttaggaattaacatgcatcacctaatttgaagccatggcaatcggttcaactattmtaaccagtgttaggttgagagaaaatcatcaggaaagatacaatgaattgaaggaggtatattgattataaggacaattgtgctttcaagggctaacctcgttgtccctgaaaacagtcggacttcagattcagtgcattagcactcccacaaccctgatggctgccttctctgggtctagataccaggaatggcacccaaaagaaatacatggacctcagaattcaaagtactgtactaaaaatgtactgtttcttttagcctacttactgaatttactttcttggtcaattttctttgagcttcagctcttctccatgtgtcctcattaaatga

SEQ ID NO: 730753 - DNA, 644 bp, Homo sapiens
agaaactgtttttaattaaagagcaaaaactatcaatacccatttttaaacaagaaatctttagaagttatggaaaactctactctagaaacctttttcagaaacaatgacagaggtatagcaaattgtacacttagtttcaacagcaccatctgttggggagctgaaacaatgtcagccatcagagttaggtgggtataatcattttgctaattgtttactaattaaaaaataaagattgtaaaaaagtctttaggaattaacatgcatcacctaatttgaagccatggcaatcggttcaactattctaaccagtgttaggttgagagaaaatcatcaggaaagatacaatgaattgaaggaggtatatkgattataaggacaattgtgctttcaagggctaacctcgttgtccctgaaaacagtcggacttcagattcagtgcattagcactcccacaaccctgatggctgccttctctgggtctagataccaggaatggcacccaaaagaaatacatggacctcagaattcaaagtactgtactaaaaatgtactgtttcttttagcctacttactgaatttactttcttggtcaattttctttgagcttcagctcttctccatgtgtcctcattaaatga

SEQ ID NO: 730754 - DNA, 629 bp, Homo sapiens
ttaaatgaggcactaagaattagataatattctgggtatttcatcaatttaatttaaggttgtaatgaattttggccacgatgtcaaaagcttctaccgttttttgacatgcaaattgatagccaaaaatatcttatccaagaattgtaaggttgatttttattaaacagttgtatatttatcattgttaagagatttcttaaattcactttcaatcaatgaattaactgtgggttactgatgctatcttattgaagtatgcatccttatatgccattaataatagtatgaaaaagaacagatatattgtttagtaatacatgtagagaattctaagttgctactaccaattaattttttggctgttttgagttactaaaacctattaaaagtttaaacatgctatatccagccaggaagrggcaaaagacagcttccaatgcagatctcagagggagtgtggccctgctgacaccttgatctcaggcttctaccctccagaatgaggacaataaatttctgtttgccactcagtttgcagtactttgttgcaacatccctaggagttaatgcatccgtgaagcctaagaagtatatttcttatgttttaaaattgtgactaattccag

SEQ ID NO: 730755 - DNA, 495 bp, Homo sapiens
ccatccagtctttttgatatactctttctttaaatatgttaccaccactgatgaaacttcagttaaatagctgtaccatggacctgttgaatattcctcctgttcccatttttgatttattatatccactgaaggcatttttatctcccttaatgccttggttccttgataggctagaatctcattgacagccttgatttttcatcatgttttacagctctctttgtaaggagatgtaaaggccttgggagtagaactgtgaatgtatgatgytgatttaataggtcagattattcatggtggggaattcaagcaattaattaggatcctaggcaaagccatttaggtatgtggtggaaagaggggaaaagaaagccttttccatgcttctattcaaatgtttgacttgtttttctagtgggcatcctaaagacatatctcagttttcctaaatttcttaggattatagaagttggtgcctgataaagtattaaa

SEQ ID NO: 730756 - DNA, 587 bp, Homo sapiens
atactcattaagcagtcatctctttctaccctacctgtctctacgaatttgccctttctggacatttcatatacaaatggaataacacatatgtggccttttgcatctggcttctttaacttaccaaaatgttttcaaggttcatccatgttttagcacatatcaatagttcgttccttttcatagctcaataatattccattgtatgcatataacatattttatttatccattcatcarttcatataatttgtttgggttgttttgttgtgattttgatttgtgtttccataatgactaataatgttgagaaaaattttcatatacctgtaggtcatttgcataccttctttggagaactgtctactctgtttctttgcccattaaaataaaattaattatttgtcttcttgagttgtgaacactctttatatattctggatgctagacccttatcagatataggatatataaatatttcacccatcttatgggttgtcttttatcttttttttaaaaaaaatattaccttaaattctgggatacatgtacagaatgtgcaggtttgttacataggtatacatatg

SEQ ID NO: 730757 - DNA, 633 bp, Homo sapiens
tgggagggggcgccggggacacaggccagggagaagtcccgtccccaaggctgcctcccacacgggcgaagccagcacctgcccatgccctctggcctctacagccttgcagggccacagaagggcccagctgctcrcctccacagctcctccttcccaagatacttcccacatatgatgtgactctgacctcggtctcccaaggagtcccatgcattcatctgagcagggcatggggaggcagctggccgtgctgagcaggagggtgtgtggtgccagggcccaggacaggtccgaggtctgcagtgcctgggcagggcctgaacagaacatctcctatggccactgcatgtccgcctccccccacaccaggtttgcccactgaggccagtgccctggacaccagccaagggccctgccatgcccatgacttgtgcagacccaaaagagggacaaggccgagatgatttaatggcccaggggagcctggagacctcatctccagaaattttaccataatgttgcttgaaaaatgccaaaataatacgttttaagtcatttcaaatcagaacataaaaagcaaatgcaaagatacagaagtgcacaagcccctttgaccccaatgcgacctcg

SEQ ID NO: 730758 - DNA, 486 bp, Homo sapiens
cttggcagcaacccagtgacatgggggcgggggtgcagtgtttcatctgtacttgagagcaccagagcccccacaaggcctggccacatcaacatgagtttggcaatctgctgtacaagtgaaagatgtgggctggggagtcrgatggcctgtgtggagtcctggctctggcactgactagcggcaacaccttgagccaatcacttatccatgccaaagttgctttgtctgtaaaatcagaacccttcagaggattcttggaagggctgaatgaggtctcatgatgtgtttagcagggcatgtgttcagcacctggtagctgtgaactgatggagcctggaagggagagagcaggtgcagggcagaccacgcaggaggcttctcgtcaccaatgaacatttattgagtgtccacatgtgcacagctttgaacttggcgatcacagaacgcactgggggagggaagcaagggatcaagagtgtgtgt

SEQ ID NO: 730759 - DNA, 626 bp, Homo sapiens
cttcctcctttctggtactttgtttaaacattctaactaccagtcaccctgaactccgtctcctcaatttagcaactgccctgttatgcttgccttcttcttgcctgtgccacagtctggagcatgcctccagcagaaagccaagggattcatagagctcacctggtttgtttcctttcagggatcatagtcctgcactgcctgttgtccagtgtctaaaaacagttgctttatatattttgtctagttttctagttattcatggtgggaaggcaagccccatagcaattccttcttcaagagcagaagtggaagttgtattgcatttttaaaaattaaataatatatcagcttasaaaaaagcacagataattttcatctgtgttgacctcttaagtatgagaaaatagttatgagaagaatgaaggaaaattgatataaaggtaaaaatagtagttactgataaaacaatttgatttcaacaaagtctgttcactcagttagctgttaccgagattcttactattggtgcctgtgtggaaggataaataaaaatgagggggtatttctgtatctgttggtagcttgatttttttttcgtagttggtattcttcatctttttttt

SEQ ID NO: 730760 - DNA, 488 bp, Homo sapiens
gatccagacccatagacacagctgccagctgcgtattttctccagacatctcattgcagctgtctgaaattttccaagtccaacactgaactcaacatctcctctatccccagcaccaaccccaacctgcttctcctttgctctgtagtttcataaatgacaccaccctttttcaagttcaaaacttgstagtcatcccagaagagcgtaggtcctttccttaacccccacaagctaatccttatggagtgttgccatttctaacccttaaacatccacccacagaaggtatgtggtggagaattgaggcaggtatcccagagggcacatggcaccctgtctcagcaccttaaactaccttactcttactcatagatcagtggctctcaaagtgtggtcccttgagcccaggagtttgagaccagcctgggcaacacagccaaagagtggttcctggaccagcatcaccaacaatatctgggagcttg

SEQ ID NO: 730761 - DNA, 521 bp, Homo sapiens
gtggccgccaagcccatgcccacccggagctgcagctggcccgcaagcgccacgcgcagccctggttctcgctcgtgcctctccccccacacctccctgcaagctaagggagcgggctccggccttggccagcccagaaaggggctcccacagtgcagcggtgggctgaaggtctcctcaatttccgccaaagtgggagcccaggcagaggaggcacctagagcgagcgagggctctgaggactgccagcacgctgtcacctctcaccatgatccgtactatagayttctccttccaggattactatgatgtgctcctgatagaactccctgctttaacccttcaccctcaaagtcgattctcaacacaacagccagacggaacgtttaaatcataagtgagataacgtcattactttacacagcacaaaagacccctttgcattcatagggaaagttaaagttcctaaaatagccaacaacatcctacgacactctaaccaccactatcccgagctacac

SEQ ID NO: 730762 - DNA, 630 bp, Homo sapiens
tatgtgcttaacaatgcagatgggaagagatataaaacatattttctgatctcaatgctttttcaattaggttaaggtaagcagggaacattttttaaataattaataaaatgatattgcatattccaagatctgtataaagttcctgaggacatagaagaagagaaagctctgcataytgtggtagagagaaggcacttcatgaagaagcaagaaacggagtttgtttgaagaatgggtccagttaagacagcagaggaatacttaaaatggggaaatggtaagagcaaaaggtaaagatgtgaaagcaatatggcattcaagtgacagcaaaactggtttccttctgaagtttgattcaattagaaacagagaggctttggaacctgaaatgacaaagcaagattaaacttaattttatagacaatagagagccagcaattgatcagggaaatacaacaaagtattatttgattgattgtatttttttcatgaatttagactatatgaataattaagtaggatgaatttaaaagtggggataacaattaagtgtaggcattggtttaatagtacccttaatagagctacagggcagatttgaattatagtttgaaaagctaaacaatt

SEQ ID NO: 730763 - DNA, 593 bp, Homo sapiens
gtagtaagccaagattgcaccactgcactccagcctaggcaacagagcaagactctgtctccaaaaaaaatttttttaatacataacttatcaaaatttgcaggatacaagaaaataagcacttagatggaaactcatagcataaaatacatatattagaaaagaataaagatctaaaattaaaccaattgtttgagatgatcaagtggtatgatacaattattttaacatctgtcccaaatgtcttagaatcacaactcactattgtcagaacaaggaatcatacatacaaaaaataatcaagaactacaatttttaaaagctgtaaaggacaaaaaattatcytaatttaattgtcattttggaaggaaaaaataaagagaaacaactagagccaagaacaaaattaaataaagtaggtgatcagaaaataatatacacttgccagtaataactcactatataatataatagattgatattcatattttcaacagcaataaaaaataaatatagaaataatttaacatgattttcaaaaaaattcttttctaagatttgtaaagagtttgaataaattaataaaagagtca

SEQ ID NO: 730764 - DNA, 593 bp, Homo sapiens
gtagtaagccaagattgcaccactgcactccagcctaggcaacagagcaagactctgtctccaaaaaaaatttttttaatacataacttatcaaaatttgcaggatacaagaaaataagcacttagatggaaactcatagcataaaatacatatattagaaaagaataaagatctaaaattaaaccaattgtttgagatgatcaagtggtatgatacaattattttaacatctgtcccaaatgtcttagaatcacaactcactattgtcagaacaaggaatcatacatacaaaaaataatcaagaactacaatttttaaaagctgtaaaggacaaaaaattatcctaatttaattgtcattttggaaggaaaaaataaagagaaacaactagagccaagaacaaaattaaataaagtaggtgatcagaaaatartatacacttgccagtaataactcactatataatataatagattgatattcatattttcaacagcaataaaaaataaatatagaaataatttaacatgattttcaaaaaaattcttttctaagatttgtaaagagtttgaataaattaataaaagagtca

SEQ ID NO: 730765 - DNA, 709 bp, Homo sapiens
ttaagttggatccctaccttattccatatgcgaaaattaactcaaaattgatcaaagaaaaaaatgtaggagctaaaacaaaaagtcttaaaggggaaaagtttaatgacattaaattttgcaattatctcttggatagggcacccaaagcacaggcaacaaaaggaaaaaataaataaagcagacttaatcaaaattcaaaactataacactatcatcagagtaaaaagcaactcacagaatgacagaatatatttgcaagtcatatctgataagggattaatatccaaaatatacaaataactcctatagtttgacaacaaaaaacaaccwgattcaaaagtgagcaaatgtattaagacaattcttcaaagatataaagatagtcaataagcatatagaaagacactgaatctcactaatcattatgagaatgcaaatcacaccacaatcagatgccactttgtactcattagaatggttattatttaaaaaagaagaagaaaataacagatgttgatgagcatgtggagaaactgaaaccctgtgcattgctggtggaaatgtaaaaataatacaaacacagtaaaaaatagttaggtgattcctcaaaattgaaaatagaactaccatatgatccagcaatttcacttccaggcacatacccaaaggaactgaaagcaaagatgaaaacagatacttgcacacc

SEQ ID NO: 730766 - DNA, 614 bp, Homo sapiens
ttaattttaatagacttagtaaaaataactgcaagcttgtgctatgtacaaacacaatttgtatgaatgagtcaaggaatcattgcacataacccaagaggagtttctgcaggcaagcagaattcacagggctcgtggcaatcaggaaggactgaggaggctctcatggagtggagggatttgggattaaggctgtgaagtccagtttcactctacctttactatgtaagtactcttggaaaatgtaccaagcatcagtttgttatctgcacagagaaggtaattctaacaaaaatatcaatttaaacaaccacagcttttgtgcactgactacttctcaaggactcactaacttatttattgtaacacaagargtagatgagtcagtggggaggaaatggggcttgaactcaaagtgcctctatctcaaagagtaatttgaatattttccatgttcatggaagcagctatagggaggtgtgaaaatctatctgtgaagagcaagcacttcttgagaagaatgggatccacatgaaaaaacagactctcatggtgttcatgaaattgaacaaagaccatgctatacacagcaggactagattgtaaatcaaaca

SEQ ID NO: 730767 - DNA, 628 bp, Homo sapiens
gttagtgagtctatgggccccaggacaagaagtccttaaacctaaacactcaacacactttttttttttttaaaaggcttgtgcttttctgacatttaataaacctaaattcaacatgatggtggcgaagtcataaaatactttgccaccatgctaagtgttcttaaaataagacacattcttctaatgtcacattgagaaatagagaactaacatcatcatatattggctactgcatagtaaataacaaaatgttgtagagcgttaaataaaaatcatcacagtwaaaatatgcttctgtgctttttttgccttgtcctgaaacaaaattattaattagtaaaaatttgagtttttaaaatctatctggcttttcaaattttaacattaatataatgtaatataaattgatgtattttatattacattgtgagttaaacatttctaagtatttggccatgttatgaaatagtaaatagtaatatagcatgtataaaatgaaatagtcacattttctcttttgaaaatttcaaattttcataacctttttgttcaagtaggttttgtacttaaaatatatatatatttaagtacaaatatatatatatatttaggtacaaatataagt

SEQ ID NO: 730768 - DNA, 628 bp, Homo sapiens
gttagtgagtctatgggccccaggacaagaagtccttaaacctaaacactcaacacactttttttttttttaaaaggcttgtgcttttctgacatttaataaacctaaattcaacatgatggtggcgaagtcataaaatactttgccaccatgctaagtgttcttaaaataagacacattcttctaatgtcacattgagaaatagagaactaacatcatcatatattggctactgcatagtaaataacaaaatgttgtagagcgttaaataaaaatcatcacagtaaaaatatgcttctgtgctttttttgccttgtcctgaaacaaaattattaattagtaaaaatttgagtttttaaaatctatctgkcttttcaaattttaacattaatataatgtaatataaattgatgtattttatattacattgtgagttaaacatttctaagtatttggccatgttatgaaatagtaaatagtaatatagcatgtataaaatgaaatagtcacattttctcttttgaaaatttcaaattttcataacctttttgttcaagtaggttttgtacttaaaatatatatatatttaagtacaaatatatatatatatttaggtacaaatataagt

SEQ ID NO: 730769 - DNA, 643 bp, Homo sapiens
aatgtcctttaatgtttctttttccttttttttttttttacaggtagtcactgtattttattgaaaagcattgatatatatttttcttctctgcttgaactgaacacagtattgcccagttttaaaacaaaacagaaccaaaacattccaaaaatgtccacagactcatgcctcccactgtgtgccatttctttctctctcccattagtgtttcttttcatacagttctgctagcaatgaactttattgtattttattattctggaaatgtctttatttctcyttaatttttgaaggatagttttttttttctgaatataacaagcttacctgacagttttttttttttccccacagcactttgaatatgtcatcctattatcttctggtcttcatagttttcaaatgagaaatcagctgttaattttgggagaatcccttgtatgtgctgtgtcatttctgtctttggtttttgtcagtttatgatgtgtggatcttcttcatttggtactacctatagtttttaagctccttggatgtgtagattagtgcatttcatcaaatttaggaattttttttgacaattttttttaagtattcttgttgcaccttttattcttttctttgattctggaacttccat

SEQ ID NO: 730770 - DNA, 611 bp, Homo sapiens
ataggtgaatttaatgttttgaactcctagtgactaaaatcactttggagactagaaatttctccttggtcccccttcttagtttcgattattatttcttctaggtctttgagaatcatataattgcaaattataaagctatttagaataatgaggaagcacaagcattatttctatacccatagggaatttaagctrattcatagccctgcaatgcaagtatctgcttatgttacagatgagaaaactgaggctgagagagctttaatgacttgttcattaatgacttgttcatagagaacagttgaggaaaactggtgcatgaagctgaatcttttgactgcaaaacctgccctcgtttctcctgcatccagcccagtccagtggctactgtttatattaattattatttcttccaagttgttaaaggaaatagctcaaagaacagtacattcttgatcgtagtgaagtttccttccaagcctttctgaatcgtgcagaatgtttccctgatgttgccacgagtaagcacagctcccaggagcggtggccgcaggcttgttcccgtgtgaacgatctggtcctgtttcatggggttggtctaagttctc

SEQ ID NO: 730771 - DNA, 610 bp, Homo sapiens
gggtttaatttgagttagcatcctattctgtcctatttctataccttccctggacacacagactctgacacagtagagagcattttactcttttcagatggctgaatctaagattcagagtgggggtggaattggctcaattaactatttacctgtttttaacrtaaaattgtcaaacttgaaaatgcaggtcctgtattatttcaaaactatttcagaaatagtaaaaaaaaaatttgctttttggaaactaccagatattataagatcatgttagacttagtcttatttcaataaatagtgaaaagtagtatcccatggagctcttatcccttttggtggaaatattaacacctcaccccagcattattcatgtcccattatcttttacctttcacatatctgtgcttataacacatctatgtattttttagtatcaactcaggtatcattatttttgagtactttttaaaaaagacattaaaaacaattccaaatgataaaaccatggaactcttagctatttaaacttttgtataaaaatgcaaatttttgtattaattgaaataaaaccaacttgtattttgaggacaagaatactcttgacaaa

SEQ ID NO: 730772 - DNA, 643 bp, Homo sapiens
caaggccacctggttcaacaccatcatataaaaacccgttgtatttgatacatcagtggcaaacaaaaagaaaatgaaaatttaaaaatatgtaatttaacattaaaaaatcaaataactaagaataaatctataaaaaagatgtaaaatatttataccgaaaagtataaaagatagttgagaatatatatgttttataaatatgtatactaatttctatttgagacaaggtcttgctctgttgcccaggctagattgcagtggcgcaatcatgactcactgcggccttaacctgccgggctcragcaaacctccacctcagcctcccaagtagtggtgtcccggaccaaactgagggtcaggctgctatttctcgtggccccaaaataagatgcagatgaactggggaggaagatagtttttatttctgcaactggttacagggagaaggcctggaaattatcaccagaccaactcaaaattacaaagttttccagaacttacataccttctaagctatatgtctacatataagtgtgcattcatctaaaggcataagtgattaacttcttttaatctgtaactaaggtctgagtcctgaagatcttcctctggtgcctcagtaaatttacttaatctaaat

SEQ ID NO: 730773 - DNA, 574 bp, Homo sapiens
gtaaaatggtgatgtaatcatatctactttatagaattgctgtgtggattaaattttccacgtgaaatgtatagaataatatacctatacatttcacacaataatatacctatacatttcaggcacaagccaccacacctggccataccccttatcatctttaaaacaccttacattaaatgacaggatcttcaggaaaatatctactgaaaagtgatatatccttagccttgcacttacatggaaaactttaatctaggacaatgggcatttccttgtccccaagcagcacagaaatccagagggtccagcctgagacagatgccagggtgatggtgagagtctggggagggtattttccttcataaggttcttcccaggcctggatcagarggggcagctgtggattccccacagccaacatattgaggaagattcagccctcactagggatgttctgaggtcatgggagactttgtgaaagttggaggatgggctcagctacctcctgcttctgcttcctccatagtagtcagaccagaagaaaaaaaaagtataatgtgtgtttttcctc

SEQ ID NO: 730774 - DNA, 594 bp, Homo sapiens
tattgctatattacacttgagaaaattgtttttcttataaatatgaatgaatgtttaggtagcagtgagattaaccatttgtttgtcacatttcaggcaaatgaattccaaaatgctgttttccattttgttttaattccgtgactattttttttcttccactggacagatattttaaacttgtatgaatcccaagctgtcagtctttccattttcatttcttccctgctttaaagtgtaaaaagatattatccctcagaatacttataaatattctattytgttttgtgttgcttttctatgactcttttatatttcacccttccttctagagtttattttggaatatggttcaagtttgcatcttgtgttccaaagatctgtccctctttttagagaagagctttttcaaaataatcttataaataacccttctctttctcttatttagaggtgctaaatatgttacattttatgctttttgtatataagtaggcttattttctctgtggtgttcttttggtctgtatttctttttttttcttcttcttgtcctttcttggttttgtagaaattactaaaaatgattttttg

SEQ ID NO: 730775 - DNA, 642 bp, Homo sapiens
ttctgcctcacagagtctggtcaggggaattcttgtgtaaggacaaattgtggcatggataaaattgatggaaattatttatgagttaaataaaaataaagaaaggaatttatttatgatttcaacaaatgttttctagggttttgtagaaagccatgcacaggtactatgggagctataacagatgtgtatgacacagtccttgtactcatttgattttattcattcactcagtaaatactcgtcaatcagctcccacacaccaggcactatgttggaggttgaggttataagggggagacagatgataaactgggaaaaataaacacgagctaattatagattgtgataaatgttttgaagtaaatgaacaggtgctaacatacatctgacccttaaaatccctgggttttacatctgcaaattcaaccaactaaggatgraaaatactagaaaaaaaataaaaataaaaaatagcaatacgacaataaaaaatacaaataaaaaaacactacagtataatgactatttgcatagcatttgcattgtattacatattataagtaatctagagattatttaaagtatccaggagatgtgagtaggttatgcgcaaatactataccattttatacaagggac

SEQ ID NO: 730776 - DNA, 594 bp, Homo sapiens
tattgctatattacacttgagaaaattgtttttcttataaatatgaatgaatgtttaggtagcagtgagattaaccatttgtttgtcacatttcaggcaaatgaattccaaaatgctgttttccattttgttttaattccgtgactattttttttcttccactggacagatattttaaacttgtatgaatcccaagctgtcagtctttccattttcatttcttccctgctttaaagtgtaaaaagatattatccctcagaatacttataaatattctattctgttttgtgttgcttttctatgactcttttatatttcacccttccttctagagtttattttggaatatggttcaagtttgcatcttktgttccaaagatctgtccctctttttagagaagagctttttcaaaataatcttataaataacccttctctttctcttatttagaggtgctaaatatgttacattttatgctttttgtatataagtaggcttattttctctgtggtgttcttttggtctgtatttctttttttttcttcttcttgtcctttcttggttttgtagaaattactaaaaatgattttttg

SEQ ID NO: 730777 - DNA, 590 bp, Homo sapiens
tgcaactatctccacgatctacttccagttttcttattcccccaaatagcgacccagtgcccattaagcagtcacttcctattcctccctcccaccaaacagtgaaggctgccaatctactttctgtctctatggatttgcctattttggacatttcatataagtggagtcctgcagaatgtggctttttgtttctggcttcttttattagcatacagtttatgaggttcattcatgcatcagaaatccattgcttttcttggtggacatcccttttattattttttttgagacagaatctctccytgtcacccaagctggaatgcagtggtgtgatcttggctaactgcaacctctgcctctgggttcaagcaattcttctgcctcagcttcccgagtagctgggactacaggcatgcaccaccatgcccagctaatttttgtatttttagtagagacgaggtttcaccatgttggccaggatggtctcgatctcttgacctcgtgatctgcccacctcggcctcccaaagtgctgggattacaggcatgagccactgcgcccggctgacatcgtttttaaagtggttc

SEQ ID NO: 730778 - DNA, 594 bp, Homo sapiens
tattgctatattacacttgagaaaattgtttttcttataaatatgaatgaatgtttaggtagcagtgagattaaccatttgtttgtcacatttcaggcaaatgaattccaaaatgctgttttccattttgttttaattccgtgactattttttttcttccactggacagatattttaaacttgtatgaatcccaagctgtcagtctttccattttcatttcttccctgctttaaagtgtaaaaagatattatccctcagaatacttataaatattctattctgttttgtgttgcttttctatgactcttttatatttcacccttccttctagagtttattttggaatatggttcaagtttgcatcttgtgttccaaagatctgtccctctttttagagaagagctttttcaaaataatcttataaataacccttctctttctcttatttrgaggtgctaaatatgttacattttatgctttttgtatataagtaggcttattttctctgtggtgttcttttggtctgtatttctttttttttcttcttcttgtcctttcttggttttgtagaaattactaaaaatgattttttg

SEQ ID NO: 730779 - DNA, 690 bp, Homo sapiens
accagttagaaataacgtattccctattttctaatatgtatgaggtaacatgttcacacttatttatttattaaataaatgagaaaaactaaaaattagtgagatataagcaaagttcataaagatgaataatgaaaacaagggaaattaatctgtcattgaaagtgacttgtaacctaaaaattcaaattacatgaaaaacagtaattcattaggaaagagataaatttatgagaagtaacaaataagactcttgtagtatttgataacccacaaaatgaagatgagcaaattatatgaacacattagaaaaaatgtttaaaattcttcctcatttgacataaaatattgatatcaatgaataacgtgtatttatatatatacacacacacgttattcatttatatataaatatatrtacacacacattattcattgatatcaatgtgtgtatattgatatgtgtgtatatcaattattcattgatataatgcatgtatgtgtatatatgtgtgtgtgtgtgtgtgtatatatatatatacatgtaaaattacctgcagggtttgtcaaaacacgtcttgtcatgctccgcccttggagaatttgaatcatcaggcctggattgggggtgtgtgaatttgctgatataattggttcccaagtgatgttgataccactgattcaggatcc

SEQ ID NO: 730780 - DNA, 452 bp, Homo sapiens
cttcagagaaatggaggaaactattaagtgcacagtaacacaaatcatggaagtatgatgagaagaaagagaccaaaaaaaaattcaaataaataatggctgaaaaccccaaatttgatgaaatgcattaatgtatatctgtaaaaagaagaacaaattccaagtgtatgctaagtgtggggatccacctccagacacattctagcaaaatgttgaaagacaaagtgcaaatcttgaaagcacagaagaaaaacaactcatcacatcatagggaacaaataagattaatagttgacttttcattaraaacaatgaaagccagaaggcagtggaataatattcaaggagctgaaagcaaaataattgtcaagtaagcatccaatattcagcaaaactatttttataaaagaaggcaaataaagacattgccaaataaccaaaaacagagtatt

SEQ ID NO: 730781 - DNA, 450 bp, Homo sapiens
atcccaccctctcctccccgcaagcacccgctcacatggccatgtccctggcctcgcctgggctcagagcctcctccggccccacgagcttcacagctgagaagtggtcctggagctgcggccaggagtcagcgatgtggggttcatggaagacctcctgggaggggaagacatagggggatgggctcagagggcagggaggcggcacctgagggatgggggtgcrggaaggagatgggggtgggggcacgagagttctgatcagggcagggaaagggtccctcaggagaggctccaacaggggagtctcacgttgttgtgcaggaaaagggtgaccctgtcggggggatagtccaggagtagcagccgctgcaggaagcggggcagaaacggagtaggctgttccacaaacacggccagaaacacccgggggggaggctggaagatgca

SEQ ID NO: 730782 - DNA, 436 bp, Homo sapiens
gccccaggatcttgggaaaaaggagcccactggcacccagagttgtggcaccttctgcgggtcgcctttttcttttgaaccagaggtcgctggactgatcgcagacaattggctcttttattgcattccgctgggcctctctctgtcaagccctggggaaagatgactttaccaccagcccccaagctggaagtggaatttcgggtttcttaatgggtgcgagccacattcttctcctctaaaaacagtttgaggactttccccacttacccctygccttagtttgggggcaggaagcaggaggagacggggactgtggctggcgcttccctcaccgccccttgggaaggaccacacaggcccaaggggacgggtgaataaccgagaacaaagtcctaataaaatagtcacttttatttcttagcaaaactatttc

SEQ ID NO: 730783 - DNA, 611 bp, Homo sapiens
ggtgcggtggcacacccattagtcctagctactcaggaggctgaagcataagaattgtgtgaacccaggaggcggaggttgcagtgagccaagattgggcccctccattccagcctgagagacacagcaacactcttgtcttgataaataaataaataaataaataactgtccaggtgtggtggtacagccctgtagtcrgagctaatcaagaggctgaggtgggaggatcgcttgagcccaggatatggaggctgcggtgagctatgatctcaccactgcactccagcttaggggacagggcaagtctgtctcaaaaaaaaaaaaaaagcaattgaatacactgatattttgccaggaccctgccttctacaggcatctagtctaatgggactgggagtaatcaggggagatgacctaatcccaatgtcacattataataggatgtaactggagagctacgggcatgcagaagttggaagacgagggaaggcatcacagaggctgtggggtgaaccgacttcaaggaatgggtccttcccttcagaaccacatgtgtgcgggacacccagacagaaaacacaaatgcaaagtcaagtggagggcatttgg

SEQ ID NO: 730784 - DNA, 622 bp, Homo sapiens
ctggtcatgaaaactcaatgatatcccactgcatatatgttagaatatggaaacaaacaaacttaacaataccaactgttgacaaggatttgaagcaactaaaacttttatgaattcctggtgggaatgtaccatagtaagatctctgaaaggcagtttggcatgcacttaaccatatgactcagcaatctcacccctatgtatttattcaasgcaaatgaaaacattgtctacccaaaaacctgtatgtgaatgaatccttttagcagctttattcatattcacccaaaactagaaacaaccaaaatttccatcaactagtgaagtgataaacaaattgtgatacattcatgcaatggaatattactccaaacaaaaagaaacaaactatgtggactgacaaaatgtaaccatcatgctaagaaaaaaaacgactgaaatcataaacattgtatgaatccatttaaatcaggggtcccccaacctccaggccacagactggtagtggtctggggcctgttaggaactgggtcacacagcaggatgtgagtggcaggccagcaagcattaccgcctaagctctggctcctgtcagatcagaggcagcattagattctcatag

SEQ ID NO: 730785 - DNA, 622 bp, Homo sapiens
ctggtcatgaaaactcaatgatatcccactgcatatatgttagaatatggaaacaaacaaacttaacaataccaactgttgacaaggatttgaagcaactaaaacttttatgaattcctggtgggaatgtaccatagtaagatctctgaaaggcagtttggcatgcacttaaccatatgactcagcaatctcacccctatgtatttattcaaggcaaatgaaaacattgtctacccaaaaacctgtatgtgaatgaatccttttagcagctttattcatattcacccaaaactagaaacaaccaaaatttccatcaactagtgaagtgataawcaaattgtgatacattcatgcaatggaatattactccaaacaaaaagaaacaaactatgtggactgacaaaatgtaaccatcatgctaagaaaaaaaacgactgaaatcataaacattgtatgaatccatttaaatcaggggtcccccaacctccaggccacagactggtagtggtctggggcctgttaggaactgggtcacacagcaggatgtgagtggcaggccagcaagcattaccgcctaagctctggctcctgtcagatcagaggcagcattagattctcatag

SEQ ID NO: 730786 - DNA, 622 bp, Homo sapiens
ctggtcatgaaaactcaatgatatcccactgcatatatgttagaatatggaaacaaacaaacttaacaataccaactgttgacaaggatttgaagcaactaaaacttttatgaattcctggtgggaatgtaccatagtaagatctctgaaaggcagtttggcatgcacttaaccatatgactcagcaatctcacccctatgtatttattcaaggcaaatgaaaacattgtctacccaaaaacctgtatgtgaatgaatccttttagcagctttattcatattcacccaaaactagaaacaaccaaaatttccatcaactagtgaagtgataaacaaattgtgrtacattcatgcaatggaatattactccaaacaaaaagaaacaaactatgtggactgacaaaatgtaaccatcatgctaagaaaaaaaacgactgaaatcataaacattgtatgaatccatttaaatcaggggtcccccaacctccaggccacagactggtagtggtctggggcctgttaggaactgggtcacacagcaggatgtgagtggcaggccagcaagcattaccgcctaagctctggctcctgtcagatcagaggcagcattagattctcatag

SEQ ID NO: 730787 - DNA, 541 bp, Homo sapiens
attccactattagagtatgtgaagtttattttttggtaaccatcctaaatttacacttacaaaagttatttcttttcaagtgaggtacaaataatttttcttaaatgtagaactttatcaccagtaatagcaagaaattttaaaataagctttgacaatgactgatattttaggttttagatcaaaggacaatttttagtattcctcaatgactgtttcttcaaccagtatcarccacattgtcaataatgcatgaattaaaggggtggcctaataatgtttatgtgaattcactgaaagacaagaaagtataatgtctttgcatttcacaaatatttggataaacactgcccaaattcttaaagaattttatattgtgcacttttgtacaatagttttgtggaccctgcaaaagtctatgtgttattttaagcatagactaaagaacataaacaaacctttagcttccttttagcttattgtgaatggcttaacaatactaaaagagtttaagtaagttaataggtaaggtgaattaaat

SEQ ID NO: 730788 - DNA, 519 bp, Homo sapiens
agcgattctcctgcctcagcctctcagagtatttttattttttagtatatcggaaggcttcatttggcagcaggggattgcactgttaaactacgtgctatagcatatagtgttagggaatggatttgggatttaacttgacaaacagaaaacatgtggagtgtcttgaaaacttaagcaagtatctgagacaaatgtcaccaacataactgagacctaataaaaaaaatcactgatttatatcattttaagatatatttggraacttatttttcaccaaaaataaagtgtcaaactggctaaggatcccagtcttctgctcattataaatgtttcacctgtgagagaatgtaagcagtaattagaggttgctatttattgaaaaatgggaaaaaaccctctattattcaggattctgctacattttaaatgaagagcatcctgcgaatagaatgctgttattgttgtagctgcccacttatatgtatttggattttactctgctcaactaatcaaaac

SEQ ID NO: 730789 - DNA, 602 bp, Homo sapiens
aattcagcacataaacacaataaacaagtgtgtccatttagtgataaacaataaaaaccaacatacaatacaaaattttttcaagatgataaatcctcagaaaattagtattgaaagggtacattctacctacagcaaacatcattgttgtggtaccattaggaacacaaaaagagtgcctactacattaatttattcaccattgtgctagagggcatagtcattgtaatgagtcacacaaaataagtaaaagctttaaggatttaaaagaagaaatactgcagtcccacgatgatgctagacttgtgcacatagaaaactagataaattactagttgataaatacaactctggatgcataattaacatatgaaaatcaaatgtgtttattttctatgtttataaaggaatattagaaaatgacatcctaaagtgatatcaaaakagcatttataaatcaaataactaatggaaaagtatttagaatacttttcattagaatatgcacatctattagagatgtacaagtcctttacactgaaaactacaaaatattgctaagataatttgaaaaaaatagaagcagtgacagcatagctttt

SEQ ID NO: 730790 - DNA, 576 bp, Homo sapiens
tgtgattttaattttcatctttctaatgattaatgatgctgagtgcatcttttcttgtacctatagatcactttttgtatttttatgaattatttgctaaagtctgttgcctgttttttattggtttgtttaatttcttattgttgtgttttaagagttctttgtatattctgaataccagtccactattaggtacatcatttgcaaatgatttctcccagttggtaacttctctttccatttccttaatgatatctcccacagaggagatgtttttaattttgatgaagttcattttatcaagttgtttaaatgatygtgcttttgatttcatatttaaaaaatcgttgcctaacccaaggttgcaaagctcatcctatgttttcttctagaaattttataattttagattttacatttagatctatgatgaattttgagtcttttttatatatgttgtgagatatgaaacaaagttcacatcatttcctatggctatctgaatgttccagtactgtttgatggaagactttctttctccactgaattgcttatttcacattgatgaaaaataaa

SEQ ID NO: 730791 - DNA, 576 bp, Homo sapiens
tgtgattttaattttcatctttctaatgattaatgatgctgagtgcatcttttcttgtacctatagatcactttttgtatttttatgaattatttgctaaagtctgttgcctgttttttattggtttgtttaatttcttattgttgtgttttaagagttctttgtatattctgaataccagtccactattaggtacatcatttgcaaatgatttctcccagttggtaacttctctttccatttccttaatgatatctcccacagaggagatgtttttaattttgatgaagttcattttatcaagttgtttaaatgatcgtgcttttgatttcatatttaaaaaatcgttgcctaacccaaggttgcaaagctyatcctatgttttcttctagaaattttataattttagattttacatttagatctatgatgaattttgagtcttttttatatatgttgtgagatatgaaacaaagttcacatcatttcctatggctatctgaatgttccagtactgtttgatggaagactttctttctccactgaattgcttatttcacattgatgaaaaataaa

SEQ ID NO: 730792 - DNA, 645 bp, Homo sapiens
ttccccattgcttatcactgtgatcaacctcatcaaccctacgcaaaatggactagcaccgtgccctcctatggtttaccatataatgaagaaaatgaacattagtctccacactgatcattatataattaaaatccacctaactgccaaatccatgctgatttattttcagcatagttgttatttattggtagcaacagtaaaggtgaccamcttctgcttttaaaatgttcctcttctcttaatttctttgataggtctttacatatccttagcctatttttctatcaacatttgtaaatatgcttcattggcctttgtctataccttcactgccagcgtttctccagtggctgtactttcataaatgtattggacacattacagagtacatactgacttacacttcaattgctttagttgactgcttcttccatgcacatccctctctccacttctctcccattcgtctcttttctgtgatattcatgtctcatggttctttccatcttttgatcattaccactcagtttctctgtctctttgttgcttcttcttccattgtctcttaagttcctaagattctattttccattttccttacatctcacttgactcactctatctagttaattcctttccatc

SEQ ID NO: 730793 - DNA, 628 bp, Homo sapiens
tgtttttgtcctcttttattttataggtaactcaggctatcactggaactacagagacatattttcaattatgaactagacattacatcacatttcaaacttaaccttacagtaactacttcactgtgttgaaatccttggtttgcctgactctcccaatacagattgagttatttaaaggaaggaattttcatgtctccaactcttcaaattctaaatgtcacccgattcctaataaatgctttatggcacataatgatgtaatgaatgatgtaagtccattgaagtcacacttttacttctggaatgtgaagctgtatttcactgaaagcacatttggggagttaagttggaaaattaaatagatttacagagtcagaaataagagttttctctgtcaccctccctcattgtaaatttgatgcatgctgsttagagcattctaaaattattagtttctagtgtaggatcagtatgccattatgttagcttttaattaaatggagcaaagttgttaacagagcatgacttttttttttcaattatacattgagtttctacagcaatgactaaagaaggcttatgtttttcacatggtctttgacacatgagaaatgggcttacaagc

SEQ ID NO: 730794 - DNA, 600 bp, Homo sapiens
cttgccagattctttcaacaagcattgatctcacagtcagttttcaatgtggtattttaagtgattgaaatatttacgtgtaccattagaaattgctttatcacatgggaatataacattttatgataaactattgttctatttctccagtctatgttattttcaaaaattattgctgaaatggagttttttttcaatatcaatcaaatcaagatatagagaagcaaaattaacataggacaaaatgccttgaagatacatattctctcaagctgtgcaaaattctaagacacaatcaatagaaagaaaacaatactttatacttgtatacaactctttaccaaatgcttatagaacatttttaaaayatgatcactaacccatgtctatatatgtggaaataaatacatacataaatgataaagaagccaagaagctaaaaacagtagtcaatcttccaaaaatgtattactaatccttactataatcatataagtacccacaatttcatcagttatagtagaacctcctctctctaaacttccataaaaaattttcagagctctgcaacttctaacccacatgttcctacattttgat

SEQ ID NO: 730795 - DNA, 646 bp, Homo sapiens
ttcattatcactctgcttcttccagggcattttcagattattggctgaaactacttgcaggatattatggcagacattctgaacaaatgtgcccagaaaataggttaaatttgtgacttctgtatcttctcatatgggctatggcccaagtactcatggaatatagtccatgacttcctataagaatttgtatcattttgatttcggtttaagtcaaactacagctctatcagaatttttagaaatgtgtttgtcattcaatgcctaaaaatctagaaacagttcatcatggaagcagtcatcccagaaagcagactctttcttagagtttgtcattcttcagattataatcaaaagaacaaakaaatcctgaaccatttgaatagaaaagtctaaagttatgctccttgagaggagcattttgaccagagaatgtatcatgaatgtcacgatacgttgattgtcttcaaaggccagccatacaggcagttaggcaatgtggaagaagttaaatgagtgtgagtcactaacctctgaggatcctggaaatatgaacatttagatacctgaaaattcatatattttccttagatatatgaatagttatgctgctaaaaataacattgcctcctgaaaatacgtctac

SEQ ID NO: 730796 - DNA, 491 bp, Homo sapiens
ctcagcacatcactgaagtcactattcaagtatggtttggatgcccacgtgacggactaattagtaattactttattttattatgcacaaggctgtaagtggcattttggtaaatgtgagtataagtacattctagtgagtgagtgtgagattttcattcctctgtgcttcatacctttccacagtccacagtaaagtgcagatagttatccattgtgactgcgtaattgtaacaaaaagacttgctataagaagcggcttccaaatgttagaaatttaggaaggtggatgatagctycttttagagccatttccccactggattagttaggattatgtttgactgcaagtgacaggcaacctaaaataacagtggctcaagtaagagttctctttctcacatcaaagccccacggtaggcagcctagggctggcatggcactctataatgtcagggacatagggtttctctagatatgttgctgtttctg

SEQ ID NO: 730797 - DNA, 566 bp, Homo sapiens
caagtctattccacccataagtgtctcttggatttacatgtaatctcccacgccttgcttgttctaggtgagctgatataatcacattctagatctgaagagctgaggaccagactctaggaggtcctgagacacacttgggaaggccctgactggccagtcagctggagccactgctgcaaagtgggcttgggatggtggcccgggtcggggaagacactctgcagaggtccaagtggggcaggctggatatcgcaggtccccgcagggacctgagctgtgcagaggactttacctgtcagtagaaactkcctgcagggccgcttgttctgctcatccagcaagatggcagctgcatctgcgagagaagagagggacgggattcggatggttcaggctccaccaaaggaggcaggaagtggaagccacaggggcatatggaccctttatctcgacacagctgtgcagaaagaagagtttcctgttccacggaggagtggaagcaggagatgaccacaggtgggagtcctgggcagatggatccgagctgcaggtgacctcaatcc

SEQ ID NO: 730798 - DNA, 611 bp, Homo sapiens
gaaactgcagaacccagaatcccctcccagaccacagttaaaggggatttatttatttatataaatttttgtgacagggtcttgctctgtcaccactctgaacacctcatgttctctgattacaggcatgagcccccacgstcggccttttaggtggttttgagaggtatttaggtttgcagtgcaggggcgcaatcatagctcactgcagcctcgacctctggggctcaagcgatcctcctgcctcagcctcctgagtagctgggactataggtgcgcatcaccatgtgtggctaatttttgtattttttataaagatggggatctcactatgttgcccaggctggtcttgaactccagacctcaagtgatcctcctgccttggcctcccaaagctaagggggcattaaaagaaaaaaacatttttccccctgaaacatttaagtagtcttactgaaaacaataaaacacagaaacaccagattctcattttaaagtaaaacagacaggatctcccagaaccttcctagaatggaaccattcttgtcgcttttgaaaaacaaagccaagttctagatcccaaataaatgcacctgctggtgaacattctc

SEQ ID NO: 730799 - DNA, 623 bp, Homo sapiens
ccaatatctgcttggcttctggggaggccttagggagtttttttttttttttgagatggagtctcgcctctgtcaccaggctggagtgcagtggcacgatctgggctctctgcaacctctgcctcccaggttcaagccattctcctgcctcagcctcctgagtagctgggactacaggcatgtgccaccatgcctggctaagtttwtggtatttttagtagagatggggtttcaccatgttagccaggatggtttcgatcttctaacctcatgattcacctgcctcggcctcccaaagtgctgggattacaggcgtgagtcaccgcgtcgggccagggagcttttattcaagggtcgaggcaaagtgggagcaggtgtgtcacatgttaagggcaggagcaagaggagggggaggtaccacatgcttttaaacaaccagatcctgtgagaactcatgatctcaaggacagcaccaaggggatagtgctaaatcagtcatgagaaatccacccctatgatccaatcacctcccaccaggctccacctccaacactggggattacatctcaacatgagatttggagtagacatctaagctatatcacatgtcaaggaaggacggg

SEQ ID NO: 730800 - DNA, 623 bp, Homo sapiens
ccaatatctgcttggcttctggggaggccttagggagtttttttttttttttgagatggagtctcgcctctgtcaccaggctggagtgcagtggcacgatctgggctctctgcaacctctgcctcccaggttcaagccattctcctgcctcagcctcctgagtagctgggactacaggcatgtgccaccatgcctggctaagtttatggtatttttagtagagatggggtttcaccatgttagccaggatggtttcgatctyctaacctcatgattcacctgcctcggcctcccaaagtgctgggattacaggcgtgagtcaccgcgtcgggccagggagcttttattcaagggtcgaggcaaagtgggagcaggtgtgtcacatgttaagggcaggagcaagaggagggggaggtaccacatgcttttaaacaaccagatcctgtgagaactcatgatctcaaggacagcaccaaggggatagtgctaaatcagtcatgagaaatccacccctatgatccaatcacctcccaccaggctccacctccaacactggggattacatctcaacatgagatttggagtagacatctaagctatatcacatgtcaaggaaggacggg

SEQ ID NO: 730801 - DNA, 623 bp, Homo sapiens
ccaatatctgcttggcttctggggaggccttagggagtttttttttttttttgagatggagtctcgcctctgtcaccaggctggagtgcagtggcacgatctgggctctctgcaacctctgcctcccaggttcaagccattctcctgcctcagcctcctgagtagctgggactacaggcatgtgccaccatgcctggctaagtttatggtatttttagtagagatggggtttcaccatgttagccaggatggtttcgatcttctracctcatgattcacctgcctcggcctcccaaagtgctgggattacaggcgtgagtcaccgcgtcgggccagggagcttttattcaagggtcgaggcaaagtgggagcaggtgtgtcacatgttaagggcaggagcaagaggagggggaggtaccacatgcttttaaacaaccagatcctgtgagaactcatgatctcaaggacagcaccaaggggatagtgctaaatcagtcatgagaaatccacccctatgatccaatcacctcccaccaggctccacctccaacactggggattacatctcaacatgagatttggagtagacatctaagctatatcacatgtcaaggaaggacggg

SEQ ID NO: 730802 - DNA, 635 bp, Homo sapiens
tttattatggcatgtatcaggccacaaacttcagtctggagctggggcacacagcagaaccttagttctagtagacaagggaggaaaataggaaggcatgccttgtactgtaataaatatgactgctctcagaagaccataaacaggtggtttcatgaaaaaaaaaaagtcaycgcttttagatttaaaaaacatcaaatgcttcaggcttgtttgtattaaaaaaatagaaggccagtacacactcagctaattatagcattttttatgaggctatggctgactaaaatctggcaaaaatgagtccaactgaaacaccaagagtgagagtttgggaggattaggtgaggttttggagtgggaagaaatgtgggaaagaggaagaaagctttcattaagcagctcacattctggtagaaggaggaaaaaaaagcatccagactgattttattttcattcaaaacaacctcttattccatacatttttactttaaatccctgaacatgtttataatggctactctgaagtcattgtctcttaaatccaacatctgggctatctcaggaaagatctctattgactgctttgttttgtctaagggaagattttcctacttctttcatgtttagtaatt

SEQ ID NO: 730803 - DNA, 604 bp, Homo sapiens
agtaaagaatttcctctttagtagaaaaagatttcctaggatcaagtaatgagagagactgaaggaagtttgtgggaaaatagtgaaattaagggggaaggggactttaagttagacttcctaggaaaatgcctcaataggtagccatgaagataccctccccagagaggttgtaggagttgagggcaagacccagagagtcaatgaattcactgtgtaggtatacaagactattgargatctagcagagttttacatatccaagaatgacatcaaagcaacagaaacatttctgtgccccctttatggcctcctaaactaactaaaccatagaaacaggaaaatggatggcttactaaaatgtgtggactaagatcaaggacaagatggatttttcaatatttatcttatagacacaatttaattaccagacaggtaattaattactaccctgtactctcaccttttatatacccactggatcttgtatatagtgggacctatcttaggaggattctaaattggttcagattaagtttttactgagataatgaatgggactcaaaatagaacttgagtttggttacagacaaataattaagta

SEQ ID NO: 730804 - DNA, 646 bp, Homo sapiens
ttatagacatgactattggataaactctttactcttctgcaattgtcattttctatctataaaatgtttataaaatgtggattgtaaaaagtaaggaaatattaaagactgttcccacatgatatcacaattcttgcaatgtacatttattcaaataatcatctaaataaaaaacccacaaattgagtattttattcaattaactaattgtcaataaaaatggtcaatccaatagcctgtagagacgaaaacaaatcagaaaatgactaatctattggaatttcacaaacaaaagcagtttgtcctccttcaratacagtgattattttagttcaataaaaaaactattaaaatccagatttgaattcctaaaatcttattcatctagacaaagatgtaggaaaaaaatccttttcacaaaaatgtgtattttcctgtgagtcctcaagaaagatgttatgtttgaaaagggagatgttcatgttagcttagttctttggagtctctaaaggaaggaaataataatgcttttatttgatcaaaaatattttatttccagaactccatctacatctacattcaaatgtaaaccaaaggaggtgaaaaaaaaaggaccaagagtcaagagtcatgaatcctcttggta

SEQ ID NO: 730805 - DNA, 592 bp, Homo sapiens
atgcaattctgaacataagacttggcaaagatttcatgatgaagactctgaaagcaattgcagttaagaacaaaagtggacaagtgggacctaactaaagagcttctgcacagcaaaaaaactatcaacagagtgacagaaaatctataaaactggagaaaatacctgcacattatacatctgacacaggtctattatccagaacctataaggcacttaacaaaaaaaaacacacaatcttattaaaaaaatggtcaaagggcataagtagacatttctcaaaagacatwcacatagctaacaagcatatgaaaaaatgctcaacatcagtaatcattaggggaatgcaaatcaaaaccacaatgagataccatcctacaccagtcagaatggctattattaaaaagtaaacaaaacaaaacaaaacagatgttgactaggttgtggagtaaaaggaatgcttaaacactcctggtggaagtgtaaattagttcagccactgtggaaagcagtttggaggtttctcaaagaacttaaaaaaaaccctaccatttgacccagcaaaggaattgctgggtgtatactcaaagga

SEQ ID NO: 730806 - DNA, 592 bp, Homo sapiens
atgcaattctgaacataagacttggcaaagatttcatgatgaagactctgaaagcaattgcagttaagaacaaaagtggacaagtgggacctaactaaagagcttctgcacagcaaaaaaactatcaacagagtgacagaaaatctataaaactggagaaaatacctgcacattatacatctgacacaggtctattatccagaacctataaggcacttaacaaaaaaaaacacacaatcttattaaaaaaatggtcaaagggcataagtagacatttctcaaaagacattcacatagctaacaagcatatgaaaaaatgctcmacatcagtaatcattaggggaatgcaaatcaaaaccacaatgagataccatcctacaccagtcagaatggctattattaaaaagtaaacaaaacaaaacaaaacagatgttgactaggttgtggagtaaaaggaatgcttaaacactcctggtggaagtgtaaattagttcagccactgtggaaagcagtttggaggtttctcaaagaacttaaaaaaaaccctaccatttgacccagcaaaggaattgctgggtgtatactcaaagga

SEQ ID NO: 730807 - DNA, 592 bp, Homo sapiens
atgcaattctgaacataagacttggcaaagatttcatgatgaagactctgaaagcaattgcagttaagaacaaaagtggacaagtgggacctaactaaagagcttctgcacagcaaaaaaactatcaacagagtgacagaaaatctataaaactggagaaaatacctgcacattatacatctgacacaggtctattatccagaacctataaggcacttaacaaaaaaaaacacacaatcttattaaaaaaatggtcaaagggcataagtagacatttctcaaaagacattcacatagctaacaagcatatgaaaaaatgctcaacatcagtaatcattaggggaatgcaaatcaaaaccacaatgagataccatcctacaccagtcagaatggctattattaaaaagtaaacaaaacaaaacaaaacagatgttgactaggttgtggartaaaaggaatgcttaaacactcctggtggaagtgtaaattagttcagccactgtggaaagcagtttggaggtttctcaaagaacttaaaaaaaaccctaccatttgacccagcaaaggaattgctgggtgtatactcaaagga

SEQ ID NO: 730808 - DNA, 590 bp, Homo sapiens
catcaaattcttcaattagagtattgtgaaatagtttaataattgtttctatgaattaaggcaatatataagtagcagtatcatcactatgggtctatgtttgaggtattaaaaattatagacatctttattcataaacagtcttgaatctctactgccatgaaacaatwtaccatttgtgaaaataattgaaaaattttttaaaggtagtttttctctaattttaagattccagtggcaaaaaatgtgagaaactaaattataggaccctattaataatagaataaaaacaaaatagaacatatttaaaagtcgtacatgtataagttatttatcaaagtctagtaatacataaaaaaattctctaattgatactgtgaaaacagcactcagtgttttatcagacatctctaagcttttccttaatgcgcctcttgtcccagtttgttttgttttcttgcttaaagtcattgctcttgggctgagcagtcaagcagaaaactagtttctacctcactggacagaagcattagagatgccagtctgtgtgacacttattgcattatattttctggaaagtcccaaagaga

SEQ ID NO: 730809 - DNA, 409 bp, Homo sapiens
ggtgtaatataacacagtcatgcctctatccctgggaaaacttgtcttttattaaggcctatgcctgcttcttgctacttctgaagttgagctaggaacctagttatttgaatgaatattattttgaatgataacactgattatattttgatttgaaaactatccttgagtaggcaatgtatgtcaaattagaaatattcttagagtactgcrtaaaatcaagaatgaaacttaaaatagtttctactgataaaattgaaagaatattacaattaccatttccattttatttcccaatcattcctaaactggaatgttttcttataataactgactgaaactagttagccaaactaatgttggtatgaaactagaaatagatcctcagagagagcacctactgacctga

SEQ ID NO: 730810 - DNA, 617 bp, Homo sapiens
aagcaatccaatgaagtactaaaactaaaaaagaaaacacttgaatttcttgagaaattacttctagttaagaaaggttctaccattttattaactctttgggggcagaaaagaaaatgttataatcaaaatctattttaaaayagagaacttgaaaattataataatcatatgaattgcttctaattccttaaaagtatataattgattcaaattaatatatttgaatatgttcatttgaatataatttactcaaatgaaatatggcattctcaataaaagaaaaaataatttttaattgagatatttatttttcacatgtaattttaaataaataaaaattaactgtatttattctcataatatgatcttacatctactaataccagaagttattttaggtaaaacatttataaagttaccagatatataatctctgtagacagtgagatgctatttttgaaatatcaactgatacatttctcttgtgaaatttcccttctcctttccctttatttctatcagacagtttattccgtgttgagtgtcatgaggaagagttatactatggtccaaagatttgaatctggtagtctctcaaattcttctttccccaa

SEQ ID NO: 730811 - DNA, 617 bp, Homo sapiens
aagcaatccaatgaagtactaaaactaaaaaagaaaacacttgaatttcttgagaaattacttctagttaagaaaggttctaccattttattaactctttgggggcagaaaagaaaatgttataatcaaaatctattttaaaatagagaacttgaaaattataataatcatatgaattgcttctaattccttaaaagtatataattgattcaaattaatatatttgaatatgttcatttgaatataatttactcaaatraaatatggcattctcaataaaagaaaaaataatttttaattgagatatttatttttcacatgtaattttaaataaataaaaattaactgtatttattctcataatatgatcttacatctactaataccagaagttattttaggtaaaacatttataaagttaccagatatataatctctgtagacagtgagatgctatttttgaaatatcaactgatacatttctcttgtgaaatttcccttctcctttccctttatttctatcagacagtttattccgtgttgagtgtcatgaggaagagttatactatggtccaaagatttgaatctggtagtctctcaaattcttctttccccaa

SEQ ID NO: 730812 - DNA, 617 bp, Homo sapiens
aagcaatccaatgaagtactaaaactaaaaaagaaaacacttgaatttcttgagaaattacttctagttaagaaaggttctaccattttattaactctttgggggcagaaaagaaaatgttataatcaaaatctattttaaaatagagaacttgaaaattataataatcatatgaattgcttctaattccttaaaagtatataattgattcaaattaatatatttgaatatgttcatttgaatataatttactcaaatgaaatatggcattctcaataaaagaaaaaataatttttaattgagatatttatttttcacatgtaattttaaataaataaaaattaactgtatttattctcataatatgatcttacatctactaataccagaagttattttaggtaaaacatttataaagttaccagatatataatctctgtagacagtgagatgctatttttgaaatatcaactgatacayttctcttgtgaaatttcccttctcctttccctttatttctatcagacagtttattccgtgttgagtgtcatgaggaagagttatactatggtccaaagatttgaatctggtagtctctcaaattcttctttccccaa

SEQ ID NO: 730813 - DNA, 614 bp, Homo sapiens
attggaatttgatggagtagggggtgttgccaacaacactagatatttccaaatggcctcccaaggtcattgcatcaattttcaccatctctggtaaaatacaaataatcctgttgactcatgttctcaccaatgtttcctasagtcaaccttcctaaatgttgccaacctgtaagtgtggctttaatttgcatttccatggttactaatgaggctgatcatcattttatgtacttattgctgattatataccttaaaaaaaaaagtctagtgttgagtgtttaattccataagcccatgtgtgtggcttaggaaggagtgtgtgtgtgtgtgtgtgtgtgtgtgtgtgtgtgttcttcattttgaggatttttgtcaagcataactctttttgacaccttgggaaggtatttgtaagagttacatagtgctttctttggagactccaataattatttgaactaatgtaattctcaagtatgaataataacatcttgagaaaaagaaaatcatattccccaataaaatcatcataattccattacatttactgatctttcattgtattattagcctacatttgtattcgttaactctcacaagtacccagggaa

SEQ ID NO: 730814 - DNA, 563 bp, Homo sapiens
cacaccagggcttccctgcggctccatcccataggcagggctgactcctcacatggctgagctcagcctgcagcccatccagaggtcaagctgatatcctgcagctcaaagcccctgccctaactcacatggttagaagagttggtgtgacccgaggcccccagaaaaacaaaaacactcctgttaggacattccgggggcttagaggtcaccctcctgraatgggggtccagggccaggcctctctttgggccaggtgaaattttttagtgcccagtgagggattcataggtgtttcctcaaggaattcacctggaggacgcccgtttcatactctgcgttgcaaagtagacctgccacaacatgtggtctggaacctgcacacatcatgcccctaatcacagggctttgaaataaatttggggagaacttcagaaacctttttgtttgtttgtttcagacagggtctggctctggggcccaggctggaatgctgtggtgtaatcatagctcactgaagccttgattgcctgggctcaagggatcctgccacctcagccttc

SEQ ID NO: 730815 - DNA, 536 bp, Homo sapiens
atgcattgcaaacaaaaaatgcaattctaagccaagtaaaattcccaaccatttgaatggatcccttctcttggccaagggtgttccaaagttaaccggaaaaactagttcagatcatgatggaaaactggagtcagatgtgccccattataccctcctcccactggaattcaggcayagctgaccagtattaacttcaacacagaaaccttaaggctggtagaacagactcttagagtctgatgggaacatatacaatccattttctctggagcctgttacctggagacttcatctgcgggataaaaccatggtctccacagctccttatcttaacccagacattcctttctattgagtctaggatttttttttttttttttttttttttaaagacagagttttgctcttgttgcccaggctggagtgcaatggcgtgatcttggattcaagtgattctgcaacctctgcctcctgggttcaagcaattctcctgcctcagcctcctgagtagctgggattacaggtatgtgccc

SEQ ID NO: 730816 - DNA, 536 bp, Homo sapiens
atgcattgcaaacaaaaaatgcaattctaagccaagtaaaattcccaaccatttgaatggatcccttctcttggccaagggtgttccaaagttaaccggaaaaactagttcagatcatgatggaaaactggagtcagatgtgccccattataccctcctcccactggaattcaggcatagctgaccagtattaacttcaacacagaaaccttaaggctggtagaacagactcttagagtctgatgggaacatatacaatccattttctctggagcctgttacctggagrcttcatctgcgggataaaaccatggtctccacagctccttatcttaacccagacattcctttctattgagtctaggatttttttttttttttttttttttttaaagacagagttttgctcttgttgcccaggctggagtgcaatggcgtgatcttggattcaagtgattctgcaacctctgcctcctgggttcaagcaattctcctgcctcagcctcctgagtagctgggattacaggtatgtgccc

SEQ ID NO: 730817 - DNA, 536 bp, Homo sapiens
atgcattgcaaacaaaaaatgcaattctaagccaagtaaaattcccaaccatttgaatggatcccttctcttggccaagggtgttccaaagttaaccggaaaaactagttcagatcatgatggaaaactggagtcagatgtgccccattataccctcctcccactggaattcaggcatagctgaccagtattaacttcaacacagaaaccttaaggctggtagaacagactcttagagtctgatgggaacatatacaatccattttctctggagcctgttacctggagacttcatctgmgggataaaaccatggtctccacagctccttatcttaacccagacattcctttctattgagtctaggatttttttttttttttttttttttttaaagacagagttttgctcttgttgcccaggctggagtgcaatggcgtgatcttggattcaagtgattctgcaacctctgcctcctgggttcaagcaattctcctgcctcagcctcctgagtagctgggattacaggtatgtgccc

SEQ ID NO: 730818 - DNA, 592 bp, Homo sapiens
gcaatatccctgcctctgactcctcccagaatgctgggattataggtgtgagccaccgagcccagccccttacaaaaatttaatatggaagtccactgctgtggtgcgcacttgtactcccagctgtctgagaggctaaggaaggagaactgctcgggctcaggagtttgagttcagyctggacaacatagcaagaccccacctgtaataaataaagacaaattaaaagactttaatatggtttcagcctcttgctcgtttttgatgtgtgagtgaagcgttgctagagaaaacagcaatggggactggagtgtggtttacccagatggcgccgtgttctatcaccccacgatgcaactactcaaccccaggggaggctggtgtcagtgaagccagtgcttctgggggtcgggggtgtgagtctgggggacacactggagcagcctcccaaaacttggtctcacacgaatgtaaatttgcagttgttaatttttatgcagtgaatgaggaattttcccgagtctctcaactatttcctatctgttgattgcacaaatgtttcagcaccttggggaagactgaatgattggtg

SEQ ID NO: 730819 - DNA, 592 bp, Homo sapiens
gcaatatccctgcctctgactcctcccagaatgctgggattataggtgtgagccaccgagcccagccccttacaaaaatttaatatggaagtccactgctgtggtgcgcacttgtactcccagctgtctgagaggctaaggaaggagaactgctcgggctcaggagtttgagttcagtctggacaacatagcaagaccccacctgtaataaataaagacaaattaaaagactttaatatggtttcagcctcttgctcgtttttgatgtgtgagtgaagcrttgctagagaaaacagcaatggggactggagtgtggtttacccagatggcgccgtgttctatcaccccacgatgcaactactcaaccccaggggaggctggtgtcagtgaagccagtgcttctgggggtcgggggtgtgagtctgggggacacactggagcagcctcccaaaacttggtctcacacgaatgtaaatttgcagttgttaatttttatgcagtgaatgaggaattttcccgagtctctcaactatttcctatctgttgattgcacaaatgtttcagcaccttggggaagactgaatgattggtg

SEQ ID NO: 730820 - DNA, 592 bp, Homo sapiens
gcaatatccctgcctctgactcctcccagaatgctgggattataggtgtgagccaccgagcccagccccttacaaaaatttaatatggaagtccactgctgtggtgcgcacttgtactcccagctgtctgagaggctaaggaaggagaactgctcgggctcaggagtttgagttcagtctggacaacatagcaagaccccacctgtaataaataaagacaaattaaaagactttaatatggtttcagcctcttgctcgtttttgatgtgtgagtgaagcgttgctagagaaaacagcaatggggactggagtgtggtttacccagatggcgccgtgttctatcaccccacgatgcaactactcaaccccaggggaggctggtgtcagtgaagccagtgcttctgggggtsgggggtgtgagtctgggggacacactggagcagcctcccaaaacttggtctcacacgaatgtaaatttgcagttgttaatttttatgcagtgaatgaggaattttcccgagtctctcaactatttcctatctgttgattgcacaaatgtttcagcaccttggggaagactgaatgattggtg

SEQ ID NO: 730821 - DNA, 591 bp, Homo sapiens
atcctcccgcctgtctctcgggtagcttggactacaggtgtgcaccaccaggcccagctagcttttggaatctttgtagagatggggttgcccaggccatctcttctttttatgaagacaccggtcagattagattagggtccactcycacagactcatttgaacttagtcacctctttaaaagccctgtctccaaatacagtcacaatctgaggtactgggacagggtgggggcattagggcttcaacataggaatttgagtggggcagaattaagcccgtaacaatctcccagcatgcacattcctcactgaggttgaacaaggtgatgccccaccttctgtcccagctcttctactgtaaacagtgtcttttccatgatctagttagtgttctgcttttcacgtttctgtgctttctgttgtggattttgctgtcgattttgctgtttaaaatgacccaaagcatagtgttgagggctgtctggtgtttgtaaggacaacaggctgtgacgtgccatatggagaaaataggtgtgttagagaagctccctcaggcaggagtggtagtcccattggacatgagcttaat

SEQ ID NO: 730822 - DNA, 591 bp, Homo sapiens
atcctcccgcctgtctctcgggtagcttggactacaggtgtgcaccaccaggcccagctagcttttggaatctttgtagagatggggttgcccaggccatctcttctttttatgaagacaccggtcagattagattagggtccactcccacagactcatttgaacttagtcacctctttaaaagccctgtctccaaatacagtcacaatctgaggtactgggacagggtgggggcattagggcttcaacataggaatttgagtggggcagaattaagcccgtaacaatctcccagcaygcacattcctcactgaggttgaacaaggtgatgccccaccttctgtcccagctcttctactgtaaacagtgtcttttccatgatctagttagtgttctgcttttcacgtttctgtgctttctgttgtggattttgctgtcgattttgctgtttaaaatgacccaaagcatagtgttgagggctgtctggtgtttgtaaggacaacaggctgtgacgtgccatatggagaaaataggtgtgttagagaagctccctcaggcaggagtggtagtcccattggacatgagcttaat

SEQ ID NO: 730823 - DNA, 627 bp, Homo sapiens
agtgtgacaatgaataagctcctggtgtgaacctctggagctcagcctctccctgatgtaatctgggttccttgtgtggcaacagtaatgggaagaaaggacctgaaatattagttgattccaagggaccctctaaggttagagaggcagagagcagacaagggtgtccaaaatgtcccagtggggcttattagaacctacytgaagggaacgtttttctaggacacaaaacaccggtgcaaatccactgttgaaaatgttctccaatgtctattgtgaaatggagagattttgagttcagctcctttcgggaggggaggaaagaatcctctccaaggcagcttcctctagcagtttcctgcctcttgtgggatgagaagatttgctgtctaagatattatcatatttatttgtattttgctgagttcttttactggatgtaaggcagtccaaatgttatttggaaatctcctatcaatcaatcatgcaatttagatagaagttagttccatacagtgtgatctctgacttgctaaggtttagaataaactcaaagggcaatgtggcacagttattaaggtttgagagtatgcccatctgtgctctgactctacacatccactgcga

SEQ ID NO: 730824 - DNA, 601 bp, Homo sapiens
ttttttgatccattgttggttgaagctacgatgtggagcctgtggataaggagggctgactgtacagctatgtcacatttttgactgccaaggcacagaggcacagaataaaatagagaaaaatggagacaagaataaagatgagaccggtgtagtggctcaygcctgtaatctcagcactttgggaggtggaggcggaaggactgcttgagcccgggagttcaagaccagcttgggaaacatagtgggaccctatctctatttaaaattttttttttctttttgagacagagtctcgctctgtcacccaggctggagtgcagtggtgtgatctcagcacactgcaacctccacctcccaggttcaagcgattctcctgtcgcagcctcccgagtagctgggactatagatgcccaccaccactcccggctaatttttgtgtttttagtagaggtggggtttcaccatgttggccaggctgatcgcaaactcctgatctcaaatgttccacccaccttggcctcccaaagtgctgggattacaggtatgagccatcacgcctggacagaaaaaatttttttaaagaataaagatgaatagg

SEQ ID NO: 730825 - DNA, 575 bp, Homo sapiens
agatgttaatatactagtaaaacttatttatattaagagttgcataatatttcattgtatatatttgcaatgttttatttaataacctcactattgatattaggttatttatcaatttacaagtattgcttctgcttaaaatatatgtacatgtatatatttatgcatatgggaatatttctgtaggatatgttcttagaattgaaattgctgcatcaaaaggtatgcacattttattttttgaggccgggcacagtggctcatgcctgtaatcccagcactttgggagactgaggagggaggatcacttgagcccaggaattcaataccagcctaagcaatatagaccccatctctaccaaccaacaacaacaaaattagccaggcatggtggcttgcacctgtagttccagctactctggaggctgaggtcggaggctgttttcagctcaggagtccgaggctgcagtgagctgtgattgcrtcactgtactccagcctgggcaacagagtgaaaccctgtctctgaaaaatcaaaacaaaactaacaatttagtttttgaagagacatgacc

SEQ ID NO: 730826 - DNA, 534 bp, Homo sapiens
tccttttgtaactccccaaatgattatacaaagaaaaaaaatccactatgcacaagtatgaatttctttgaaagctagatggagagtcaagaagaaaggagagcttggtgaagacactcagattctttaaggacarttgccacatgggttgaaaccctgatttcttttacaggactgggttgttaacacactccttgtgaacaaggaaaaggtgctctcacttttgtaatcctgacagtaaatacttactgtgtggacaaattaatcaataaatacaaatgaataaatgaatgaatgcatagtttttttaaccatcctttgactgaatctggaatgtctactataatctgaatacttgaaagacacttttgttttctttttctcccccatagtttctttcattctacatgatacaaagaacatcttacttaactcaatggattaaatttaccaaagggttggcaaaagtgaaaggagagactaaaaaaaaaaattaaatataacccagttgcaaatgtaacattcaggcattgt

SEQ ID NO: 730827 - DNA, 452 bp, Homo sapiens
gctttaattttaagtgggagctaagctatgaggacgcaaagtcataagaatgatatagtggactatggggacttgggaagactgggagcaggggtgagggatagaagactacacactggatgctgctgcgtacactgcttgagtgatggatgcaccaaatcccagatatcacacctggagaacttatccatgtcgctaaacactacctgttccccaaaaactattagaataataataatagtccgggtgcrgtagctcacacctgtaatcccagcactttgggaggctgaagcagacagatcacttgaggtaagcaatagttgaagatcagcctggccaacatggtgaatcccagtctccactaaaaattcaaaaattagctgggcatggtggtgcgcgcctgtagtcccagctactcaagaggctgagcatgagaatcacttgaccccagg

SEQ ID NO: 730828 - DNA, 538 bp, Homo sapiens
aaccactcatcatttaggggaagttttgtatcagcatagagactacatacagtagtccccctttattgatggtatcgttttccacagtttgttacctgccgtcaactgtgatctgaaaatattaaatggaaaattccagaaataatttataagttttaagtttgccattctgagtagtatgatgaaatcttgcactatcctgccctgtctcatctggggcgtgaatcatccctttgtccagtgcatccacactgtatacgctacctggccattagtcacttagaagctatgtcaactgtggcagtattgcagtgcttatgttaagtaccccscgctccccccctttttaaaaataaataattgccccaaactgcaaaagtagtaatggtggcaattcagatgtatcagagaagccgtcaagtgcttcctttatgtgaaaaggtgaaatttcttgacttaataaggaaggaaggaagttacatgctgaggttgccaagatctctggtaagaacaaatcttctatctgtgaaactgtgaa

SEQ ID NO: 730829 - DNA, 563 bp, Homo sapiens
tctctaagcagtttaattaaatatctgtcatttttttttcctgggctaatggaaaattcagcttcttttggctggtaccattttaagacgatgtcacaagcaatcaaacttctaatttagaaaccatggtgggccagattctctcaggacctagactgttccctgcctctgtgttgggccccttggaaagctgcattaactttattgagctacagggatattagacacagagctcaatttaatcaacctaattgtaccaaggaattttgatccttcatgtcgttagcgagagaactttcatttcaacacctgtggtsattggacacacacttcagaaaaatatctcatctaaattagaagcccctgcctccaggggtcattgggactggattgaacttgcaggccagtgacctccatcaaggtttccatggaagtatgatcagaatgcaggaagatgataatatgacccacaggctgtgtgatctttctctgtagttctgatacagcagatgaggaaaaagtagccttggtttcagattaaatctgttctgttctcataacac

SEQ ID NO: 730830 - DNA, 516 bp, Homo sapiens
cctttcctcccagacacttatgattctagtttatagctgtaataatcacaggcattgtgtctcttgtaatatccacttgttcaaagagtaaagttttatttacatacttttattttcacatatttactttgctttcactggcctgtatttacctattaatttatttgcattactgrgttaattacatattgacgattctatgtgtgttcagtttgtgagcataatcttaatatttgttgtgttacaaaggctcacaataagagcagaaaaagatatattttagaaatattaatgaaaagaaaatgccttagtggattttattacaacgaatgttaactattatagtaattcaatttgtttcatcataaatgaacacagatttgggggctccaaaacacgtaaaaaatgttttgcagtaattcatcttaaaagcttttattctttaataaactatgctggctttgtgggagaactttatatgagttatttcagtatacagaaacaaagattctaatt

SEQ ID NO: 730831 - DNA, 619 bp, Homo sapiens
cctgtcaatactttcatattagctcagcgtgacccatgtcaaatttccaacctacagaactataaaataaatttgtgttgttttaaaccaagtttgggacgatctgtaatagcaccaatagaaaacaaatacaactatttttatctgtaagaaaattaacagttaattctatataatcaatatacaatccatataaaatctcttctaattttctctaaaaaagccttttatagattttttcccccaaatctacgatccagtgaagtttacacattacatttggtttttggtctctttagtctcttttaawctagaacagtagccttccctttgtcctgacattgactgttctatttaggagttcaggctggctgtcttatagaatgtcccttattttggatttgtctgagtgcttttcacatgattagattcaacttagataatttcttggcaaggatacgtcataggcaatgatgtgcactttttattgcttcaaagcttgaggctcttatcaggttgtccaacttttggtgagtctaaatttgatcacttgttttagaagatgactgtgattattttattgtaaaagctatggctttgtaattgatgtcatctgtag

SEQ ID NO: 730832 - DNA, 619 bp, Homo sapiens
cctgtcaatactttcatattagctcagcgtgacccatgtcaaatttccaacctacagaactataaaataaatttgtgttgttttaaaccaagtttgggacgatctgtaatagcaccaatagaaaacaaatacaactatttttatctgtaagaaaattaacagttaattctatataatcaatatacaatccatataaaatctcttctaattttctctaaaaaagccttttatagattttttcccccaaatctacgatccagtgaagtttacacattacatttggtttttggtctctttagtctcttttaatctagaacagtagccttccctttgtcctgacattgactgttctatttargagttcaggctggctgtcttatagaatgtcccttattttggatttgtctgagtgcttttcacatgattagattcaacttagataatttcttggcaaggatacgtcataggcaatgatgtgcactttttattgcttcaaagcttgaggctcttatcaggttgtccaacttttggtgagtctaaatttgatcacttgttttagaagatgactgtgattattttattgtaaaagctatggctttgtaattgatgtcatctgtag

SEQ ID NO: 730833 - DNA, 619 bp, Homo sapiens
cctgtcaatactttcatattagctcagcgtgacccatgtcaaatttccaacctacagaactataaaataaatttgtgttgttttaaaccaagtttgggacgatctgtaatagcaccaatagaaaacaaatacaactatttttatctgtaagaaaattaacagttaattctatataatcaatatacaatccatataaaatctcttctaattttctctaaaaaagccttttatagattttttcccccaaatctacgatccagtgaagtttacacattacatttggtttttggtctctttagtctcttttaatctagaacagtagccttccctttgtcctgacattgactgttctatttaggagttcaggctggctgtcttatagaatgtcccttattttggatttgtctgagtgyttttcacatgattagattcaacttagataatttcttggcaaggatacgtcataggcaatgatgtgcactttttattgcttcaaagcttgaggctcttatcaggttgtccaacttttggtgagtctaaatttgatcacttgttttagaagatgactgtgattattttattgtaaaagctatggctttgtaattgatgtcatctgtag

SEQ ID NO: 730834 - DNA, 665 bp, Homo sapiens
ttagtttcgtttgatatactttagtgagggtttagaagcctaatacttgagatcttcaattgcatttgaagattttgtattcaccttttactgatataataaatgattataagtgcatttggaattacttacactagaatgaacatcacagggatgattggtatagcaatgatgacggtgagagtaacacacactattgtagatttcctatgcatccgactctaccataaacacatacaatactcagactagtctcatgaaakagatactattgcttcacccttttaaagataaggaaactgagaaacagatatgagattaaataatttgtctaagattacccaagtaaatcagggagcttgaattcaaagtgagatttgtttggtttcagtggctgtgatattggccactttacttttctaccaacaaaacggtcatctctctgttaatagcctccacaagatgggaatcagattaatttaaaccgagattcaggcaatgatgaaacttatcagagggattttttccacctggcactagataactcctcactctccctaaggtctcctgttaagctattaaattgctggtataagacacaggcataaggagataagcacaaacattaacttctaattcttcctctttcactaatttggtataat

SEQ ID NO: 730835 - DNA, 615 bp, Homo sapiens
tatggtttttagtaagatgggaggtggtacaggattttgattagaggagtgacacaatctgacttacattttagtggggtcacactggctgctgtgttgcgaatggactgagggggcacgggcagaagcagggtgccaggtgccaccatacacgcgagagaggtgggcaggcaggaggggtggggagctcctgcatggattttgaaggtgacgtcagtcttgtctgcttgctggtctgttctcagctttgaagtattttcagttgtaaactcttaagtaatactgaaaaagccagtggtttttaaaatattgtttatgcatttggggttgttaatgtgatattgaattttgatagrttctttattccatgcaagttttcaaaatgctttttaaaaacaattttttaattgtaggatccttgtgaggatatttctcgtatccagaaaatcaggtatgtgtgaaaaactttcttgattatgcagactattgaaaagaaatcaaaattaagaaaatactgatttgaggttaaaacataatattgttagtattatttatgaacattaaaaactttgttctcagcaattaagtactgctctgagacttgctttgcttctt

SEQ ID NO: 730836 - DNA, 638 bp, Homo sapiens
gctggccacagatggtggtctctatggcatatcttttttgacaactttctaaaaatgtaaaaatcattcttagcgcatgctaagtgatgctgcagcatctagtggggagaagccagggatgccgctcaacagcctcgaatgcaccggacagcccctcccagcaaagagtcacccaaagtgttggcagcaccgaggctgaggagctgcctgactaaaggctacccagacgcacctaataacgcttaaaacaaaaggatcaagctattcccaattaactctgtcttgcaataaagctcaaaaatattttttaaagaaatacaaaaatcccagcacccaayaacataaaattcattctgtctggcatccaatcaaacagtacaaggcacgcaaagatgcagaaatgaccggtaacaaggagaaaataaacagaaaaagacccagaaataacacagaaaatataatcagaagacaataactttaaaaaggatattacaaatatattcctatgttcaaggaaatgaaaaatggaagaatacattaagaagaaacatggtggctgagcctggtggctcatacctgtaatcccagcactttgggaagctaaggagggcagatcacgaggtcaggagatcgagacg

SEQ ID NO: 730837 - DNA, 599 bp, Homo sapiens
atcttgagagaattatgctaggtgaaaaagccaattccaaaaggttacatactatataattcacgtaacactgttgaaatgacaaaatcatagaaatggagaatcagtggtcaccagaggttaaggggaaggcagggacacaagtgggcttggaaagggaaacatgctgggttctgtaggtgatggaaatgctctgtatcttgactatatcaatgtcactactgtgcttgtgatattccattacagtrttatcactgggggaggttcagtaagggtacatgggatttctctatattatttcttacaagtgcatgtgaatctagttaccacaaataaaaagttgagttttttaaaaaaagcaaaataaagacatttcaaaccaaaaaaaaaacaaaaactaaaatcaacaacaaagtaaaataaacaacccctgagcatcaaaaaacaaaacaaaacaaaagtaaggaaaaataccaaatggaaatctgaatacataaaaaggaatgaaaagcagtgaaaacagtaaacaagtaggtaaacagaaatgatttcttaaaagctttaaactatctaaaacaaaacttttaaaatgaatttaa

SEQ ID NO: 730838 - DNA, 497 bp, Homo sapiens
ctttttgccctgtaagtgtactctctccttatagcttcactatcttcataaatttactgtaaagagggcattgaataaaatttaaagaaaacactgttgctctggatactctttgacattcaagaatgcttggaggcagtgcatatwcactgcgtgcatagtctgtgctgggcgagcctcagatttaaactggtggatgaaatgtggcaccacctcctgccagagatgcagagaccagtggaggagaaagatattattaaatcattatgaataataagtgcaaaatcataaccattgctagtgctaaaagacatatgtgtgttttagaataagaggatttgatctaactacagggccatggaaagcttttctgagatgactgctgagctgaaatctgagggaggagtagaaatgtactagacaaagcagagaggtagatgtgcaaatgtcctgtggtggggggtcgtggtataggaggggcaagggtatgagagtgc

SEQ ID NO: 730839 - DNA, 497 bp, Homo sapiens
ctttttgccctgtaagtgtactctctccttatagcttcactatcttcataaatttactgtaaagagggcattgaataaaatttaaagaaaacactgttgctctggatactctttgacattcaagaatgcttggaggcagtgcatattcactgcgtgcatagtctgtgctgggcgagcctcagatttaaamtggtggatgaaatgtggcaccacctcctgccagagatgcagagaccagtggaggagaaagatattattaaatcattatgaataataagtgcaaaatcataaccattgctagtgctaaaagacatatgtgtgttttagaataagaggatttgatctaactacagggccatggaaagcttttctgagatgactgctgagctgaaatctgagggaggagtagaaatgtactagacaaagcagagaggtagatgtgcaaatgtcctgtggtggggggtcgtggtataggaggggcaagggtatgagagtgc

SEQ ID NO: 730840 - DNA, 497 bp, Homo sapiens
ctttttgccctgtaagtgtactctctccttatagcttcactatcttcataaatttactgtaaagagggcattgaataaaatttaaagaaaacactgttgctctggatactctttgacattcaagaatgcttggaggcagtgcatattcactgcgtgcatagtctgtgctgggcgagcctcagatttaaactggtggatgaaatgtggcaccacctcctgccagagatgcagagaccagtggaggagaaagatattattaaatcattatgaataayaagtgcaaaatcataaccattgctagtgctaaaagacatatgtgtgttttagaataagaggatttgatctaactacagggccatggaaagcttttctgagatgactgctgagctgaaatctgagggaggagtagaaatgtactagacaaagcagagaggtagatgtgcaaatgtcctgtggtggggggtcgtggtataggaggggcaagggtatgagagtgc

SEQ ID NO: 730841 - DNA, 481 bp, Homo sapiens
aaatgcaggataatcatctagttcaacaggtagcatttttttttaagggataaataccccaactgtatgaagaacatcatgattttgcaactgctaataattacactaatggtcatccatggctgctaacaccacaaaagaamgacaagtagacatttggacctcttgatggaaggatactgcaacaattataaaatattattaacaaacaaatacaacataaatttcctcaaatctctagaccataccactgggaagatatcagttaacaagactgtaggaaacaccacaggcggaagacttactttcttttacaaataaacttaaaatagggggaagagaaacagagaaagaaagagagacagaaaaagattgaatctaaaaattaagagacttaagaagtagatcaactaatcagtttgtaggttacaattcaatccgattgtacataaaaaaattacaggacaattagggaaatgta

SEQ ID NO: 730842 - DNA, 481 bp, Homo sapiens
aaatgcaggataatcatctagttcaacaggtagcatttttttttaagggataaataccccaactgtatgaagaacatcatgattttgcaactgctaataattacactaatggtcatccatggctgctaacaccacaaaagaacgacaagtagrcatttggacctcttgatggaaggatactgcaacaattataaaatattattaacaaacaaatacaacataaatttcctcaaatctctagaccataccactgggaagatatcagttaacaagactgtaggaaacaccacaggcggaagacttactttcttttacaaataaacttaaaatagggggaagagaaacagagaaagaaagagagacagaaaaagattgaatctaaaaattaagagacttaagaagtagatcaactaatcagtttgtaggttacaattcaatccgattgtacataaaaaaattacaggacaattagggaaatgta

SEQ ID NO: 730843 - DNA, 616 bp, Homo sapiens
ctttctcagcagcatctctggatcagagaggaagaggcaagaagctctgaatttttcacatcggtaatagtggtgctgctaacccttttccagggaattccatttacagatttaaacatgacattttcttcccatatcttatctacacaaatttgtattctctactattttttcacaggcaarccatgtaatggctttgactctgtggtaatagaatagatcatcatacttcatgaatcaacagctttaatttttccatttgctattaggacagaatttgaaaatattacttaaatttatccactacatatttcagaataaggaaatgactttctaaaatgatcctttacaaaggagtaaataaagatttgcccgccttgaaaaagatgttgatttctgctcctagtatttctaaaatgtctaataaatgtatacagatggaatattacttgaaagtatgcattgttatatttcataattaggaggccatggattgtaagatacaccactctatcgtgaacccctaagaaagagaaaatgaagcatctcaaaagagctcttctaatcttttaaaaattatatcacttttgtgcatacttgaaaaggaaaacataag

SEQ ID NO: 730844 - DNA, 616 bp, Homo sapiens
ctttctcagcagcatctctggatcagagaggaagaggcaagaagctctgaatttttcacatcggtaatagtggtgctgctaacccttttccagggaattccatttacagatttaaacatgacattttcttcccatatcttatctacacaaatttgtattctctactattttttcacaggcaaaccatgtaatggctttgactctgtggtaatagaatagatcatcatacytcatgaatcaacagctttaatttttccatttgctattaggacagaatttgaaaatattacttaaatttatccactacatatttcagaataaggaaatgactttctaaaatgatcctttacaaaggagtaaataaagatttgcccgccttgaaaaagatgttgatttctgctcctagtatttctaaaatgtctaataaatgtatacagatggaatattacttgaaagtatgcattgttatatttcataattaggaggccatggattgtaagatacaccactctatcgtgaacccctaagaaagagaaaatgaagcatctcaaaagagctcttctaatcttttaaaaattatatcacttttgtgcatacttgaaaaggaaaacataag

SEQ ID NO: 730845 - DNA, 616 bp, Homo sapiens
ctttctcagcagcatctctggatcagagaggaagaggcaagaagctctgaatttttcacatcggtaatagtggtgctgctaacccttttccagggaattccatttacagatttaaacatgacattttcttcccatatcttatctacacaaatttgtattctctactattttttcacaggcaaaccatgtaatggctttgactctgtggtaatagaatagatcatcatacttcatgaatcaacagctttaatttttccatttgctattaggacagaatttgaaaatattacttaaatttatccactacatatttcagaataaggaaatgactttctaaaatgatcctttacaaaggagtaaataaagatttgcccgccttgaaaaagatgttgatttctgctcctagtatttctaaaatgtctaataaatgtatacagatggaatattacttgaaagwatgcattgttatatttcataattaggaggccatggattgtaagatacaccactctatcgtgaacccctaagaaagagaaaatgaagcatctcaaaagagctcttctaatcttttaaaaattatatcacttttgtgcatacttgaaaaggaaaacataag

SEQ ID NO: 730846 - DNA, 621 bp, Homo sapiens
tattgtttcatgtcacctggctcccataatttcttttggcaaatcatctgttaattgtaaaatttgatttttttccctactgattgctttttcagatttctcttcctctctctctcttttttttttttattttttctttgagacggagtctcgttctgtcacccaggctggagtgcagtggcacaatcttggctcactgcaacctccacctcctgtgttcaagtgattctcctgcctcagcctctcaagtagctgggattataggcacatgccaccaggcctggctaatttttgtattttaagtagagatggggtttcaccatgttggccagkctggtcttgaactcctgacgtcaagtgatccgcccacctcagccctaccaaaatgctaggattacagacgtgagccaccgtgcctggcctcttcctcactctttaaaaacatggtttcttttggttttgtttgtatgttttgtcctctgtcttttcctccatcacctacagatggcgttaatattctcctttgtttttatttccttttgactaactgaatttcttaaataagtgggttgatgttttccattagttttggaaaatgcttgtcaattatcctttcacatc

SEQ ID NO: 730847 - DNA, 628 bp, Homo sapiens
cactgttcctcagcactgataagatcaacagcctacaaaattttagagaactacgattacatttgggattttttttaaaaacatgagaccctaaggctgggcatggtggcttatgcttataattctaccactttgggaggatgaggtgggaggatcacttgaggccaggagttggaggctagcctggccaacatggtgaaaccctgtctctactaaaaatacaaaaattagccaggcatgttggtaacacgcctgtaattccagctacttaggtggctgagacaccaccgattgcttgagcccgggaggggaaggttgcagtgagccaagaatgcaccactgcactccagcctaggtgacaagagcaaggctctactccctcagtgccctccccacaaaagagaccctaaatcatgtacagtggctcacgcctataattccagcactttgagaggccagggagggaaaaatcacttgaggctagragttcacgaccagcctgggcaacatagcaagacctcatctctacaaaaaaaaaaattagccttaacattaacaaggtgtacacacacctgtagtcccagctacctgggaggctgaggtgggaggactgcttaagcctgggaat

SEQ ID NO: 730848 - DNA, 595 bp, Homo sapiens
aggcaccctgggatgacatggggtccaccacgtaacccaggatcatctcacctggcaaaatccttgacttcatgacatccgcaaggtcccttttgctgtgtaagataacatccggccgggcgcggtgactcacgcctgtaatctcagcactttgggaggcygaggcaggtggatcatgaggtcaggagttcgagaccagcctgaccaatgtggtgaaaccccatctctactaaaaatacaaaaaaaatgagtctggcatggtggcgtgttcctgtaatcccagctactcaggtgggctgaggcaggagaattgcttcaacccaggaggcagaggttgcagtgagctgagattgcaccactgcattccagcctggacgacacagcaagactctgtcacaaaaaaaaaaaaaaaaaaaaaggatgacattcacacgttcacaggattaggacatggacatatttagggagccatgattctgtgtgccatactatccatctacaatttttttgtttttaaacaagatcattttcctcatctcccccaaaactttctttcgttgggaaccaaaatatatcacaagtcttccataacggc

SEQ ID NO: 730849 - DNA, 608 bp, Homo sapiens
aaaggtgagcttggaaagatgacattaaattttggtaatgaatatatgcagttatatcaagttcagctagttcatcttataaataaagtacttttaagcagaaatccagacaatctttcatgggagcatttcagaggtaaaygttagtccctctctgcacctctgcctccttccgtctccagcatgcagcccccaggcagctgtcctgacagatgtctactccacaagggctaggctggactttgggcataaaataacttaaaagagggtacagctagaccctagctgttctccaaatcaaagtttccccaaaagcaggtattggattaggagatatgagaactattttccacccctaagccaaaactgcccattttagaatgttatcacttctgtatataagtcgctatagacttttctagctagcactttctgtggctacttaatgaaaacacccaagggacccagaaagttattctttattgttccttaaaactaggggatgatgggaagggtatttaagctcctcagagaaaacaaatggacagtgctgctgtctctccttcccacccccacccccaaatccctttaatttttttctttctgtg

SEQ ID NO: 730850 - DNA, 608 bp, Homo sapiens
aaaggtgagcttggaaagatgacattaaattttggtaatgaatatatgcagttatatcaagttcagctagttcatcttataaataaagtacttttaagcagaaatccagacaatctttcatgggagcatttcagaggtaaacgttagtccctctctgcacctctgcctccttccgtctccagcatgcagcccccaggcagctgtcctgacagatgtctactccacaagggctaggctggactttgggcataaaataacttaaaagagggtacagctagaccctagctgttctccaaatcaaagtttcmccaaaagcaggtattggattaggagatatgagaactattttccacccctaagccaaaactgcccattttagaatgttatcacttctgtatataagtcgctatagacttttctagctagcactttctgtggctacttaatgaaaacacccaagggacccagaaagttattctttattgttccttaaaactaggggatgatgggaagggtatttaagctcctcagagaaaacaaatggacagtgctgctgtctctccttcccacccccacccccaaatccctttaatttttttctttctgtg

SEQ ID NO: 730851 - DNA, 619 bp, Homo sapiens
aggactgcactccatggatcccctcctttccctttgtcattctcaagatgtgttttcccactgatccttgtatgttaatatgcacatctgcgcaagctgggttagtataccgttgagcagctgcacccttctgttagaggccttgrattcaagtcctgtttgttccactcatgtggggcaaggtatatgaaccttccaggaatccgtatacatgtgtggctttttccactcaacaaaggtgtgtgatactcatcttctttcctgtttttggcagaattcatttctgctgctgtggggcaatccattgagaaaatacgccacaatttatttatccatatgtgtgtttatgtacctttcatctgctttatttacttatttcttgccattgtaaatgctgctactattagccctcataaatatgtaagcattcaggtaatataatgtgctatgactggagatgttgcatctctggctacatacattttaaaattgaaaagataatgccaaaaatacttctaaagtgattgtaacaaatgtgtctcctatacaaactctaaataagagttcatacatctttttaacattgactagtactttctcccaaacaaacagagtgtga

SEQ ID NO: 730852 - DNA, 494 bp, Homo sapiens
ggcatgtgcctgtaatcccagctattcaggaggctgaggaagaagaatcacttgagcccaggaggcagaggttgcagtgagctgagattgcgccactgcactccagcccgggagacagagcgagactttgtctcaaaaaaaaaaaaaaaaaaaaaaaaaaaaaaaaaaacatgctacctgactctttaatcccccagacagcctcagaattcagaaaatgtttcatgggggaacctagacatgtatttgaggctctgaaaatccctgctttgggaagcccaacccaacaggaccactcagacttttgctgattttactgtataccccatacccacccaagcaggtggtctytgctggagtcaagctctgatccttagcccagcccagaatcagagaatgccctagggggaaataacaggtaggcattgtccacttatctctggacagttctatcccttcctgaaaatttagtccatttatccttgtattatagc

SEQ ID NO: 730853 - DNA, 585 bp, Homo sapiens
gaagattttctcccactctgtgggttgtctgtttactctgctgactattccttttgctgtgcaaaagctttttagtttaattaggtccccgctatttatctttgtgttttattgcatttgcttttgggtttttgatcatgaaatccttgcctgagccaatatctagaaggggttttccaatgttrtcttctagaatttttatagtttcaggtcttaggtttaagtccttaatccatcttagtcgatttttgtataaggtgagagatgaggatccagtttctttctcctacatgtggctagccaattatcccagcaccatttgttgaaaagggtgtcctttccctactttatgttttcgagtcctccatgtctttcaatggcttcatggctcatttctttgtagtggtgtgtaacatttaatcatctggatttaccacagtttatttatccactcacctactgaaggacatcttgtttgacatttccaagttttggcaattatgaataaagctgctataaaaatccatgtgcaggacatatcaaatgttgacaaatttatgaaacaacagaaacttccaaaaacta

SEQ ID NO: 730854 - DNA, 533 bp, Homo sapiens
cactcgactgtagggtggtggaagaggtcaggggaactgtctgccctgtttgccatcctgtccctagtgcctaacatggagtaaaccctaaacattcatggaatggatagcactgctgttcacagatagatgccttacctactttcatttccttaagagtgttgtggtgtagttaaaaaaagaaagccattttattctacattattctacaacacaaagggttgtgctccagtgaaayttgaagtgccttttgtggagtgtgctttgggtaaagttcatttaaatcaggtacttataaatgtcaggtcgattacaaatatggtgtcccatgttcttttctaatctaaacgagatgttttaaacgagtctcattctatccagtaagaataaggaaagaggcaagtaatcttatttttgggaccaagcggccacgaggtcataagacctaaaaatgtttacactcccaggcagcacctgctcgttaattatctgggagactggtaaggatttaaaagtaattttttccttaagcc

SEQ ID NO: 730855 - DNA, 533 bp, Homo sapiens
cactcgactgtagggtggtggaagaggtcaggggaactgtctgccctgtttgccatcctgtccctagtgcctaacatggagtaaaccctaaacattcatggaatggatagcactgctgttcacagatagatgccttacctactttcatttccttaagagtgttgtggtgtagttaaaaaaagaaagccattttattctacattattctacaacacaaagggttgtgctccagtgaaacttgaagtgccttttgtggagtgtgctttgggtaaagttcatttaaatcaggtacttataaatgtcaggtcgattacaaatatggtgtcccatgttcttttctaayctaaacgagatgttttaaacgagtctcattctatccagtaagaataaggaaagaggcaagtaatcttatttttgggaccaagcggccacgaggtcataagacctaaaaatgtttacactcccaggcagcacctgctcgttaattatctgggagactggtaaggatttaaaagtaattttttccttaagcc

SEQ ID NO: 730856 - DNA, 571 bp, Homo sapiens
ggaattgcaaagaatggaatggaatggaatggaatggaatagaatcaaacggaatggaatagaatggaatggataggaattgaattgaatggaatggcatggaatggaatcaaatggaatggaatggaatgaattcgaacggaatggaatggaatggacttgaaaggaatggactggaatggaatggaatggattcaaatttaatggaatggaatagaatggaatggaatggattcgaatttaatggaatggaatggaatggattggaatggaattgatttgaatggaatggaatcgaatggactggaatggaatggaatggaatcgagtggaatggcataaaatgcactagaatctmatggaatggaatggattaaaatggaatggaatggactcgaatggaatggactagaatggaatggactcgaaaggaagaggaatcgaacggaatggaatagaacagaatggaatcgaatcggatggcatgcaatcagatggcatgcaattggatggaacggattagaatggaatggaatgcaatcgaaattgaatggaatggactggaatggaa

SEQ ID NO: 730857 - DNA, 575 bp, Homo sapiens
ttaaatttttttttaaaaaagaaaatcacccaaatacacattaaaaacctcttacaacatatgtgcacattcatagataccctgtagaacttgattttgtgtattaaaaccttgtagaaaagttcagacagtgcacacaatgactgcaacttggtctttgcaaaatcagtgatatatatttcagatctatccacactgacccagcgaggtgtttgatttattgtatgatctaatgatatgycatgtgatgactgcagcatatttaattatgcttttttcatgctgataccatatggtcataaatatgatgacataccagcatagatatgcttatgtggttgcttttattgatttatactatattagaaatgaaacagaagtattagaaatcctagcaagcatagctgtatctctcccatggctgtgttgattgcaactgtttcccccttaaagtatgtctttttgacatgtcatgaccctgagaaaatccagtgtatgcttttcagagaatgacagtaaggagaggaaatggctgatggtcaaagtgttacttgttctcttggctccccctcatg

SEQ ID NO: 730858 - DNA, 409 bp, Homo sapiens
gataaaatagcaatttaatgaaaatactttagagaataaaatgatccttcaaaccagacttattttagaaacaaaaataatgttaaattctttaattgactcctaaaatatttatttttaatgaatattggagtgatttccaaatgaacaaccttaytcatatctaatgcttgtagcaactttattgcatgtaagtatatcaaatttgataattttttatacattttgattaggtttgtatattataccttgttcccatgagtgactgacaaaactttctgaaggttaaaccagaaaatacaaaagtgtaggctcattattataccacatgggtatgaaaaataatgaataccatataataggattcaccaaacagatatccaagctgaccaattcgggacacttccac

SEQ ID NO: 730859 - DNA, 301 bp, Homo sapiens
ttaagtgagtaccctgcctagttcgctgaagctttttcttattttctggattcttttattttcgttctatgacattttaataatactttcttgatttctttttacttctcttctgcttttcttatgatcttctattatagttttcrtgaacggcagctaaatattccccatttttctatagacaaaatcagaggtgcatagaatttcagaatgttaagaaatcctagagactaaacaaaatatcctctagtacttgaatccttgcttaacatcctgatcaagtggttgttcaggtggagaa

SEQ ID NO: 730860 - DNA, 515 bp, Homo sapiens
agaatacggcattcaaggaattctgaagtggttgctgcctttttgtttgtttaactggaggaactgacaaacttcaaggttttattgaaaaatgttaaaagaatttgagccactggaaatagtctccggagcagataggaatgtggtatcatcttcttccatcccagcttacagaggccttagaatccctcaaggactagggagctggagattgcttaagtacataratctgtgacccagagtggatgtctctttttttctgactcttttctcaattctctcatgtacatgtagggtagggcaaatgtaggattggccagcaaaccagcagtgaagcttcatttgggtagttggtaacatgcgtatgcttgaggtggatgactgagactaacttactttccagaagcagaggaatagagagttcctactctcaattatgttagcccgtcttttgaggaatctgggctttcctaggctgaagatgtagattggagattgccacggatccctgcaga

SEQ ID NO: 730861 - DNA, 515 bp, Homo sapiens
agaatacggcattcaaggaattctgaagtggttgctgcctttttgtttgtttaactggaggaactgacaaacttcaaggttttattgaaaaatgttaaaagaatttgagccactggaaatagtctccggagcagataggaatgtggtatcatcttcttccatcccagcttacagaggccttagaatccctcaaggactagggagctggagattgcttaagtacataaatctgtgacccagagtggatgtctctttttttctgactcttttctcaattctctcatgtacatgtagggtagggcaaatgtaggattggccagcaaaccagcagtgaagcttcatttgggtagttggtaacatgcgtatgcttgrggtggatgactgagactaacttactttccagaagcagaggaatagagagttcctactctcaattatgttagcccgtcttttgaggaatctgggctttcctaggctgaagatgtagattggagattgccacggatccctgcaga

SEQ ID NO: 730862 - DNA, 619 bp, Homo sapiens
gtgtttttcttctagactatttcaaaactatacatcccagagagaaggattatttctctatgatcgatagaagatggtaagctatttgaagcctgcctattgcagtatttactgattcttcatttgttttttgttttttttttcttttttaaacacagtcttactagtctgcagcccaggctggagtgcagtggtgcgatcttgggtcactgcagcttccacctcttgggttcaagtgattctcctgcctcagcctcccaactagctgagattacaggtgcgcaccaccacacctggctaatttttgtatttttagtagagatggagtttcacaatgttgtccaggctggtctcaaacttttgacctcaagtgattcccccgcctaggcctcccaaactgctaggattacaggcgtgacccaccacaccaggccttgtggattattattattatttttataaggatagagtcttgctattktgcccaggctggtctcaaactcctgggcttctcaagttatacttctgcctcagccttctgagtagctggaattataggaacaagacactgtgttcttttatgtttttagtactctgtagttttctattgttgatttaa

SEQ ID NO: 730863 - DNA, 428 bp, Homo sapiens
tactctgtgctagacaccatattacatgcttaacatttatcatgtcatgtcatcttcacacgctttacaaactatttgtgctattattgcttttttactaataataggcaactctgctttaaagaggttgaaatattggctcatgattccacagttaacaggtagccaacccaagattagaccatcatcctgcctggctctcaaatcacttcatttgcccctaagcatagatggatagaggcctatgcagcaatgggatcacggtactkatttacatcggatcaattcagaaagtcacattttgttatatattaactgtctttagagtgttatttagaagcctggctactccaaaagtttgtccaaatattttgaaatggcagtggtaaccatattacttttttttttaatcatcaaagttttaaagg

SEQ ID NO: 730864 - DNA, 463 bp, Homo sapiens
tggttgaaataattgacactcccaccaacaatataaaagtgttcctatttctccacatcctctccagcatctgttgtttcctgactttttaatgatcaccgttctaactggcgtgagatggtatctcattgtggttttgatttgcatttctctaatgttcagtgatgatgagcctttttttcatatgtttactggctgaatagatgtcttcctttgagcatatccttcacccactttttgatgaggttgtctgttcttttctcataaatttgtttaagttccttttagattctggatattagccttttgtcagwtggagagattgcaaacattttctcctgttctgtgggttgcctgttcactctgataatggtattggaagttctggccagggcaatcagacaagaggaaaaaataaagggtattcaaataggaaaaaaggaagtcaaattgtctctgcaga

SEQ ID NO: 730865 - DNA, 487 bp, Homo sapiens
acttaaatgtttaagtaagacctaaaaccataataaccctagaagacaacctaggcaataccattcaggacattggcatgggcaaagacttcatgactaaaacaccaaaagcagtggcaacaaaagccaaaattgacaaacgggatctaattcaactaaggaacttgtgcagctttatttggaagtgtgcaatgaggtacgtctgagtttcaaaaatgaagwaagtaagtagtcatgctttcctgactctttggtagacagccttttaagacggtgattctgagctgttactgttttgggttttctataatactaaagcttactgccaaaatgtaaccaagagcttgaattaagtaaaaagaaatcacccaaatgcacattaaaaacctcttacaacatatgtgcacattcatagataacatgtagaacttgattttgtgtattaaaaacttgtagaaaagttcaggcagtgcacttattgaatgca

SEQ ID NO: 730866 - DNA, 456 bp, Homo sapiens
gttttcaccaagggtggaaggagaatgagttgaagtatagattttacagacgtcacatcgtattgctaaaaacagacggaaaagttattgtaataaccagtaaaattgtggaacgagaaccaatgagaccactgatgtagcaattattttactctagcaagagggattgtgaggcaggaaggagggaaaagaagaagttatttatgtaattttggggtttctgctgaggaaacctgagtcaactcacttcagatgcatttagcatgtttacacaaaaaggatttkattttggcagctccaggaactactggatgaagcaaagaaagctagaattgggataaaccacattgactaattacttctcttcgttactattaggcataagacatatcttttgttgatttttgttataaaaattagataaacttgaatatcaatacattggcttcattcatc

SEQ ID NO: 730867 - DNA, 445 bp, Homo sapiens
attgaagaaacattttctaaaaaacaattatttatcattgctccctagattcttataatagttacatgataatgattttgttgttgtgattctgttgttatttctagcaacaatgcttcataagaaaaatgtatgagaaaatgtgtgagatgtatgcatgtatgagaatttcaacatgaaaacmacttaagtattttatgaagaacacatattttagaataaaaacttgactacttaaagataacactttatacaactgccaaaacctaacaaaattagaataaaaaagtccttttttatttaaaaaataatattatccaaaatttctcatgttatttttcttccttttgcatctaaaataggatgaattagtcctatggccccttcttttaccacactcgtcaccaaaagttttgtatttacattcctatgtcttcaattgtat

SEQ ID NO: 730868 - DNA, 445 bp, Homo sapiens
attgaagaaacattttctaaaaaacaattatttatcattgctccctagattcttataatagttacatgataatgattttgttgttgtgattctgttgttatttctagcaacaatgcttcataagaaaaatgtatgagaaaatgtgtgagatgtatgcatgtatgagaatttcaacatgaaaaccacttaagtattttatgaagaacacatattttagaataaaaacttgactacttaaagataacactttatacaactgccaaaacctaacaaaattagaataaaaaagtccttytttatttaaaaaataatattatccaaaatttctcatgttatttttcttccttttgcatctaaaataggatgaattagtcctatggccccttcttttaccacactcgtcaccaaaagttttgtatttacattcctatgtcttcaattgtat

SEQ ID NO: 730869 - DNA, 572 bp, Homo sapiens
ttaatatcccaaaacatataaggaatttaactccattggaagaaaacaaaaaactggattcaaaaataggcaaaagacctgaatagatgattttttcaaaataagacatatgaatagccaataggtatatgaaaaaatgctcaacatcccttatcatcagggacatgcaaatcaaaactgtaatgagatatcatctcaccccagttagaatggctatgatcaaaaggacaaaagataacaaatgttkggaagatggggaaaaaaaggaaacccttataaactgtttgtgggaatgtacattagtgcagccattatggcaaacattatggaggttcctcaaaaaactaaaaatacatctgccctaagacccagcaatcccactactgggtacatgtccagaggaaatgaaatcagtacactgaagagaatctgcactcccttgtttgttacagcagtattcacaattgccaaaatatggaattaatctgtctatcaaaggatgaatgggtaaagaaaatgtagtatatattcccaatggaatactattcagccatgaaaaagaataaaatctt

SEQ ID NO: 730870 - DNA, 546 bp, Homo sapiens
ggatggactgattttcctaagtgaggtgccataatattcagaataaccccaatgtcccttactggctgaaaaataaactatgtaaaaaagaaatatctaccacgttaggattaaaattatggcatttagtgtggaagaaatctgaatctgcagatttttaaaagtasgtgaggaagtgctctcttccatgtctagcctgggacacataatctgtccttggtccttggctttgaaaaccctttctcactgtacctctgcaccatcccccccgccgccatcctacccccttcccagacacatcctggccaactcaactcatccattattttcttcaaaaagttgtccttgactccccaggttgaggcaggtaacaacctttggttcccatagcctcctgtgcacacatttccattaggcaacaatgagtgcgttcttactgagtggccgttatggccagggagctggagatgcaattgttggccaaacagaggtgagcctgccctcagggagcttactgtctgatgcaggcagcacataccaaacagg

SEQ ID NO: 730871 - DNA, 556 bp, Homo sapiens
aataaagtgtgagaagcaatggaatccctttgagcatttctcctttaaagtcagcaggatgttgagctttctcggtagagggtgctgaagccaaactggagaaagaggcattctgcaattcctggtgtcatccaagaggggtcagtggtgcagtttgttgttgtttgaaacggagtctctctctgcggcccakgctggagtgcagtggcgcaatctcagctaactgcaacctctgcctcctgggtttaaatgattctcctgcctcagcttcccgagtagctgggagtacaggcacctgccgccatgcctggctaaggtggtgtagttttgaggacaactgtcacaactcagatcgtggtccctctgtggccttgaagcctcagtttggcaataatctttctgcagccctctcaacacagaagctaactccccacatgctcgggctccctaagcaagcttcctcctctccccaaccccctaaccaccacagcctgcacacagctccatgtgtccccgatgagcatttcgcaagtctccagatacccaagcttgctcc

SEQ ID NO: 730872 - DNA, 582 bp, Homo sapiens
agattcccactgcatactgcttcacagccagcactccagaaagttacctattgcttgcccagcaactccagaccagatcttttctgatcaaaccaatgagcttctccactacccagtcatcggaacataccatctccaataggcctattggakagcaaaccctatccatgcttgttctgctgattagacccattctgttacagggttctctgagcatcttggatctgtgatttgatgtcttatattatttgtagatagtgttctgctattatctcttcaagtaggttgtctgtccctatctctttctaatccttctggcattccaattgtacaaatttcagactatctgatattagcccgttgatcttggatgctctatattttttaaaatttattctttttacctctttgtgtttcatttggtcaatttctattgattcacctttaagttcataaattttttctttggctgtgttaagtccagtgataagtccatcaaagtcatttttcatctctgttattgtattttttatttctaagattttctttagactctttcttataacttctgttgaaattctc

SEQ ID NO: 730873 - DNA, 674 bp, Homo sapiens
ttaatttgtaatttatctagacaaatgatgttgtacgtctttatattgattgtgcttattagccatttgtatattttctcttgtgaaataactagatgttgagcacaacctttacaggattgtttgtcttttacagtattgagttgtgagactttaaaaatatatttaatatattctgcttacgactcttttctcagatagatacgttgaaaatatttttttcctaatctgtgccttgccttttcctattcttagtggttcctgttagagagctgaagtttaaacacttattattatttgcttttttttttgagacggcatctcactctgtcacccargctggagtgcagtggtgcagtcatagctcacagcagcttctaatttctgggctcaagcaatcctcctggctgagcctcccaaagtgctgggattacaggcatgagccactgcactcagtctaaaaagttatttttaaaattggattttaaaataaatttgaaaatattttctaaaattttatttatataattggcaattaaaaattgtatatattattatttatggcatctaatttgatgttttgatatatgtatacattatgcaatggctaaatcaatctatttaacatatacattatctcatatgcttatcagtttttgtgatgagaacattta

SEQ ID NO: 730874 - DNA, 555 bp, Homo sapiens
atatgcagttgtgttgacagcctgcccaggaaagcttgcatcaaaagctcacacagccaagtgactttgaccctcccttctcctgtggtcctctgagtccctaaaggatgactggcaggcaggttgccctcatcaacacatcaccatttggggcctcccaagtccccacccaacattctcatccacctgcctttggtctctgatggttcttgggggtcttcctcccacagaagcaggggtttgatcagttttggccaggtggctgtrtcatccccgaagaaagcaaaaggacctgtatgttacccccacacagaacagagtagataaagcaaggatggaggagaataaaatctacttcaatctaccgtcattatgaaaaacattgtttcatctcccgcaggctcttcctgagttttcccatgatgcccaactcttctcttagttatggtgagttcttttttgttgttgttgttgtggagggatttttttctcctccctacacttgtcttccatggcccgtacctctccaccgcatctgacaatctgcacatgttt

SEQ ID NO: 730875 - DNA, 583 bp, Homo sapiens
atagatgcaataaaaaatgataaaggggatatcaccaccaatcccacagaaatacaaactaacatcagagaatactataaacacctctatgcatataaactagaaaatctagaagaaatggataaattcctcgacactaaaattcccaagactgaaacaggaagaagttgaatctcttaatagaccagtaayaggctctgaaattgaggcaataattaatagcttaccaaccaaaaaaagtccaggacaagatggattcacagccgaattctgccagaggtacaaagaggagctggtaccattccttctgaaactattccaatcaatagaaaaagagggaatcctccataactcattttaagaggccagcatcatcctgataccaaagcctggcagagacacaacaaaaaaacagaattgtagaccaatatccctgatgaacattgacgcaaaaatcctcaataaaatattggcaaactgaatccagcagcacatcaaaaagcttatccaccatgatcaagtgggcttcattcctgggatgcaaggctggttcaatatatacaaatcaataaacgtaatccag

SEQ ID NO: 730876 - DNA, 632 bp, Homo sapiens
ggcctgagcagaagattagagctctaaggcaagattgaagggccccttagctccttgacctgaaattcatctctttttgaatttttctgaaactgaatattatctgtttttgaattggaagtgtcctctttttaaaacgtaactacccccgaagtgttagaactttatcaatttaaggatgtcctatcaaactgtattttcaacatactgtgtctatgtttaatcatctttgctcccataatgtagcagtgagtattaaataggatgagtgttttgacttaggaattagtgggaaagagggtagcataccaaaaataaaataaaataaataaataaagactttaatagcatggagctttatgaattggaaacactgatgttggcagawgttcagtattgggaaaaatctaaagttagtaagaagcctatggcatgagggtgactgtttttgaaagaaaggtagagaagttaccctgattttggaaaagtgtgaggagagagtgtcaaagataaagctcatgacacttgaaatttgctaagaagcaatcctgttctttgtattttctagctccaaaggcttctaagtaaagaaagatacaacttaatggtggggttgaccattgaaaagatac

SEQ ID NO: 730877 - DNA, 434 bp, Homo sapiens
aagtgagcattctgaagcctaatatcaaaatgttctggggtttgcggttaaagaacagaatgcaaatgttacaaaccataactgtataaagactaattatattcataacaaaaataagaagagaaagatagtagaaatatattctggtccattcaactttcacagtgggagagaatcaacaaattatgttatgggtgattaaatattattttaaaagataaaggtcattattagaaaaattaaaaataacaaaatcaaataaagttgaatgacgaaggtgggagacgaaagtgggttwaaggggtaaagtggaactatattaaaagagtcaatggagagcgcccttggaaataacacgaaaattaaagaactaaatataatttatacagcacataactaaactataaatcttcaaattaaaagaaaataggtac

SEQ ID NO: 730878 - DNA, 615 bp, Homo sapiens
aagattattgtaaaatttaatgcaagagaatttctctgataaacaaataactgaatctgcagtttgaaggaaaacactgctccagggtaatttgatatagaaatctcaatatcaagctataagctaagttagatatttaagtattatttcttaaaaggcttttttgggcatcttaaattaaaaaacaaatcacgtataataggagaaaatcagtgacctgccaaagttctcttcagcaaccttcaaagccagaatacaatgaagtgatttctacagagttcttagaatagtgtgtgacccaaaagattacacccagccaaagtatcagtcatagtataatggccatagacatatcagatttgaaaaatatcaaagaatatacaacctacaaacccttctcgacaaaaatttggacaaagcaatttagcaaattaagagaaagctcaaatagaaaactcaacrtaagcacaaagtgattgatggtaaacattaaccaaataaaatagaaaaacaaatcagaacaatgttaaaagtcatcatttctatagaagaaataagtaataaatatacagtgtatataacaatatagacacacaaattaaaggtaacaaaatt

SEQ ID NO: 730879 - DNA, 637 bp, Homo sapiens
acagctaatactgttatatctcaaaggcatgctctttctcttttggggtatatagaatttttgaagcttcaaagagtcttgaaaaactgaggataatctataggtaaaggcaagagcaaatataactgatgtaatagagtttctgcttgctcattttagccctctttcctaacagctctaccattagattttacatattctcctccagcctacatcttatagtcagttttttcatattttccattccagaacaatcaatttccttgcattttatcctgttaacctaccagctgttttcactgctgccayttccaaatgctgtggacagctagaaaagttagataaaacaagagtccagcaaccatcataatattctgataaactccaccacaaattaatttcaatcattgtatctctgcagtcccctggctcctttatacacctctgtcttctaaagctgagtctgagatggggattctttttccattgatttattaaatgcaatgccctcagagaaagaagtgagaaagaggataaggaaacggaaaaaaatccaacaagaatgcgtttccaccttcaggctagctgaagtctgatcctacggcaaagctctggttcgttaattgcacccacagag

SEQ ID NO: 730880 - DNA, 530 bp, Homo sapiens
cccaaatgttagttctattttaaaagtaacctttgtagagcaaggagacccttatactttgtcattcagataaagcttcatgttccagtggtgaacctgcaaaattcaaataagagtttaggcttttggggtacatattatcgctttatagaagagtgtgtgttcatgtatcttcctgtatttgtgtgtgtgagagagagaaagtaaactttcaaaattgtactgttaatatgcctttagaaatyagcgagataaaaacatattttaatataaagaaggtatttattttctttttctttttttcccttgaagcatactcaactttactcagttatgagtactgaaagttgaatcccagttcaagtttcctttatgggtttattttctagtgtccaagaagacacagaagaaaagcattgtcactatataacaacttactgtgcatttaacaggtagaaatgaaagttaacttttgccaatctctgtttatttgatttctttctgactgccaaactgagttcttaagagaa

SEQ ID NO: 730881 - DNA, 640 bp, Homo sapiens
aaacaacatccagaaagtattacatttacccttgaacaccacaaaataaatagaagacaaattctgtcccatatcttcttgaacagatcatcatgttccctctcacattctgaagacttattgaacttactgaacccacagatgaagtggtattaacggaaaagacgtctatttctggaaccttagatttattgaacaactttccgtaaaacatcctgtgttttaggagaatttcaatggctttaaacagtaatacatatatactttatttatttactctattaaagaaaaaacatagcccttaaaatattcttattttctcaaaacaaatagatatgctcctmctatgtgcaagattgtgttagatactagagataaaaacatgaaaagatataacctaaaatgtacctaccacagaaaaatattatcctaaagacaactactacaaataagttaaatcaggaattcaaatttccaagaaatccatatccagatttacaaattgtactggcattcagtcaaaagcctgaggcagaagaaatagtaaataacaaatctccaggtgataaatatgggtaaacattggcaggatttatgaattaaactgctaaaaacaaaatcttgaggatataggtataat

SEQ ID NO: 730882 - DNA, 547 bp, Homo sapiens
aagaagagagagaagagtggagaggactttgtcttgaatcttggataccacctcagccacagcaggatagtaaaccagtcagagtcatgaggccccctttttagcccctagctccctgatgatatttttaggcacaccatgggctagaagggaacacattgccttgaagaaaaagacccagtcctggaaagattcctcacctgctaamtgaagagcccctgggccctgaataaccatcaatgatacccacgtaggacattctggactttgggtgacactctgagacttgctggttttaggagagactcagtgcattctcagctgtggtggctaaggggcaagatcccttctgtttaagaaaagcagatgtaaaagtaaaggggactttttcttgcacagtaggtaccagctcagccacaggtgggtagagcatcaagtgggctattggggtcctgattccaggacttagttcttggacagcgttcttaggcctgctgtaggtcaaagaagatctcagttcctggaaggatgagtcccatcccaggca

SEQ ID NO: 730883 - DNA, 547 bp, Homo sapiens
aagaagagagagaagagtggagaggactttgtcttgaatcttggataccacctcagccacagcaggatagtaaaccagtcagagtcatgaggccccctttttagcccctagctccctgatgatatttttaggcacaccatgggctagaagggaacacattgccttgaagaaaaagacccagtcctggaaagattcctcacctgctaaatgaagagyccctgggccctgaataaccatcaatgatacccacgtaggacattctggactttgggtgacactctgagacttgctggttttaggagagactcagtgcattctcagctgtggtggctaaggggcaagatcccttctgtttaagaaaagcagatgtaaaagtaaaggggactttttcttgcacagtaggtaccagctcagccacaggtgggtagagcatcaagtgggctattggggtcctgattccaggacttagttcttggacagcgttcttaggcctgctgtaggtcaaagaagatctcagttcctggaaggatgagtcccatcccaggca

SEQ ID NO: 730884 - DNA, 609 bp, Homo sapiens
gtgctgaactgggcccagagacagtgggcttgtggggcacaggggaggaactgggaatagatttactgagaactggccaggacagctgagggaatgctggcatcacccctctcctaaccccaggcttcatagctcatggctccaaaagagaccccttcctaacacttgagaagaagagagagaagagtggagaggactttgtcttgaatcttggataccacctcagccacagcaggatagtaaaccagtcagagtcatgaggccccctttttagcccctagctccctgatgatatttttaggcacaccatgggctagaagggaacacattgccttgaagaaaaagacccagtcctggaaagattcctcacctgctaaatgaagagcccctgggccctgaataaccatcaatgatacccacgtaggacattctggactttggktgacactctgagacttgctggttttaggagagactcagtgcattctcagctgtggtggctaaggggcaagatcccttctgtttaagaaaagcagatgtaaaagtaaaggggactttttcttgcacagtaggtaccagctcagccacaggtgggtagagcatcaagtg

SEQ ID NO: 730885 - DNA, 635 bp, Homo sapiens
attagggcaggagagcttaaaaacaaaacaacacaataaaaccttaacgttaatccctagaaaaacaggagccagattgggctaggctggggtcgagataaggggaataaatcacagtgacatacagaatttcaagcagatgacttatgmacttttattttttaaattaaaaagcatataatatttgatctcaaatgcccacctgaattagtgaaagcatgctacataactccttccttggttctgccaaatcacttatattttgcactaaatgtgaggttgttgatgtccactaaagtttttttactatgaaaaattgttagcatacgtgatgtgagtagtacaattgagcctccaggcatcatcatccaccttcaacaattatcaactccagcccatcttgttatgtctttccacaacccacgttccccctccaaatccctgcttattaaaaacatatccaacactgtacgaaatcacccacaaatatttcagtatatagctatagaagaaaagagctcttaaaatataacaagcatattattaaataaaattagctgtaaaattatctacagttcctttatataaaccaatatcccatcagtgttcaaatttccctgggtagtagagtttta

SEQ ID NO: 730886 - DNA, 625 bp, Homo sapiens
atttgttacttctgatataactgcatttgctttataaaatattcttactaaaatttaaatgcattgagggtgttcttttttaattttatttcttctttaaaaaataactttcatatcacagccaggtccaatgttgatggtgttctcatacaacacaacgcagaatgttgttctggctttcaaggcttaggctcacggcaaatggaaaatygtggttggttagctcatagtgggtttgcctggtgaattacagtatctgcactaaactcactagatcaggaagaaaggctaggaactgagtgcctactacgtccttcggactgacctaggcacagactctctgtcttcagatctctcattagctgctttgtgaccattggccccaagatcctccctcatccctcatccgactctggtctgtttaggagagagctcacaacattatctaggcacatctaatgcctgatatgcagagaagcaagcttagggatgaaaggtgactaattcagagggcaagagggctctttaaagatgagacttcaggatcccgtattcaggaaatacttaatgaagaggcaacatatggtacaaagttttagtctaggaataagaagccaattctata

SEQ ID NO: 730887 - DNA, 625 bp, Homo sapiens
atttgttacttctgatataactgcatttgctttataaaatattcttactaaaatttaaatgcattgagggtgttcttttttaattttatttcttctttaaaaaataactttcatatcacagccaggtccaatgttgatggtgttctcatacaacacaacgcagaatgttgttctggctttcaaggcttaggctcacggcaaatggaaaatcgtggttggttagctcatagtgggtttgcctggtgaattacagtatctgcactaaactcactagatcaggaagaaaggctaggaactgagtgccyactacgtccttcggactgacctaggcacagactctctgtcttcagatctctcattagctgctttgtgaccattggccccaagatcctccctcatccctcatccgactctggtctgtttaggagagagctcacaacattatctaggcacatctaatgcctgatatgcagagaagcaagcttagggatgaaaggtgactaattcagagggcaagagggctctttaaagatgagacttcaggatcccgtattcaggaaatacttaatgaagaggcaacatatggtacaaagttttagtctaggaataagaagccaattctata

SEQ ID NO: 730888 - DNA, 530 bp, Homo sapiens
ctccttctcataccctttctcttgcagctgtttctgagaacttgtctgaacttagaagggtgaacaaaaaggaatacagaatagtccttgtatgtaaagaccaacttctgctaaaagtccctgatgtgcaggcaagaaaacaacttgtatttatttttacatggtgcttcctcatccctggaggtttcctgctcctacccatgttattctcctttaatctctgatgtcattgtgttgccttttgtaatrcttactgcagccatcctcatacatcagtaattatatatttgactcatctttccctgccccgctagcctgctgggacttgagggcagaggtgttgtctcttactcatcttagggtccctttttgatgcctgtataattttttgttccatggatacttgatgagttgaattcttgccactccgtctgccaactagttactaacttattttatttatttatttatttatttgtttgtttgtttgtttattgagacaggatgtcactctgttgtctacactcaag

SEQ ID NO: 730889 - DNA, 599 bp, Homo sapiens
cgggtgtgatatggacccacatgagagatggcagggaaaggaggcagggacagtgctcagtgaggatgcacacctggctctctttctggcaggagacactgaataatcaactcagttaggtgaggaagaacctatagttacaatttgatctgagacttatgcaaaaagaattatactgcctgagtctcatgattaatttctgagtaagaaaagcaagtataaatgcccaatttcaggcatcaggagaaagaactaatcccaaccaaaagttcaatccacctgaaccctaatccttgaaattcctccaagaagggacaaggcttttactgtcagaaggtaaagaaacttgaaatgcacatgtgtttgtgagacagagcacactaagttcaggttgacatggagagcataatcattcctgccagtagackccaacggggggtgggggaggggcataggtggcactcaggccccggactctaaaaggggagtctgggagctccagacgtggaagaaaaatcctgcttcctctgcgctttggcttaggagtgcctctgaaggctgatatcacacagccgctgggtcaaggaaagactgaaccg

SEQ ID NO: 730890 - DNA, 660 bp, Homo sapiens
ctccttgccacgctcacacctaggaactactgctggggatgatgaggtgcccaggcagaagaagcagcagccgccattgggtcgctggtatggcacctgacttgcttttcctgagcggcagcacagactgacccatgcaagagcgccagtgggcatagaagtcacggagtccagatcgggaaggcactcggtggccttctgtaccagctgctcatgcctggcagcaagggcttttgtggcattcctatggatggtgagggacactcacgacctccgaggcgctctcttgccaccttgccagacagctgtgagtagtaytcattttctttggtgtaaacctggaccacccctacgcatgggccctgcttctgttcgctagactccatattttctgtgccctgaaggaaacaatacgtcaaccctggaacctcagagcttgcaaaggggcaatttgaatgtcttattcctccgttttgtggcccctccatttccactggttgtgcagctaccaatgcatccgaccgccgttttcaagggaccatctcagcgggtctagttgcccaacccaccacggccatatgcagcagtactttagcaaagacgctgcgaaaacactgggttaaataaagctgaacaggtttctttattaaagaacctttc

SEQ ID NO: 730891 - DNA, 456 bp, Homo sapiens
atatatagattccactgtgttctctctctttcagatgagttataaaatttaaaaataaatctagtgctaacctgggtccccaggggatcacattatttatacattttccgtcagagaagtactaatttagccccagttttatttcctgaaattaaacctatttattccctcatccttaataaagttttayacaatcccagggttactactcactaatagtctttggtaaagaatctagcaaaagactgtgaaaatctaaatctacagttgtgctttttaaaacgtcaattcttcgggggatggagtgaaaactctggccagttaagcagacaaaatcttccctaacaacagcaacaacaacaaaaagtcagttgtttttccaggaatgctcagccatccttttctataaatcccaataacttgtttgtcgctggctatgattccaatagtctcttt

SEQ ID NO: 730892 - DNA, 639 bp, Homo sapiens
aaccgctgcatctaagtcactctccatctcctgctgtctacactgtatcagacccagtcttggaggaaggaattgagcacatgtgggccgcgggccagccccgatggcatctgccacccccctgcaattgtcccattctgggtgaagtattagcatagcaagcccatgtgatcagatggggactctatttttcaaacagctttaccagtaagataagagaaaattttatttcctttgcctaaaacctctttccatacctcagttggttccaaacttaggcagaaaatagagaagttttgcttctgaccctcccccacccccyagctttccaccgaggccccatttgctacacttccccttcctgcatcctccagacagcccctggcacagtcctacgtggcctccgagcaccactggaaaatcacatggaggtagcaagcagtcaggcagagaggtgaagagcgctccggagctggattctgattttggctctgctgcttactagctatgagacttggagcacgctacttaatctctccgtgcctagtttcctcctctgtaaaatgggatggtaataataaggatgatggtatttatctcgcaggaatgtggtgaagaggcagtgtgttagtctaaaca

SEQ ID NO: 730893 - DNA, 566 bp, Homo sapiens
agattgcacaagaaagagattgaatccctgaatagaccaataagaagttccaaaattaaatcagtaataaaagcccagaaaccagaaaaaggccaagaacagagagattcacatacaaactctaccaagtatataacaaagagctggtaccattcttactgaaactattctaacaacttgaggaggaaggattcccaaactcattttatgaagccagcaccaccttgataccaaaatcttccagagacataacaaaaacaaaaaatgcttcaggccaatacccttgatgaacatgcatccaaaaatcctcaacaaaatgctagcaaactgaatctagcagcacatcaaaaagcttatccaatatgatcaaataggctttatccctggggttcaaggttcattaaactttcacaaatcaataaatgtgatycacacataaacagaactaaaaccaaaaacgatataatctcaatagatgcagaaaaggctttgggtaaaattcaatatcccttcatgttaaaaaccctcaacaaaccaggcatcaaagaaacatacttcaaaataat

SEQ ID NO: 730894 - DNA, 586 bp, Homo sapiens
gaatacttaggaatacagctaaccaaagaggagaaagacctttaaatgagaattacaaaatgctgctcaaagaaaccagagataactcaaaacattccatgtccatgaataggaagaattactattgttaaaatggccacaccactcaaagcaatttatagattcaatgttatatctatcaaactaccaatgaaactattcacagagttagaaaaaagctacttaaaattcatagaatgtaaaaaaagagctcaaatggccaaggcaatcctaagcaaaaaaagaacaaacctggaggcatcrtattacccaacttcaaactatactacgcagctgcagtaaccaaaacagcatgataatggtacaaaaagagacaattagactaatggaacagaaaacagagctcagaaataatggcacactcctaaaaccatcccatctttgacacaatcaacaataaaaagcaacgaggaaggacactctattcaataaatggtgctgggataactatctatccagatccacaatattaaaactggatccctttcttatgccatatacaaaaatcagctcaaggtggattaaa

SEQ ID NO: 730895 - DNA, 580 bp, Homo sapiens
gcttgggatgccgcctttgcccagtctgcttcttgatgttgacccatgctcacctggccatgcctcctggggccctccaatgctgtccccagcccctggaaacctgtggcttcgtctctttcccctggcaatgctgactgtctggctggacacccccagctcyggcagggatgcactggccgagggcaggactccatggtggccagtccagccgggtgctgggggcccagactcccaacattgcccactgcccaggagaaaaactctgctgaatctccaccgggaagttctcacctccactgtgacaaaaaaatgccctctgtcccccaagtgcaccctactgcagccagcttctctccccaggtctgcagggcaaatgccccaccccacaggccttccccctgcctgatctgccagccctttccatgcaccagtgaggagcagtctccctgtactccagggactggccttcaggcatcctgggggatggagggtcacagcgaacacagccccccgtgcacgctgcaccctgtatgattaccacacccccaccacatacctgggacccatagagttgtgg

SEQ ID NO: 730896 - DNA, 636 bp, Homo sapiens
ttctttaaatgtttttgagctttgttttgggatgcaatctgatcctttcaaagactgcttttgagtgtttttcaacaagcacagagtgactcatagtcaagggctcatttggccatctctgtgtccttcttgtcctcttctctatgtcccattaattgtgaagttttctgatctggctattagcgacctattcccagctttgtgtgagctccactgattttttctcctgcaatttgggtggttctttcccrtgtcttaggtagttttcttgcccttgtgcactgatcagtcctgacgaagacactctgcagccctctgcagctccctcctcctctccagtcttctgccctgtgaactccagccagcttgctttgggctgtcataataaaatatctcaggctggtgggctgaaacaacagacatttatgttctcacagttcaggaggccagaattctgaggtcaaggtatgggcagggctggtttctcctgaggcctctccttgtggcttgcagatgccacttccttgctatgtcctcacatggcctttcctctgtgcacacgcagcctggtgtctgtgtgtacagacttcctcttcttatagggacgtcagtcagattggattagggacccccttg

SEQ ID NO: 730897 - DNA, 641 bp, Homo sapiens
tagacaagtttattctaaaatgtatgggaaggcacagatcctaactacataaaattatcttagaaaagaagaataaaatgagaagaattgctctacatgatggtaagtcttcctacagtatatggctacagaaaccaagacagtgtggtaacagctgagggatagacatatagatcaatggaacagagaactcagaaatagctccatcygactatccacagctgattctttttataagggttcaaaagcaattcaatagaaaaaaggcagcccttttaacagatggtgctggagcaactggatagccattggcaaaaacaacaacaacaacaacaaaaaactgaatctgaacctaaatctcacaccttatccaaaaaataacgtaaaatggtttcagacttaaacgtaactgtaaaactataaaacacataaaataaatgagagaaaatcttcagaatctatggctaggcaaagagtttctcagacttgacaccaaaagcatgatccacaaaaggaaatattgttaagtgggacttcatcaaatttaaaagttttgctctgcaaaagtccatgtgaagagtatgaaaagacaagctgcagactggaagggcatatctgtaaaccacatttgcaaaggagtt

SEQ ID NO: 730898 - DNA, 543 bp, Homo sapiens
aaaggttacaataaatttctggctgtttttgaaaagttcttacatctgttcttactgggtcctcaatcaaacatgatcacaaggttttttgtaaactgtgtgctctgtaatatatttcaatgtgcaatcctcggactccatgaaatttcaaggctatcaaatcaaagctcatggccttaatactagtggtactgtttgacacccacccccttcactatttatctggctgtgagaagcttcaggggattgaagatacattttggtactttgaggaacaagttatatattcagaaatcataataaacacagaatacttttacactctctagtggacaaacctttttcataatgacatcatgcacattcrtattttttaactctatcatcttgaaactggtcttctgcttttgattgtttgcaaaaaaatttggacaatatttatgaggcaaaagtccctacaggccatctattcccttaaaaaggtaaaataaactcaatgcagaaaacacttttttgataggatacaaatgaggaatatattaa

SEQ ID NO: 730899 - DNA, 706 bp, Homo sapiens
tggagttgcaacccaaatcactcccaggtataatttctggatttttctgaggttctgcagaaaaactttatcttcccctaggcagtcctcacttcatttagtcttaggctttctctggtctcaccatttgctttcatattccccaaattttggtgcaattgtcttctcttccattctccttgtcttttaagttaatgcctttaaaaattccctttactgatacttcagtggaattagcagagattaatagatgccatgttttcttggctttttaaaagattaaatgtaattccatgttttatatatgattttcaaaaaatgaattaccaatcgtaaattacaacagtatgcaatacacttagggtgaataagattagaagcttaaataaggttgatgttttgtactggkgatattttaaaatccaatttggtattagatgattaatatagcacttttacctaatttattagagaattagtttaatttcattaaactagacaatcctgttttattctcaacaatggaaaagtaggattatatagaagaatatattctttctttccttcctaccctatccctatggcattcagccacacatagattacacagacactttgttctcaagcataacttgggcttcaagcataacggaatattcttctgaaagagaagacagatgacagcaaagtagaaaacaagttgtct

SEQ ID NO: 730900 - DNA, 572 bp, Homo sapiens
gtatccaaaagaatatatgtttgtattatgttacacacttataccatagcttaacaaaaatacagctttatcatggtgctggaaatagagtttatttttattttttattttattttttttgagacagagtctcgctgtgtcgccaggctagagtgcagtgtcatgatcttggctcactgcaacctccgcctcctggattcaagcaattctcctgcctcagcctcttgagtagctgggactacaggtacatgccaccatgcccagctaatttgttttgtatttttagtagagatggggtttcactctgttggccaggatgatctcaatctcttgacctcgtgatccgcccgcctcggcctcctcccaaagtgctgggattacatgtgtgagccactgcacccgaccagaaatagagtttattcctatacccascctattttattcatttgtggtccatttctgtgtttcctgacctagcccctaagcctactgcttctggcaggtgctaaactagtcctagttgaattgaattttttagctgtttcaactcagtagctcttttgacctgttgc

SEQ ID NO: 730901 - DNA, 524 bp, Homo sapiens
cagggtgggggcgtcacctcacccaggaagcacaaggggtcaggggatttccctttcctagccaagggaagctgtgacagactgtacctggaaaatcgggacactgccacccaaatactgtgcttttccaatggtcttagcaaatggcacaccaggagattatatcccacacmtggcttagcagatcccacgcccacggagccttgctcactgctagcgcagcagtcccagatcaaactgcaaggtggcagtctggctgggggaggggcatctgccattgctgaggcttgagtaggtaaacaaagcagcctggaagatcaaactgggtggagcccaccgcagctcaacaaggcctgcctgcctctgtagactccacctctaggggcagggcatagccgaaaaaaaggcagcagacaacttctgcagacttaaacgtccctgtctgacagctctgaagagagtagtggttctcccaccatagtgtttgagctctgagaatggacagactgcctcctcaagtaggt

SEQ ID NO: 730902 - DNA, 569 bp, Homo sapiens
tattcagttacaaggaacagaatccactgtagctggtttaagaggaaaggggtttgttacagaatattaaatggcttactttaaaaagctaataaaaaaagactccattctaaggttctagaaacaattcccaaagccacactacagaactgggtagctgaaggagctgctgccttaaaaatgatcagggatctgtaaaattagcaaactgccatgtgagaaaytactaacactacttgcttccaaaccacatcacgttcactaaaatctccaccagcaaaaatatgaccctgtgccttgactctctcctcctagattaactgcaaatctaagtctcatacaatgtatctgtctgattgtcagaaggtaaattatacccagaactctaggacatttgaagaatggcttgctttgttttgctttggctttgtgtgttgagctttctgccttccacatattataaggaagctgaactgaaacgtgtggtgagtgagccagaccctatcacctaccatgaagaccaaaagcagaacaatggggaacatgaacactgaaagtgtgagaagttt

SEQ ID NO: 730903 - DNA, 464 bp, Homo sapiens
aatactccccaaactgatctacaaattcaacacaattcccatcaaaattctggaccaataatctgatcctaaaatttatatgagagcgcaagaaacagaagagctaaaacaaccttgaaaacaaacaacaaagttggaggattcacgcttccccatttcaaaacttactacaaaatctacagtaatcaagacagtgtggtattggcataagayaagacatacagattaatagaatgaaattaaaaatctataagtaaactcacacttactgtcaattgatttccaacaagggaaattttttcccattgaattgatttccaacaagggaaatcaattcaatgggaaaataaaagtctttccataaatggtgctgacacaatctgaaaaaaaagaagttagatcctacctcacatctgtataaaaatcaactcaaataggatccaataactaagtgtaaaagctaa

SEQ ID NO: 730904 - DNA, 540 bp, Homo sapiens
atgctacaacatagattaaccatgaaaacattatgctaagtgaaagaagacactcacaaaaaccacagacgattctattcacatgaaatgtcctggacagggaaatctatgcagacagaaagtagagttccttagggttgggaaagcagggggagcaatgggatggcagggagtgggggtatgatagctaaagggtgcagggtctctttttgttctaaaattgactatggtggcggttgcacatagctrtgaatatattaattgaacactatatacaatgtatgtgtgtgtgtttattcatttctgcagttataacaaaatacttgagactggataacttataaagaacaaaatctatttctcacagttctagaagctgggaagttcaagatcaagatgccagcacttggtgtctggtgagggccttcttgctgtgccctcacatggcagaatgcagaagtgcaaaaaggggatcctagctagttctctccagccctttgatgggggcaagaatccattcatgggactggagccctcatg

SEQ ID NO: 730905 - DNA, 650 bp, Homo sapiens
gttgatttaggatccattggcctagagatggtatcttagtctgttcatgctgccataagaaaatatcatagactggctggcttataatcaacagaaatctatttcttgcagttctggagactgggaagtccaagatcaaggcaccagcagatttggtgtctagtgagagcccgcctcttggtttgtagactgtgycttttcactgtaacctcacatcatggaaggggtaaaggagctctctgaggttccttttataacagattagtgccatgagtgctccaccatgatgacctaatcacctccctaagtccccacatctaaataacatcacattggggattaggtttcaatatataaattttggggggacataaacattcaatctagcagatagccattaagccatgggactgggtgagagtccctagggcagtggttctcaaacctaagtgcgcatcaaaatcacttggatagtttgttaaaacacaggtggattggacccgccccagagtttctaataccgttgtactttcagaggcagtatgaacattttaaggcttttgaaatatactggtaaatttctttctggagagctcatagcaatttatatttttaccagctgaatacaagaaagtctattctcagcgtac

SEQ ID NO: 730906 - DNA, 523 bp, Homo sapiens
aattcagaaaaaatatgtggggtacagatgttgatttaggatccattggcctagagatggtatcttagtctgttcatgctgccataagaaaatatcatagactggctggcttataatcaacagaaatctatttcttgcagttctggagactgggaagtccaagatcaaggcaccagcagatttggtgtctagtgagagcccgcctcttggtttgtagactgtgccttttcactgtaacctcacatcatggaaggggtaaaggagctctctgaggttccttttataacagattagtgccaygagtgctccaccatgatgacctaatcacctccctaagtccccacatctaaataacatcacattggggattaggtttcaatatataaattttggggggacataaacattcaatctagcagatagccattaagccatgggactgggtgagagtccctagggcagtggttctcaaacctaagtgcgcatcaaaatcacttggatagtttgttaaaacacaggtgga

SEQ ID NO: 730907 - DNA, 650 bp, Homo sapiens
gttgatttaggatccattggcctagagatggtatcttagtctgttcatgctgccataagaaaatatcatagactggctggcttataatcaacagaaatctatttcttgcagttctggagactgggaagtccaagatcaaggcaccagcagatttggtgtctagtgagagcccgcctcttggtttgtagactgtgccttttcactgtaacctcacatcatggaaggggtaaaggagctctctgaggttccttttataacagattagtgccatgagtsctccaccatgatgacctaatcacctccctaagtccccacatctaaataacatcacattggggattaggtttcaatatataaattttggggggacataaacattcaatctagcagatagccattaagccatgggactgggtgagagtccctagggcagtggttctcaaacctaagtgcgcatcaaaatcacttggatagtttgttaaaacacaggtggattggacccgccccagagtttctaataccgttgtactttcagaggcagtatgaacattttaaggcttttgaaatatactggtaaatttctttctggagagctcatagcaatttatatttttaccagctgaatacaagaaagtctattctcagcgtac

SEQ ID NO: 730908 - DNA, 523 bp, Homo sapiens
aattcagaaaaaatatgtggggtacagatgttgatttaggatccattggcctagagatggtatcttagtctgttcatgctgccataagaaaatatcatagactggctggcttataatcaacagaaatctatttcttgcagttctggagactgggaagtccaagatcaaggcaccagcagatttggtgtctagtgagagcccgcctcttggtttgtagactgtgccttttcactgtaacctcacatcatggaaggggtaaaggagctctctgaggttccttttataacagattagtgccatgagtgctccaccrtgatgacctaatcacctccctaagtccccacatctaaataacatcacattggggattaggtttcaatatataaattttggggggacataaacattcaatctagcagatagccattaagccatgggactgggtgagagtccctagggcagtggttctcaaacctaagtgcgcatcaaaatcacttggatagtttgttaaaacacaggtgga

SEQ ID NO: 730909 - DNA, 650 bp, Homo sapiens
gttgatttaggatccattggcctagagatggtatcttagtctgttcatgctgccataagaaaatatcatagactggctggcttataatcaacagaaatctatttcttgcagttctggagactgggaagtccaagatcaaggcaccagcagatttggtgtctagtgagagcccgcctcttggtttgtagactgtgccttttcactgtaacctcacatcatggaaggggtaaaggagctctctgaggttccttttataacagattagtgccatgagtgctccaccatgatgacctaatcacctccctaagtccccacatctaaataacatcacattggggattaggtttcaatatataaattttggggggacataaacattcaatctagcagatagccattaagccatgggactgggtgagagtccctagggcagtggttctcaaacctaagtgcgcatcaaaatcacttgsatagtttgttaaaacacaggtggattggacccgccccagagtttctaataccgttgtactttcagaggcagtatgaacattttaaggcttttgaaatatactggtaaatttctttctggagagctcatagcaatttatatttttaccagctgaatacaagaaagtctattctcagcgtac

SEQ ID NO: 730910 - DNA, 633 bp, Homo sapiens
ttgtcctcactgctacactcccaccagcaccatgacagtttacaaatgccatggcaacatcaggaagttaccctatatggtctgaaaaggggaggcatgaataatccaccccttgtttagcatataatcaagaaataaccataaaaatggacaaccagcagccctgaggaatggccattcttttattcctttactttctgaataaactcgctttccctttactctatggacttgccctgaattatttcttgcgcwagatccaagaaccctctcttggggtctggattcggacccttttcctgtaacacgttcacattgcagtctgtgagaaagagaagagggaatcagaaggccttatgaaacctgacacagggaatgaaagggaaagaagcttgaccagctgtccaatgttttaagagtcattagattttgggactgaaacaggctcctaaggaatgctgtgtctttctaggaaaaaaataatcagtctctgagatgccctcacccatcctgtttctgtccctaagaagatgccctggtgtgaagggaagagggttgtggtttatgtccccactgatgtgggatgagttggggagatttggctgctcaccaggtttgatgatgtctttcctg

SEQ ID NO: 730911 - DNA, 602 bp, Homo sapiens
tacataatcagtctttgtaggtagttgtatatgtattatgttaccttatccacctcaaaatattagaaggaactgtatagataagacccttcctttatttttattgtttgaattttaagggtaatactttttattattttttaacttttaatttttgagacagggtctcactcttttgcccaggctggagtgcagtggcatgatctgggctcactgccacctctgtctcccaggctcaagcgatcctcccacctcagcctcccgagtagctgggactacgggtgtgcaccacccagctaggctcatttattgtagttttatagagatrgggtttcaccatattgcccaggctggtttcaaactcctggattcaagtgatccacccacctcggcctcccaaagtgttgggattacaggcatgagccaccatgcctggaccctagtaccttttagaatagcagtttacccatattataatctctggctctctcgagaactttgtgtatttctgttctatccttgaattgaattctgcacttcaaaatgtactccacttggtaaagaacagtattatagaaaaggaaaaccccaaaccattgtag

SEQ ID NO: 730912 - DNA, 508 bp, Homo sapiens
ttttttttttttttgtcaaactggtaggattaattatttcattgtgctccgaggttgagcatctctatgtatttactggccacttgaatctccctgcctgtgaaatgtctattcatccttttgtccactttcctattttttttaattgattattttaggggttatgtttttgggattatagttctttatcacgtgttgcaaatatttttctctcaatctgtcacttctgtttcggtttgtgatggtgcctttgataaacaggagttcttaattttaatgtagtctaaattaggagtttttctttrtagtttgttcctttttggatctcttaaatcctccctgttttgaagtcgtgaagacatttttagtattaacttttggaagctttatgactttttcaccttttgattttaatccacctagaatttatttttatgtgatttataggagtccaattttttttaaaaaaattaatagctaattgtttcaatattatcaatcaaacagt

SEQ ID NO: 730913 - DNA, 684 bp, Homo sapiens
taaagaggtttattggacttacagttccacatggctttggatgcctcacaatcatggcggaaggcaaggaggagcaagtcatatcttatgtggatggtggcaggcaaagagagagcttatgcagtcaaactcccatttttaaagccgttagatctcatgagacttatttgctatcacaagaacagcatgggaaagacttgcccccattgattcaattacctcccaaaaggttcctcacacgacacattggaattgtgggagttgcaattcaagatgagatttgggtggggacacatcatatcattctgcccctggcccctccgaaatctcrtgtcctcacatttcaaaaccaatcatgtcctcccaacagtcctccaaagtcttagctcatttcagtattacctcaaaagtccacagtccaaagtctcatctgagacaagacaagtcctttctgcctatgagcctgtaaaaaaatcaaaagcaagttagttacttcctagatacaatggaggtacaggcattgggtaaatacagccattccaaatgggcgaaattggccagaacaaaggggctactggccccatgcaagtccatagtccagtgggccagtcaaatcttaaagctccaaaaggatcccctttgactccatgtctcacatccaggtcatgctaatgcaagacatgg

SEQ ID NO: 730914 - DNA, 646 bp, Homo sapiens
ttggacttacagttccacatggctttggatgcctcacaatcatggcggaaggcaaggaggagcaagtcatatcttatgtggatggtggcaggcaaagagagagcttatgcagtcaaactcccatttttaaagccgttagatctcatgagacttatttgctatcacaagaacagcatgggaaagacttgcccccattgattcaattacctcccaaaaggttcctcacacgacacattggaattgtgggagttgcaattcaagatgagatttgggtggggacacatcatatcattctgcccctggcccctccgaaatctcatgtcctcacatttcaaaaccaatcatgtcctcccaacagtcctccaaagtcttagctcatttcagtattacctcaaaagtccacagtccaaagtctcatctgagacaagacaagtcytttctgcctatgagcctgtaaaaaaatcaaaagcaagttagttacttcctagatacaatggaggtacaggcattgggtaaatacagccattccaaatgggcgaaattggccagaacaaaggggctactggccccatgcaagtccatagtccagtgggccagtcaaatcttaaagctccaaaaggatcccctttgactccatgtctcacat

SEQ ID NO: 730915 - DNA, 496 bp, Homo sapiens
tgggcgcggtggctcacgcctgtaatcctagcactttgggaagccgaggtgggcggatcacctgaggtcagcagttcgagaccagcctggccaacatggtgaaaccccgtctctactaaaaatataaaaattagccgggcatattggcatgtacctgtaatcccagctacctgagaggctgaggcaggagaatcactggaacccgggaggcagatgctgcagtgagtcaaggtagtgtcaccacactccagcctgggcaacagaacaagacactgtctcaaaaaaaaaaaaaaraaaagaaagcacgtataaggcaggcgtggaggctcatgcctgtaaccccagcactttgggaggccaaggcaggaggatcgcttaaggccaggagtttgaggccagcctggacaacacagcaaaaccctacctctactaaacatttaaaaattagctgggcatggaggaacatacctgtaatcccagctactcaggaggatcc

SEQ ID NO: 730916 - DNA, 623 bp, Homo sapiens
ggattcagggctggcagcccagtgccccacggctctggtgggcaagacacagggccctgtaggagtaagtagttaggacatctgacccagccaggagagtgggtgggcggggaagactgcctggagaaggcaccatctgggctgaggctgccagtgggatctttcttggggccaggcaaacagtcagagctcaatcagtgcagggggtgtgcatggaaatgtgaggtccactgagccttggggmaatagggtgggaagcaggggaaagatgcccctttcccggggaacacccagccccagtggtccaaacccagccccagtggtccaaacctccaaactgctctctgaaggaactctgcccttgctctcactctcccgccctccaccgctcctccgcggcctgcgtggctccaccctggtggctggattgactgtgtgccctactctctgctcacggtgccctcacccccacccttcccaggcaccaacagccacgggatcctcagcggcttcaacaagacggttctgcggacgctcccgcggagcggaaacctcattgtggtggagagcgtgctcatggcagtggcttcctggccatgctgctggtgcggcccgggatgggg

SEQ ID NO: 730917 - DNA, 450 bp, Homo sapiens
gatcctcctgcctcagccttctgagtctctggaattgcagatgtgagccactgtgccagtcttcttcatttgtgaaggatagctttgctgggtatagcatttttgccttactttttttttttttttaacttgtagtatacatccccttttctcctagmctgaaaggtttctgctgagaaatcccctgttagcctgatgaagattctcttataagtgacttgatgcttttctcttgctgtttttagcattttctctttgtcttttgacaattttaccataatgtgccttggagaagacctttttgagttgtatttatttggtaatctttgagcttcctgcatttggaagctttcaggaagttttcagttattattttattaaataggttttctatgcctttacccatctcatctccatccagaactcccagaatttcagtttttggtcaca

SEQ ID NO: 730918 - DNA, 450 bp, Homo sapiens
gatcctcctgcctcagccttctgagtctctggaattgcagatgtgagccactgtgccagtcttcttcatttgtgaaggatagctttgctgggtatagcatttttgccttactttttttttttttttaacttgtagtatacatccccttttctcctagactgaaaggtttctgctgagaaatcccctgttagcctgatgragattctcttataagtgacttgatgcttttctcttgctgtttttagcattttctctttgtcttttgacaattttaccataatgtgccttggagaagacctttttgagttgtatttatttggtaatctttgagcttcctgcatttggaagctttcaggaagttttcagttattattttattaaataggttttctatgcctttacccatctcatctccatccagaactcccagaatttcagtttttggtcaca

SEQ ID NO: 730919 - DNA, 450 bp, Homo sapiens
gatcctcctgcctcagccttctgagtctctggaattgcagatgtgagccactgtgccagtcttcttcatttgtgaaggatagctttgctgggtatagcatttttgccttactttttttttttttttaacttgtagtatacatccccttttctcctagactgaaaggtttctgctgagaaatcccctgttagcctgatgaagattctcttataagtgacttgatgcttttctcttgctgtttttagcattttctctttgtcttttgacaattttaccataatgtgccttggagaagacctttttgagttgtatttatttggtaatctttgagcttcctgyatttggaagctttcaggaagttttcagttattattttattaaataggttttctatgcctttacccatctcatctccatccagaactcccagaatttcagtttttggtcaca

SEQ ID NO: 730920 - DNA, 525 bp, Homo sapiens
agctacgtaggagtttgaaggggaagatcaggggagcccaggattttgagggtacagtgagctctgactgtgccacttgtactctagcctaggcaaagagtaagactccgtttcaaaaaaaaaaaaatggtaatggttggttggggtgggttggaraagaaagtatttctgaatttctgggtaggtaactggtagtgtcaggccaaactagctctacagtcttattcattataaataaaggcaactagaagatctccatctagctattaaaaattggttaaaatctacagagataaaggatggtgacccttgtatcagttacttattgtcacaaaatgctgcataacaagtcactccaaatctcagtggcttaatacaacagtcatttattttcatggatctatgggtcagctgaggttggttaatctagcatgagcatgtctgggaagctctactttgctcttggtgtctcttatcttctgctggaagcagcaggctggcctgggcttgttctcagggtgatag

SEQ ID NO: 730921 - DNA, 417 bp, Homo sapiens
cccaggcatcatgggcatgtggcctcccatgggcggcctcattccaggagcaggtcccactggcatcatcccaggaggaggagggcccatcattgacatcatgggagggccccccatatggggtgctgccatcattctgagatgtgcgagaagtgtcawatacacattagattgtgaagacttaatataaaaagaaagcaaagtattttgttaatgttaaaatattttatacttgtagacctggtatttcggatagatttgtttaaatctgtgatattattccaattaccttcacttcttttgttttactttttaaaatgtggttactacaaaatgcaaaagtaagtatgtggcttccatcatatttcatcacatttagtgtggaccctgaggatctaggggagttatgagccttaa

SEQ ID NO: 730922 - DNA, 638 bp, Homo sapiens
aagaggctgggggcagaggtgcagtgtgagacttctagcctggagcatttaattcttagtacaaggctctctagcattcttgtcccgctgttccctgcttggtgatactcgaggtaatgcagcccccattagccttagtcttagggcaagtttgatggaaaacagagcaccccacacctccctgcagatgtagcatgagtgagaaaaacaactactgatgtttgaagttaccaagatttaggagttgtttgttattgcagcaaaacctcacctattctgaccaatcatggtggaatttctgtgtgtatgtgtgtgtgtgtgtgtgtgtgtgtgtgtgtgtgtgtgtgtgaaactggtagtttaaaaaagttccttcttaccaaaaagaaaawaaagtagcaaccttatgttggttctcaaattaataaaatatttttactggtttataaaatagaaaaatctgagaatctgtagcttacagaactacagtgtgggatgtctataaagaccaggttattttatcagctcctaacaccccttaatagaagcttagccaagacttggactatttcagtctttcccattccacattccatggactcttgaagagacattgatgaaacggtgcagccatgaat

SEQ ID NO: 730923 - DNA, 600 bp, Homo sapiens
ctcatgcatgtgcctggcagttggtgctggttgtcagccggggaaccttgttttcctccatgtggcccctcgccctccagagcccctctccaaatggccctttaagcaggatagccaaggttttcttggtgccagcatgcawgagggcaaaaatatggaaactacgagagggctctcaaggcctaagactatttgcaccccaaaaatctgaggtctcagttaattcagaaagtttgttttgccaaggttgaggacgcatgcctgtgacacagcctcaggaggccctgacaacatgtgcttaaggtggtagggacacagcttggtttgatacattttagagagacatgagacatcaatcaatatgtgtaagttgtacattggttcagtctggaaaggcgggacaactccaggtgaaggtgagacaaggggaaggggcttccaggtcataggtaaagagacaaatggttgcattcttttgagttcctgattagcctctccaaatgaggcaatcagatatacatttatctcagtgagcaaaggggtgactgaatagaatgggaggcaggtttcccctaaacagttcccagcttgacttttctc

SEQ ID NO: 730924 - DNA, 600 bp, Homo sapiens
ctcatgcatgtgcctggcagttggtgctggttgtcagccggggaaccttgttttcctccatgtggcccctcgccctccagagcccctctccaaatggccctttaagcaggatagccaaggttttcttggtgccagcatgcatgagggcaaaaatatggaaactacgagagggctctcaaggcctaagactatttgcaccccaaaaatctgaggtctcagttaattcagaaagtttgttttgccaaggttgaggacgcatgcctgtgacacagcctcaggaggccctgacaacatgtgcttaaggtggtagggacacagcttggtttgatacattttagagagacatgagacatcaatcaatatgtgtaagttgtacattggttcagtctggaaaggcgggacaactccaggtgaaggtgagacaaggggaaggggcttccagrtcataggtaaagagacaaatggttgcattcttttgagttcctgattagcctctccaaatgaggcaatcagatatacatttatctcagtgagcaaaggggtgactgaatagaatgggaggcaggtttcccctaaacagttcccagcttgacttttctc

SEQ ID NO: 730925 - DNA, 625 bp, Homo sapiens
agccacgtagatcctggaaattctgatcctaacaccatgtaagttcaggctcccagttagaatttgccatttttttccctccttttcccccagttcatccagacccaaaccctgtcatccaggcagatttcttcattatctctctctcttttttccctttacacctctaaagatgtcagcatttgaggagttccaaattcacagggagtctttgacccaatccccacccacattggccccagctctgtttcctgtctctgtgcacctgggcaccttgccccatttttctagctaaaactaacttgaaaccctcaccaggattggcaggtgcccctagggcaaacacgcagcatgaagagggaggggtctctggcctgtttgaaatttgtttcctttttgattttggcctctggagaatttccctttcttgttttccgtaagtgtatgcctttgaaaataataytgtaatactttattttgcatttaggaaaaattggaggagccctccaatcatttagtccattggagacaataagctcttgagtgtttgctgtgtgtaaggcacactactgaccctcacactggaaaacatgagcatcctggtcagcaatgaaaatgggaattt

SEQ ID NO: 730926 - DNA, 641 bp, Homo sapiens
aaaagatgaacaaaattggcaaatgttttactagactttcacaaggaaaatagagaagacacaaattttcaaaatcaggaatgaaagtggaaacgttactaccaaccctgcagaaatgaaaagttataagatatgttagrgtccttcagaagtgcaaaaccaatagcacatatataagcatatagtaggggatttattatggaaattaagttgcatgattatagaggataagaagtcccatattatgctgtctgcaggctgaaaaaccagagaagttggtcatgtaattcagtctaagtctgaaggcctgagaacctgcgtggggagtggaagaggaccattgatgtaagtccagaatccaaaggcctgagaatatggagtgctgatgtccaaggccaaggggtggcatcttagcttaggaagatagcaaaatcacccatcgtccacatggactggatgatgctagcccactttggtgagggcagatgttctttactcagtcttctgattcaaatgctaatctcttctggaaacaccctcacagacacaatcagaagtaatgttttacagttatctgggcatcccttagcacagtcaagttgacacataaaattaaccatcacagaggatatactcgttct

SEQ ID NO: 730927 - DNA, 692 bp, Homo sapiens
agtccaaggggatccagtcactaggcggacttgacaattttgtaagatttacctccaggagcttacccagattcttacagtaaatactgaagaaaaatctctttatgcttccagcaggaagagggaaaaagtaaccatttgagatataccagagcactccattcttcttaacaagatctgccctccggagaagttagttaaccagaggctagcctggggggtgttatcacagagtaactgacctgggaaaaaaggcaataagcaacagctctattcttccacatgagacaagataaatacccaactcaagcctactctagccatcccctccaagtcaagggaggagaaaaacaatcaaacaaacaaggaacacttgtgaatgtcacagtccagagacatacgcttcctaaaagacagacataattataaaaactgcagaatgcttcctgttcccctcatcttatcacaacattactaaaggcctatttatrgtagttcctttcacctaatacatcatgtctagctttcaataaaaagttacaaggcaaaagttgcaatttgaaaagagagcaagcatcagaactagacatggcagggatcttggaattatcagaccaggaatttaaaacaactatgattaatatgctaagggctgtaatcgacagcatgcaataacagatggggaatttaca

SEQ ID NO: 730928 - DNA, 482 bp, Homo sapiens
tgcaatgaatggcacgatctcagctcactgcaacctctgtctcccaggttcaagtgattttcctgcctcagcctcgtgaatagctgggattacaggtgcatgccaccacacctggctcatttttttgtatttttagtagagatggggtttcaccacattggcgagactggtctcgatctcctaacctcaggtgatccacaaggctgggtaatttataaagaaaagaggtttatttggctcgaggttctgcagactgyagaagaaacatagcaccagcatctgctcaacttttggtgaggcctcaggaaacttttacttatggcagaaggaaagtagagccagtgtgtcttatggtaagagagcagagagagatgccaggctcttttagactactggctgtcatgtaaactaatagagtaagaagtcactcattacctcagcgagggaaccaagatattcatgagggatccacttccatgatc

SEQ ID NO: 730929 - DNA, 594 bp, Homo sapiens
aataaaagataaagagcaaatcctaaaaacaggtgaaaagcttctagtcaccaacaaaagaaacctcatcagactaacagtgaatttctcaataaaaatgttataggccagaggaaaatgggataatttcaaagtactaaaaggaaaaaacctgacaagaatactataaccagcaaaattatccttcatacatgaaggagaaataaagtctttcccagacaaacaaatgttgagggaattcatcaccactgtactgttcctatgagaaatgctaaagggagttctaaacatggcagcaaaaggacaacatttattatcatgaaaatacatgaaagtataaaatgcattggtgaagcaatcacacaaagtaggaagagaaagtacccaaatggagccactgcagaaatctaccagaccacaatgtcaaacaaaagaraaaaagaaattaacaaagaatatatgaaataaccagtaaacaattaacaatatgacaaaaataaagcctcaaatgtcaataatcatcttgaatataaatggcttaaattctcaacttaaaagatatagaatagatggacggatttttttttttaaaaa

SEQ ID NO: 730930 - DNA, 636 bp, Homo sapiens
gaaaagagtaagtcaaatcatctctctttgcagatgacatgatcctatatttagaggaagttaaagactccacaaaaaaatctcttagatttggcaaatgaattcagtaaagttgcaggatacaaaagcaacatgcaaagatcagcaatatttctgtacactaataatgatctagtcaaggaggaaatcaaagaggcaatcacatttacaattgctacaaaaaacaaaaacaaacaaacctaggaataaaccaasgagaatttttagccaaggaggtgaaagatctctataaggaaaacaacaaaattataatgaaagaaattgaagagacagaaacaaatggaaaagcaccctatgctcatggattagaaaaattaatattgttaaaatgaccatgttgctcaaagcaatctacagatgcagtgccatcctcatcaaaataccattacaattcttcataaaattagaaacaacaatcctaaaatttatatggtatcaaaaaagagcctggatagcctaaacaatcctgagtataaagaaccaagctgcaggcatcacattccatgacttcgaaatatattaaaggctatagtaaccaaaacagcatgattctggtataaaaatagacatgtagac

SEQ ID NO: 730931 - DNA, 618 bp, Homo sapiens
ataccaaaaatataatgcaaataacaaactatgataaagtttgtgagaaatacgacatactaattgttgcaacaaaaatgacttcataatataaataaatcttgaaaaataaattcaaatgcttaattgcactaaacatcaagaaatgcagattgaaacatatttttgtatatgaaataaggaaagattgaaaaaatwtttttttctggaaatagatttaaaaagcaccttcgatattatcattaggagttcggcttttttggtaagttatttagcagcataaataaattctttttcaagtgttcctctttgtgccggattttcttcttttatgaactgtgaaaaattgagaatgaccataatgtcaaaaaataccatttagaaagaatgggaacaaccattctgtccccaaatactgactgagaaattactgattatcacaaaaaggaacataatatagcctgcgacgatcatgttttacaagaatatctaaggacatttttatatttactgtacatgaaaaagagagacctggattacagtatgaccccattttactatgtttgtctgcatttatttaacatgcaaatttcattaatctcttactttgttcggggc

SEQ ID NO: 730932 - DNA, 589 bp, Homo sapiens
ggatacagatggctaatttttaaaatttttcataagatggggttttcctctgttgtgcaggctggtcttgaatacctggcctctagtgacgcttctacctccacctctcaaagcactaggattacaggtgtgagccaccgcacctggcctaattctccctttaataatacttgatctgtatagaatctatttttgtgtgaracgtgaggtaagactataactttcccagctcattagagcgcccccactctcacgtgcaagaacaaacaaaaaaaaccctgcacagtctgtccataactaaactttctgttcctttctattgatctcttgtgataaagaatatctctctcataaccaaagtcagcaccataattaatagagaattgcagaaagcatttctgtgatatttaagaaaaatattacaatgcataattcttctttagctacttaaaattctggaggatatagtcaatgctttagttatgtagcagatctattagtatacatatagggaaagaaaacacaaaattaaaacatttgcaatttctatgatgttagaaaacccaagtgttaactgagaagctatggg

SEQ ID NO: 730933 - DNA, 589 bp, Homo sapiens
ggatacagatggctaatttttaaaatttttcataagatggggttttcctctgttgtgcaggctggtcttgaatacctggcctctagtgacgcttctacctccacctctcaaagcactaggattacaggtgtgagccaccgcacctggcctaattctccctttaataatacttgatctgtatagaatctatttttgtgtgagacgtgaggtaaractataactttcccagctcattagagcgcccccactctcacgtgcaagaacaaacaaaaaaaaccctgcacagtctgtccataactaaactttctgttcctttctattgatctcttgtgataaagaatatctctctcataaccaaagtcagcaccataattaatagagaattgcagaaagcatttctgtgatatttaagaaaaatattacaatgcataattcttctttagctacttaaaattctggaggatatagtcaatgctttagttatgtagcagatctattagtatacatatagggaaagaaaacacaaaattaaaacatttgcaatttctatgatgttagaaaacccaagtgttaactgagaagctatggg

SEQ ID NO: 730934 - DNA, 589 bp, Homo sapiens
ggatacagatggctaatttttaaaatttttcataagatggggttttcctctgttgtgcaggctggtcttgaatacctggcctctagtgacgcttctacctccacctctcaaagcactaggattacaggtgtgagccaccgcacctggcctaattctccctttaataatacttgatctgtatagaatctatttttgtgtgagacgtgaggtaagactataactttcccagctcattagagcgcccccactctcacgtgcaaraacaaacaaaaaaaaccctgcacagtctgtccataactaaactttctgttcctttctattgatctcttgtgataaagaatatctctctcataaccaaagtcagcaccataattaatagagaattgcagaaagcatttctgtgatatttaagaaaaatattacaatgcataattcttctttagctacttaaaattctggaggatatagtcaatgctttagttatgtagcagatctattagtatacatatagggaaagaaaacacaaaattaaaacatttgcaatttctatgatgttagaaaacccaagtgttaactgagaagctatggg

SEQ ID NO: 730935 - DNA, 606 bp, Homo sapiens
gtacaaaaaccatattaacaacaatggcataagatagccttgctgaagtctggtcttcaggaaaggattcggtatagacatcaattataagcaaggtgcagccgggcgcagtggctcacgccagtaatcccagcactttgggaggccgaggcgggtggatcacctgaggtcaggggttcgagaccagcctggccaacatggcgaaamcttgtctctactaaaaatacaaaaattatctgggcatgctgatgggcgcctgtaatcccagctactcaggaggctaaggtgagagaattgcttgaatccaggaggtggagattgcagtgagccgagaccgcgccactgcactccagcctggctgataagcaaaactccatctcaaaaaaaaccaaaaccaaaaccaaaaccaaaaaacaagcaaggtgcttcatggggagtgaggactttcaatcattagaagatgatttcaaccgagaatttttatattgtctctttacaaatgcaattacagagttacaaggtaattttatgtttggctttactatatttcaggtaatcagcttgctacagtttatactttttgtagtttaagtactctgagagtca

SEQ ID NO: 730936 - DNA, 636 bp, Homo sapiens
tcttttcttgtagatacaattttttttcttttcctatatatatatatatttttttcattctctttcccctcctgcctaaaggatgcagctgtagagtatgttgggtaaggtcttttggctttgcttatagagtcttatgcacttctgccagtagattttatattgggatgtacagtttgacctacaggccagttgcgggtacttacatgcgggagcccgctatagaaagagcacgggggtatatacttgatctttgtttactgtgtggtgctctatgttgtttcaggtgaaaggctgaacagtagagtcctggtgtcctgagattcctgttttgtgggggtgccagaaacatagctakgcagaactagagcccctggcttgcctatgcatacctcaatggcaagtgcaggcaccaaccctgacaagtgtggctggatctcctgatgaagtgttctgagttctctgtggtggggtgagggggctgcactagctttttaccctatataggcaggaacttaatcttttgtcttccagtcacacccctattcctgcgctcatggctgctaactgctagctcagctgttcactatagtatatctctggaccacaacatgattgaaagccatgagaaacatc

SEQ ID NO: 730937 - DNA, 596 bp, Homo sapiens
cagtaaggaaatgatgttttacttttaaatgctaattacgaagccctggtgcagttaatgtgcggggtgttctgtcaatttttaatgtttatgccaagtgtagtcttcaatttaacatgagcttttaatcctttgagtactaaattgccttttaatgcttgccgaacaacactgtgtttgcacaaagtcaggtctgaaaaatgtatttagtacaaggtgtgttgtggaaaggcagagagaagaggggggaaggaaactttttttttttttttttttaagaagacggcactaggaacacagctccctgctcccttcaacaacatcattctctattctttctgaggttgctgggagtgaygctctcctgttgctgatttaaccctgcagtaacagcttccagctcccaggaacacaatcagccctagggtacaccttgcaccatcaaaaagactatagcagaaacagttgcaaaggagggggctatggctgttttctgactaccctcccggcatacaccaaactcaaagagagaggagctgcaggtgtccttgggggtgcacagaaatttcctacacccagacatatataaaaaaaaa

SEQ ID NO: 730938 - DNA, 596 bp, Homo sapiens
cagtaaggaaatgatgttttacttttaaatgctaattacgaagccctggtgcagttaatgtgcggggtgttctgtcaatttttaatgtttatgccaagtgtagtcttcaatttaacatgagcttttaatcctttgagtactaaattgccttttaatgcttgccgaacaacactgtgtttgcacaaagtcaggtctgaaaaatgtatttagtacaaggtgtgttgtggaaaggcagagagaagaggggggaaggaaactttttttttttttttttttaagaagacggcactaggaacacagctccctgctcccttcaacaacatcattctctattctttctgaggttgctgggagtgatgctctcctgttgctgatttaaccctgcagtaacagcttccagctcccaggaacrcaatcagccctagggtacaccttgcaccatcaaaaagactatagcagaaacagttgcaaaggagggggctatggctgttttctgactaccctcccggcatacaccaaactcaaagagagaggagctgcaggtgtccttgggggtgcacagaaatttcctacacccagacatatataaaaaaaaa

SEQ ID NO: 730939 - DNA, 581 bp, Homo sapiens
aataacatgtctgatcaggacccagtttgaagcactaagaaggataagacattagtttgaaaaaagtccctgtcagagcaacatgtattctgttaaaattgaagcaagaacaagcatcaaatttatggtgaaacttgagcggaagaatagtgaaatcattgatgttttatgaaaagcttatgggaaaaatgcccccaaataaatcagcagtttacaaatggataacttgttttaagaagggttgagacaatgttaaagatgaagcctgcagcagcaggtcatacacatcaatttgtgaggaaataattcatcttgttgatgctgtaattgaagagtacccgtgattaaccacagaaacagtatccaacactatagacatytgaactggttcagcttatacaattttgactgaaaaattaaaggtgacacaacttttcactcaatgaatgcccaaactgttgcacccagatcagctgcagacaagaacagagctttcaatggaaattgtaagcaagtgggatccagatcctgaagcattttttcgaagaattgtaacaggagatggaacctggttttaccag

SEQ ID NO: 730940 - DNA, 626 bp, Homo sapiens
tctttgagggcaggtcattctcaaaattacttagaagctgtatatgatactcaaaacatacactattactgctgtctctgatgacttcagacttccattcctacttcaagcataagccccattgctcctttcctattaggatcacactgcaccatcattgcctttgttctgttttgttcartctctgtaaccttctttaagacagtgaccatatcttttcagccttctctattcagcaactagtacttaataaatattaatggaatgaattaaatcaaaccagaaagaagtggaaaatattaagttcattttagttatactaatggacaggcagcaaagtatcctctaatgatcattgaatttgatgccagaagaggccgccttgccccttaatagccatttgaccttgagaaagtctcattctctcttagagtttcagtttcctcattagctaaacaagaataaacctacccctgtctacctcatagtgttaaaaggatcaaatgagagaatgaaatgtgggcatctgattatttgcaaagcaaatctgagaactagcccaaatccttagagcaagctttaaagagtctacagtcttttagcccactcttgggctccacagttta

SEQ ID NO: 730941 - DNA, 642 bp, Homo sapiens
tatgaaatgtgcatgagagggatctaggtggcacgctccttatgagaatcagctctcataagagaattagctctcaaagaactaagaatagaacttctattccatgaccaggctcatgcttgtaatcccaacactttgggaggtcaacgcgggtggatcacctgaggtaaagagctcaagaccagcctggccgacatggtgaaacytgtctctactaagtgatctgcctgatgatctgtcactatctcccatcgctcccagatgggaccttctagttgcaggaaaacaagctcagggttcccactgtttctacatgatggtgaattgtagaattatttcactgtatattacaatgtaataataatagaaataaagtgcacaataaatggaaagcacttgactcattccaaaaccatctccaccccaaccccggtcctcggaaaaattatcttccatgaaaccagtcactggtgggaagatggtttggggactgctggtctgtggggctgaccaacctgctttagattttgctaaaggaggatgtaaacaagatgaagtccaattagaaaaggggtaaccagcattgtgaaggctcaggaattccagtagtatgatgagtatttgagagttaattaatgagtc

SEQ ID NO: 730942 - DNA, 601 bp, Homo sapiens
tatctttctgatctaatggacaacctctttgttgaggatcccaagatcagccccaggctggagtaatcaccaggagaacttgcagatttcagcctgtacttgtctttatgttatgattaattaattaatttatttatttattwtgagatagagtcaccctggctggagtgcagtgacacaatctcagctcactgcaatctccacctcccagattcaagtgattctcctacctcagcctcctgagtagctggggttacaggaacctgccactatgtccagccatttcttgtatttttagtagagacaagttggccaagctggtcttgaactcctgacctcaggtgatccacccacctcagcctcccaaagtgctgagattacaggcgtgagccaccatgaccagcctatgtctatgatttattacagtgaaagaatacacagcaaaatcatcaaaggggaaaagcatatggggcaaagtccaagaaaagcaggttcaaacttccaagagtcctctatcagtggagtcacttaggatgtgcttaactccttcaggaaagagtgtgacaacatgtgagaaacactgtctatcaaggagcctcat

SEQ ID NO: 730943 - DNA, 549 bp, Homo sapiens
cacaaaatcctctgaattttgtggtagtcaaattaaaagagaagtgacataaaatcataataatctcattagatattaaaaggaagcatgccaactcactacaaaggccaacatttttgctgattctgatgtctacatgatgtgctgagtctgatgtctaagagagatgtcatcatataaagtatgtttaatcgtattattacatatgtagaaaatcattcatacaaccatgtttatatagccattccttatactgaccattaatgtaaatcagtaataaaagattaaatcacaattgttccatggcagttagaatgcactgtaaagcaactcgtwtagctgtctagtatttttacattatgtccagataaaactcagagaactccgttctaaagagaaacattttaccatgtctcataggctattttttatagtaaatgatttcagactaattctctcatcttttttacaacgtagagtttgtgtgtttgtttgttttcttttgctacaaaataaccatgaccatatttgtagttagtagagaagtca

SEQ ID NO: 730944 - DNA, 515 bp, Homo sapiens
aattgatctcatgaaggtagtaaatagaatgatagttgacagaggctgggaagagttctgaggaggaggaaatgaagaggagttggttaatggctataaaaatacagtttgatagaaggaataatttctagtgtctgatagcatagygtggggactatgattaacactaatttatggtatatttcaaaatagctagaggtttggaatgtttctacataaggaaatgataaatttttgaggtgatgatggatatcctaattaccctaatttgattattatgcattgtatgtatgtgtatgtgtaataatcaaaatatcccatgtacttcataaatatgttcaactattacgtattaataaaaaagagaagaagtatatcagagaaaaaaagaaacagaaatcaatgtccagaaggggattttttttacagtttttgaacaatttttatttcaatagctttttgggtacacgtgttttttttggttacatggatcaattatatagtggtgaattgtg

SEQ ID NO: 730945 - DNA, 515 bp, Homo sapiens
aattgatctcatgaaggtagtaaatagaatgatagttgacagaggctgggaagagttctgaggaggaggaaatgaagaggagttggttaatggctataaaaatacagtttgatagaaggaataatttctagtgtctgatagcatagcrtggggactatgattaacactaatttatggtatatttcaaaatagctagaggtttggaatgtttctacataaggaaatgataaatttttgaggtgatgatggatatcctaattaccctaatttgattattatgcattgtatgtatgtgtatgtgtaataatcaaaatatcccatgtacttcataaatatgttcaactattacgtattaataaaaaagagaagaagtatatcagagaaaaaaagaaacagaaatcaatgtccagaaggggattttttttacagtttttgaacaatttttatttcaatagctttttgggtacacgtgttttttttggttacatggatcaattatatagtggtgaattgtg

SEQ ID NO: 730946 - DNA, 515 bp, Homo sapiens
aattgatctcatgaaggtagtaaatagaatgatagttgacagaggctgggaagagttctgaggaggaggaaatgaagaggagttggttaatggctataaaaatacagtttgatagaaggaataatttctagtgtctgatagcatagcgtggggactatgattaacactaatttatggtatatttcaaaatagctagaggtttggaatgtttctacataaggaaatgataaatttttgaggtgatgatggatatcctaattaccctaatttgattattatrcattgtatgtatgtgtatgtgtaataatcaaaatatcccatgtacttcataaatatgttcaactattacgtattaataaaaaagagaagaagtatatcagagaaaaaaagaaacagaaatcaatgtccagaaggggattttttttacagtttttgaacaatttttatttcaatagctttttgggtacacgtgttttttttggttacatggatcaattatatagtggtgaattgtg

SEQ ID NO: 730947 - DNA, 347 bp, Homo sapiens
attctggggatgaagcctacttgattgcaatggataagcttttgatgtgtttctggatttggtttgccagtatttagttgaggatttttgcactgatattcatcaaggatattcacctgaggttttctttttttattgtatctctgccaggttttagtgtcaggatgatgctcgcctcatagaatgagttagggaggagtccctyctactgaaatttttggaaccgtttcagtaggaatgctatcagctcttctttgtacctctagtggaattcagctgtgaatctgtctggtcctgggctttttttggttggtagactattttactgcctcaattttagaactcat

SEQ ID NO: 730948 - DNA, 557 bp, Homo sapiens
aataaaaccttcagaatcatggaattaacattgctgtattactatcacctaatgttcagaacccattaaaattttatcagatgttaaaataatgttttttaaataacaaaagatcaaactcagtttcacataacacattttcttttttatatttttagtttctttgaatatcaaagagttcctgtcttttcytgacttcaagacatcaacattcaacaaaattataggccagttatttggggctttgtctgatgttttcacataattatattcaggttttgtatctttggcaggagaatcacagaaaagtgcagttttgctcttgctgcgttctgttaggtgacacatgaattcaatttgttctattatcagtgattatctttgataatctctacatgaagatggaggcagagatcagagtgatgaagctactggcaaaggaatgccaaggattaccggcaacaacggaagccagagagaggcagggaacgtattctccctctggaacagaggttccagaaggcactgacccattgacaatttaatttcagacttgt

SEQ ID NO: 730949 - DNA, 608 bp, Homo sapiens
tatgtgttttttaaagcaataaatacattttgctaacccagagaatctttctcttgtcttaaaagagtaatttactctgtttgagtccttatatttttcacaaataaaaaaatgaaaatcaatttgggtagagacgtggaggcaaagccatgtagggctaagttcatgagagaacacaggagacagaaatgttagtagcaggaacagacaacactctctgaggattttgtataagaaagcagaaaaatggtgctgtggcaggggtcacattttgttatgttcagtagacgggagattttataacatgtttgtccactgatatgaataatccaataaagagaagatgatgaggggcagatgatcgtgcaggaggaagagctcatgcattgccacaggaagaaatgcaatgtawatcccttcaaatgcagatagcttagcagagttttgtggtggaaagatgtgttcacacagctagtgtgtggccgagccaggatgcaaatgcaggccctctagctcctgagtccatgctccaaactacttcactgttttgccaactatacatttccacagctatgcatctcttaacttaaattgttaaataacagaaa

SEQ ID NO: 730950 - DNA, 608 bp, Homo sapiens
tatgtgttttttaaagcaataaatacattttgctaacccagagaatctttctcttgtcttaaaagagtaatttactctgtttgagtccttatatttttcacaaataaaaaaatgaaaatcaatttgggtagagacgtggaggcaaagccatgtagggctaagttcatgagagaacacaggagacagaaatgttagtagcaggaacagacaacactctctgaggattttgtataagaaagcagaaaaatggtgctgtggcaggggtcacattttgttatgttcagtagacgggagattttataacatgtttgtccactgatatgaataatccaataaagagaagatgatgaggggcagatgatcgtgcaggaggaagagctcatgcattgccacaggaagaaatgcaatgtatatcccttcaaatgcagayagcttagcagagttttgtggtggaaagatgtgttcacacagctagtgtgtggccgagccaggatgcaaatgcaggccctctagctcctgagtccatgctccaaactacttcactgttttgccaactatacatttccacagctatgcatctcttaacttaaattgttaaataacagaaa

SEQ ID NO: 730951 - DNA, 600 bp, Homo sapiens
gttgatacattccacatatcttgttaaaatttaaccagttttacatgtattagtttgttctatgcaattttcttgcatgtgtagacccatgttaccactaccatagagaaaatccagaatcattccatcaccagaggctccttcatgctgtctctttatactcattcttacctctttctctagctcatccctaacccctcacaaccattaatctgttctccatctctacaaccctgttatttcaagaatgccatataatgagaatcaaaattaagtgaacttttgggactattttcactcagaataattctcttgaaattcagccaagttattgtgtgcaacaataactcattccttcttattgcggagtagtagtccatgatatggwtgcactacaggttccttaaccacttactaggatattacagttgtttacagtttgaagctattatgactaaagctgacgctcacatttatatataagtttttatacagaaatatgtctccatttctctggaaaaaaaatcccaagggtacaattgccgagtcaaatgttaagtgaatgtttactttaaaagtgttatattgttttttagagtg

SEQ ID NO: 730952 - DNA, 578 bp, Homo sapiens
gaaatagatggagattagagagagacagagatagagagaagtgggaaaggggagaaactgagaggaaagagattttttaaggaaatggaaactttaaaaaaactactaccctccatactttaccaccacatcaacagggctcctgtayaataacaggggatttagctaaaagaactccaagccgcagaccccatttaaggagtctctaggaaaactcaaaaacaaccagagagacagaaacaagaacattagaggaaattttattgcaataaggcaacccaattcctcaagaattaggccttagaattagactctacatcagttcttttatctgatacatcatatatggctttcaacaaaaaattataagccatgctaaaagacaaaaacataatctgaagtaataaagtataaaaaacagactcaaatatggcagagattttgcaattatcagacagggaattaaaataactaaaattaatatactaatggctctaatggaaaaagcggacagtatacaaaaatagatggataatgtaagcagagagagggaaactctaagaaaaaaaaaaaaagga

SEQ ID NO: 730953 - DNA, 655 bp, Homo sapiens
gaggtacaaaaaggagctggtacaattccttctgaaactattccaaacaactaaaagaagagacttatttctaactcattttataaagccagcatcatcctgataccaaaacctggcagagacacaataaacaaaaaaaaacttcagaccaatatccctgatgaacatcaatgtgaaaacytcaataaaacaccggcaaaccactggcacatcaaaaaacttatcctccatgatcaagttggcttcatccctgggatgcaaggctggttaaacatatgcaaataaataaacttaatccatcacataaacagaaccaaagaaaaaaatcacatgattatctcaatagatgcagaaagggccttcgataaaattcaacatccctacatgttaaaaactctcaataaactaggcattgattgaacatatctcaaaacaataaaagctatttattacaaacccacagccaatatcatattaaatgggcaaaagctttaagcattcctttagaaaactggtacaagacaaggatgccctctcttaccacacctattcaacgcagtattggaagttctggccagggcaattaggcaagagaaaggaataaagcgtattcaaatacgaagcaaggaagtcaaattgtgtctgtttgtgatga

SEQ ID NO: 730954 - DNA, 650 bp, Homo sapiens
aagctttaagcattcctttagaaaactggtacaagacaaggatgccctctcttaccacacctattcaacgcagtattggaagttctggccagggcaattaggcaagagaaaggaataaagcgtattcaaatacgaagcaaggaagtcaaattgtgtctgtttgtgatgacgtgattctatatttagaaaaccccaycatcgcagcccaaaaactccttaagctgataagcaacttcagcaaagtctcaggatacaaaatcaatgtgcaaaaatcacaagcattcctttacacaaacaattgacaagcagacagccaaatcatgaatgaactcctattcataattgctacaaagagaataaaatacctaggaatacagctaacaagggacatggaggacttcttcaaggagaactacaaaccactgctcaaggaaatgagaggacacaaacaaatggaaaaacattccatcctcatgggtaggaagaatcaatagcgtgaaaatggccatattgaccaaagtagtttatagattcaatgttattcccatcaaactaccactaacatacttcacagaattagaaaaaaatactttaaatttcatatggaatcaaagaagaccccacatagccaagacaatcctaaggaaaaa

SEQ ID NO: 730955 - DNA, 650 bp, Homo sapiens
aagctttaagcattcctttagaaaactggtacaagacaaggatgccctctcttaccacacctattcaacgcagtattggaagttctggccagggcaattaggcaagagaaaggaataaagcgtattcaaatacgaagcaaggaagtcaaattgtgtctgtttgtgatgacgtgattctatatttagaaaaccccaccatcgcagcccaaaaactccttaagctgataagcaacttcagcaaagtctcaggatacaaaatcaatgtgcaaaaatcacaagcattcctttacacaaacaattgacaagcagacagccaaatcatgaatgaactcctattcataattgctacaaagagaataaaatacctaggaatacagctaacaagggacatggaggacttcttcaaggagaactacaaaccactgctcaaggaaatgagaggacacaaacaaatggaaaaacattccatcctcatgggtaggaagaatcaatagcgtgaaaatggccayattgaccaaagtagtttatagattcaatgttattcccatcaaactaccactaacatacttcacagaattagaaaaaaatactttaaatttcatatggaatcaaagaagaccccacatagccaagacaatcctaaggaaaaa

SEQ ID NO: 730956 - DNA, 481 bp, Homo sapiens
attctgagatatatctatatctatatatctatatctatatatatatagtcagattggtagtttgcaaatattttttcccattctgtatgttgtttcttcactttgttgattgtttcctttgctgcgcagaagctttttagcttgatgtaawcccatttatctatttttccttttgttgcccatgtttttgaggtctaacccaaaaacatctttgcccataccaatgtctttgtaatgtttccccaatgtttgctttcagtagtttcatagtttttggtcttacctttaagaatttaatccattttgatttgacttttgcacatggtgaaagatgggaatatattttcattcttctgcatacgtatatacagtttccccagcaccatgtattaaagagactatcctttcctcaatgtatgttttggtgcgtttgtctaaaatgagttggctgtaagtgcatggatttatttctgggttctct

SEQ ID NO: 730957 - DNA, 709 bp, Homo sapiens
ctgcgggtgggcagtggatgagggatccggctcctcttaccatcagctcctctcaagcaaagagtttcagctcccctggcaggagtccaaggacagccccacatattccagccacttgtcagtaagaagctgggctggagtgagcagcgcacagtcgccacctcccaccacatagtgtgaagaccttacacagggtttcctggccccatcagaactgtaagaaaaccatgcaccttgttgtccatgagtaaaagactaatattttcttaataaagtagtttagcagaggtccctttcatgccacacaaagcccataataatgcacgtggaggatgggtaggatttcagtggataaggagctggtgaccagttgaaaggaagcttctggagtaaactcttggcgtctgggatcacgtgacagggattgatctgagaaaggagaggtgagggaaggaacagtggccttaggtggagggtggactcaagcccagaaccacgctggcccacccaggtgctgtaggaccacctactccttgagagcaagactcccacccgcattggggttttsgcctagaaacagttcagcttgtccagaatctcccagccttgaagaccccttagagtcctaccttctttgggtcctgcttccttccaaatagatagtatcttaagcactgtcctagacaagtttgtttctccctctgctcaa

SEQ ID NO: 730958 - DNA, 553 bp, Homo sapiens
agccaacagtgtaggcgtgggtaggaaattactgtgtagggtgataagcaccgtgataagggtctgcattgtgctgcagaggcctggagtaaaggcacccacccagacatagacctaacatacccaagcaggtgatggccaacctgagatctggcatgtggtataggatagccccacttgtccacacatatggactcccagcccaactcccccgtgcctagggagagaggggctcagtgaagacagtggatggaatgaatgatgccagtttctcttttgtttctgaaagatttctccgtggacgatggcagccacgattcaggccatggagaggaagattgaatcgcaggctgctcrcctgctttccctagaaggtcaaaccgggatggccgagaagaagctggctgattgcgagaagacagccgtggagttcgggaaccagctggagggcaagtgggccgtgctggggaccctgctgcaggagtacgggctgctgcagaggcggctggagaacgtggagaacctgctgcacaacaggaacttctggatcctg

SEQ ID NO: 730959 - DNA, 405 bp, Homo sapiens
tgtgtagattgaatgagttaatctgcgtaaagcacataaaacaggactggcaggtagtaaattctatataccgtttgctgaacagataaaaagctcacagagaaatcagctaacattcatgagagccaataaacacaagtaagagaataagaacccacatggcaggagaaggtatctrttgcacataagtgatgaagggtttattcccaaaatatataaagtattgcacaagacaattaaaaaatggacaacttagtagaaaaatgaagaagagacttgagcagtcacttcacagaagaggacatccaagcgaccaataagcctatgaaaagatgctcaaacctcatgagtctagaaaggtgcaaattaggccgggcgcggtggctcacacctgtaatcccagca

SEQ ID NO: 730960 - DNA, 570 bp, Homo sapiens
tattgcacaagacaattaaaaaatggacaacttagtagaaaaatgaagaagagacttgagcagtcacttcacagaagaggacatccaagcgaccaataagcctatgaaaagatgctcaaacctcatgagtctagaaaggtgcaaattaggccgggcgcggtggctcacacctgtaatcccagcacttggggaggccgaggcggccggatcacctgaggtcgggagttcaagaccagcctgaccaacatggagaaaccccatctctactaaaaatacaaaattagccaggcttggtggcgcatgcctgtaatcccagccactcaggaagctgaggtaggagcattgcttgaacccrggaagcggaggttgtggcgagccaagatcgtgccactgtactccagcctgggcaacgagagcgaaactccatctcaaaacgaaaagaaaagaaaggtgcaagttaaaccgcagtgaactattgctagaattgttgctaggttggttaaaatgaaagagactgatgttactcagtgatggtacgtggagccatagtaactctcatcccctgctagt

SEQ ID NO: 730961 - DNA, 547 bp, Homo sapiens
ccttgtagataaaactcccatatccctgggacagagcacctgggggaaaggggtggctgtgggcacagcttcatcagacttaaacttttctgcctgccggctctgaagagagcagtggatctcccagcacagtgctcaagctctgctaagggacagactgcctcctcaagtgggttcctgacccccgtgcctcctgatggggagacamctcccagcagggatcaacagacacctcatgtaggagagcgctggctggcatctggcgtgtgcccctctgagacgaagcttccagaggaaggagcagtcagcagtctttgctgttctgcagcctctgctggtgatacccaggaaaacagtgtctggagtggaccaccagcaaactcttagcagacctgcagaagaggggcctgactgttagaaggaaaactaacaaacagaaagcaatagcatcaaataaacgaaaaggacgaccacacaaaaaccccatctgaaggttaccaacatcaaagaccaaaggcatttctctatttctctttctttcccttct

SEQ ID NO: 730962 - DNA, 553 bp, Homo sapiens
atctataaaacccaatgcaaatgagtaaacttcatagaataaagatcatgcagtaaaattacttagagaaagaagcaatgtcttttctaagactctttttcccatgaaaataatgcgcattctagaaaacagagataagggcaataaaaataaatcccctttaattagagagaaacrctcattacatgttagtgtcattaccatatgccaccaccattctttttgctcacattcaaaacatggttcctaaaagatagttgactccttttccagttgaacagatcacacccatgtctgcctgtctcaaaaatggtattttcaacatcaacactttcacaacatttctaggatctgaccgcttcccagcatctccactcctaacacgctggtcccacagatcaggatgacagcctctcactgcccccacgtccacctggtctccctcagtgagggtggccagggcaaccccgtgaatgtccaagtcagatcctgccactcctctgcagaaatcctcagggacaaagagcccctcacacacagagttaaggcccgc

SEQ ID NO: 730963 - DNA, 648 bp, Homo sapiens
cttttatttttcctggagagtcagctgttaaacatttttctggcataccattggccttaaccagatatctgcctagaaaattattaggtctgtatacataaacaatgtttacatcaaataattggaagtttcgtactgaaatgtgcttattagacatgttagtaattcaatccgcccaaggggaagaggagttttaaaggactcaggatggaagtcaagcttgatgaaatcagtgacaagcaggaaattcggatctaaggaaagccaaatttaaataattttgaagaatagtaaaatggattccaagtgtagaaaatcattgattacagttatgagaaactgcatgttgtgtaagactgttattctaagtaaagaatttaaatgatttccaagtatacaaggaagacaccagagtgtcttgggctcggaagtccagcttatccctgcagtctccacccagggcctagatacagmgtattttatgaatgagaaaacagattgggaggtgtaagtacaaatcacatttgttcttttcacttgcaagctaaaaaccctcagcacttctttcagtgtgacaggaaaacatccagctctttaaaagctggaatcacaggaagcctctcacattctctccctaaccaaattttt

SEQ ID NO: 730964 - DNA, 658 bp, Homo sapiens
ccctcagcacttctttcagtgtgacaggaaaacatccagctctttaaaagctggaatcacaggaagcctctcacattctctccctaaccaaatttttaccatctcctttgctcactgacctcacacacttttatattctaatcaggcaaagacaccactgctctctgaacatgrctcgttctaaggggcgtggctttggggtggactcaatgcagattctggggctgcttcttagttctggggctccatggggtctgggaaccatctcattcttgtcagtaccagggggcttgtatcgtggcatctgttaatatggctacgaatatgctttgcagttcctctgcctggaatacaattttggttttcaactaacaaacgctttctcatttttcaagattcataccagatatggcctctacttagaattctctgattttcagtaatttgaaaatcaaagagcagtagaaattcccattctcaaaacatttacaatatatttgtaaatgccaaaaaagaaaagaagaaaatttcaggatgcaaaaaaaaatgcacttacagtatatggggtccacaaagcacatcacaactactgcccttctacagagacatagatgttcgtagtgtagaaatctcctttgctttgtacctgttttgctgc

SEQ ID NO: 730965 - DNA, 527 bp, Homo sapiens
actgctctctgaacatggctcgttctaaggggcgtggctttggggtggactcaatgcagattctggggctgcttcttagttctggggctccatggggtctgggaaccatctcattcttgtcagtaccagggggcttgtatcgtggcatctgttaatatggctacgaatatgctttgcagttcctctgcctggaatacaattttggttttcaactaacaaacgctttctcatttttcaagattcataccagatatggcctctacttagaattctctgattttcagtaatttgaaaatcaaagagcagtaraaattcccattctcaaaacatttacaatatatttgtaaatgccaaaaaagaaaagaagaaaatttcaggatgcaaaaaaaaatgcacttacagtatatggggtccacaaagcacatcacaactactgcccttctacagagacatagatgttcgtagtgtagaaatctcctttgctttgtacctgttttgctgcctgctgatagtctcactaatcttta

SEQ ID NO: 730966 - DNA, 527 bp, Homo sapiens
actgctctctgaacatggctcgttctaaggggcgtggctttggggtggactcaatgcagattctggggctgcttcttagttctggggctccatggggtctgggaaccatctcattcttgtcagtaccagggggcttgtatcgtggcatctgttaatatggctacgaatatgctttgcagttcctctgcctggaatacaattttggttttcaactaacaaacgctttctcatttttcaagattcataccagatatggcctctacttagaattctctgattttcagtaatttgaaaatcaaagagcagtagaaattcccattctmaaaacatttacaatatatttgtaaatgccaaaaaagaaaagaagaaaatttcaggatgcaaaaaaaaatgcacttacagtatatggggtccacaaagcacatcacaactactgcccttctacagagacatagatgttcgtagtgtagaaatctcctttgctttgtacctgttttgctgcctgctgatagtctcactaatcttta

SEQ ID NO: 730967 - DNA, 638 bp, Homo sapiens
ccataatccttggatattctgttctcgtttttttttctttccttttcagttttggaggtttttattgtcatatcttcaaactcagaagttctttactcagctgtgtccagtataatagtaacccatcaaaagtattcctcatttctgttaaagtgtttctaatctctaatatttctttttgatacattcttcaaatttctatctctccacttagagtatccattatctattgtctaccttttcaattaaatcaattagcatattaatcaccattgttttaaattcctggtctgatgattccaacattactgccctgtctaactctggttctcatgccttcttcagtctcttcaaagtattttttgccttttaatatgtcttgttctttttttgttggagggtagatttgaaatagtgggtaaaagaaagaaacggaggtrtataagtctttaataatataatgatcaggtgtcggggagggaaattattctagagtgacatgattaggcctcaggtttttggtgagcctgtgccctgtggactgtgaacttcaccagtgcatctcaggtcccctagcccccagtcccatcccctagcattgcatgaaacaggatggctagagggagctggaatttttt

SEQ ID NO: 730968 - DNA, 511 bp, Homo sapiens
tattcttcctgttacccataccacccattgacatccaaatgcttaaagacccactcaaaacccaccacggggactactgactactgcttccttcccttagtattgaaacactcactgcctgccttgatgaggcaagtccatagaagcagagggacttgcaagaagttgtttgtttgttttgtcctgatctttaggtatcatcttgtccacaaatgtagttactgcagtcctttttcctggtagacagctgcttgcaacatgtggttatttgaagataattgagctagctttatgatgaggctgatgccgcaraagcagtggctgaggagggtctccctgtctgtctggaacaatgactgtaggacaagcttcttgtattttttcatcctcctcatttccagccctggaggatttttttttttttttttttgaacatctgcaggacacttctgacacacaaggatgtgtttgaacatcgtagtaacatttggaaatgcctgtttcatttgac

SEQ ID NO: 730969 - DNA, 631 bp, Homo sapiens
ctttacgcaacttgaaaagaagaggaagaagaagaagcctcaggacagcggagtggaaagagaaagggggcatgggtccttccgtgagttgcttcttgtcttcctcatcactgcttcgtggtcacgagatggctacactgtctccagctttacatccatgttccagaagaagggatagtggtcaaatgtggctagccacatttccccctttttattctaaacagaaaacatccttggaagccctacttagcagaygtccactacatgttgattggctagagctttgatacatggatgtctggctggaagtgactagggaatgggccctgaggcagccagactctaatgtgtttctataaagatgaaagcaccaataagctatgaatggtcatacaaaagtaagggtttaacatcctcaggctccaataaataaatataagaatgatttattacagtgatgatgagatgactctatgggtaccaagccccttaattactacttatgatttctttcttgaactgcaatgatatcctccatgcctggtgaatattttgtgctattcttcttaccctataatagaaacttttaccatattgagtaaaagcaacaatatttttagaggaatgaatc

SEQ ID NO: 730970 - DNA, 606 bp, Homo sapiens
ctgcttcttgggccatatgatctgcagatccaatggtgcttgaaatgtcagtggcagataggaatgctctttggagacaataccaggcccttttttgtgaataatagcaaagatcttcagaattttggagaaatacctggccattctccacagaaaatgcctccctttgataaayagctcctggcctgctactgagcaacagtagagactgagcatttaaccatgggcctccaagttaccatgtgacctgaactgcctatcattaactaggtgttatctgacccactgagccataaagtgagtgtacacagcagcactgcatcatcaaacagaaatggtatatacataataaggcttgaacaggtacaagtatgttacatgaagaagtggcccaaatactcatagtccccactgctgatatacaagcctttctctctcagcttgcatctgtggcctcatgggaagtttcctatgcagttgacagacaaatagaagccttgggcctggtttataaatctgcataatatgcaggcatcccctgaaaatggacagctatagtactacagtcccttcctgggacatcctaaaggatagtggtgaagggaa

SEQ ID NO: 730971 - DNA, 606 bp, Homo sapiens
ctgcttcttgggccatatgatctgcagatccaatggtgcttgaaatgtcagtggcagataggaatgctctttggagacaataccaggcccttttttgtgaataatagcaaagatcttcagaattttggagaaatacctggccattctccacagaaaatgcctccctttgataaatagctcctggcctgctactgagcaacagtagagactgagcatttaaccatgggcctccaagttaccatgtgacctgaactgcctatcattaactaggtgttatctgacccactgagccataaagtgagtgtacacagcagcactgcatcatcaracagaaatggtatatacataataaggcttgaacaggtacaagtatgttacatgaagaagtggcccaaatactcatagtccccactgctgatatacaagcctttctctctcagcttgcatctgtggcctcatgggaagtttcctatgcagttgacagacaaatagaagccttgggcctggtttataaatctgcataatatgcaggcatcccctgaaaatggacagctatagtactacagtcccttcctgggacatcctaaaggatagtggtgaagggaa

SEQ ID NO: 730972 - DNA, 597 bp, Homo sapiens
tggaagattcctttccatttgttcaagtctacttttgtatctatcagaagtgttttaaaatttcgctgattaggtttgtacattgcttcttaagtttattcctaatattttatctttttgttagttctctaaatgggttttctttatcataatgtcctctaattggttattgcttatatataaagtctattgattttcatttgttaattttataatctaccactttattaaattattkttgttggtttgaatgttggttctatagggtttttctatttatgctatcatgtctgcaaacagataggttttttttacccattcttatgcctcgaattgatttattgtgtctaattgcattggctaatactctaatacaatttctagtaacagggattctaacaggcatccttgccttgttataatcttagtgaaaacaccttgaatgtatttccattaaataagatgtcagcgttaggattcagacacacacatatcacatataaagaaagtatttctcattttctgttctcctgagtatgttttgttttttaaatcatgaatggatgttgaattttgtcaaaggctttttcggcatat

SEQ ID NO: 730973 - DNA, 597 bp, Homo sapiens
tggaagattcctttccatttgttcaagtctacttttgtatctatcagaagtgttttaaaatttcgctgattaggtttgtacattgcttcttaagtttattcctaatattttatctttttgttagttctctaaatgggttttctttatcataatgtcctctaattggttattgcttatatataaagtctattgattttcatttgttaattttataatctaccactttattaaattattgttgttggtttgaatgttggttctatagggtttttctatttatgctatcatgtctgcaaayagataggttttttttacccattcttatgcctcgaattgatttattgtgtctaattgcattggctaatactctaatacaatttctagtaacagggattctaacaggcatccttgccttgttataatcttagtgaaaacaccttgaatgtatttccattaaataagatgtcagcgttaggattcagacacacacatatcacatataaagaaagtatttctcattttctgttctcctgagtatgttttgttttttaaatcatgaatggatgttgaattttgtcaaaggctttttcggcatat

SEQ ID NO: 730974 - DNA, 642 bp, Homo sapiens
ttgattttttgttttcattcatttaacaaatatctgtataggcatactgcacctccattttctttctgtctttctctctctctctctctttctttttttagagacggagtccaggctggagtgcagtggctcaatctctgctcactgcaacttccacctcctgggttcaagmgattttcctgcctcagctttccaagtagctgggactacaggcatgcgtcaccatgcctagctaatttttgtattttttagtagagatgaggtttcactatatgatggccaggctggtcccgaactcctgacctcaggtgagctgtccgccttggcctcccaaagtgctgggattacaggcatgagccatcgcacctggcctgcacctccaatttgttatgaggatcaagatgcctacatgggaagggggtgttacatgcataggtgtgtgtgtgtgataaatggaattatccatgcaaagcacccaaaataatgcctgaatcatttttttgcctcttgacaaatgctgatactagctaacttttgcatagcacttactatgagcctggtatgattctaagggctcgacatatgttagttcatttaatcctcacaacaattctgatactatttttaatcccaattaaaaat

SEQ ID NO: 730975 - DNA, 567 bp, Homo sapiens
ttcttttgaggttttactgtttaatttttttttttttttgaagggggagcttattttttgtttgatttagagaaagggtctcactctgtcacccagcctggagtgcagctgctcagtcatagcacaatacagcttcagactcctgggctcaggtgatccttccacgttagcctcccaagtagccagaactataggcacacatcaccacaatcagctaattttaaaatttattttagagatggagtctcactgtgttgaccaggctagtctcaaactcctggtctcaagtgattctcccaacctcagcctcccaaagtgctaggattacgggcatgagccaccatgcctggccaaactttatagtttttaatgttgtgtctgtaattcctttttcccattarcctattatttatattgtacaagatccaataataacatggtgatttttagtaatacatgtcccaggttgctatttcttcttgtgttttaatttgcatttccctgagtactaaagtcatcctttcttgtattttctggccatttgtgtatctcttttgttgtgacaca

SEQ ID NO: 730976 - DNA, 559 bp, Homo sapiens
ctgctctggcatattcactgttttaagttaaaggcacttaaaaaaaaatacatagcaggtacacgaacatcactctgaccttcatgctatttcttaaaagccagagatgaaattcccatgtggaagatggcgtctctaccctggaaagaaagcagcatccttaccaaagacggaaaattgaagccaaggaaaatctgtacaagcaaatcttgtttattttttatttatttatttatttttgagacagagtttcactcttgttgcccaggytggagtgcaattgtgtgatctcggctgactgcaacctccgccttccgggttcaagcaattctcctacctcagctccctgagtagctgggattacaggcatgagcaccacgcccggctaatttttgtattattggtagagaaggggttacaccatgttgggccaggctggtcttgaacccctgacctcaggtgatctgcctaccttggcctcccaaagtgctgggattacaggtgtgagccaccgcacccggccacaaaccttgttaaactaactcttatcttcctagtc

SEQ ID NO: 730977 - DNA, 532 bp, Homo sapiens
ttctccaagtccccatcagactcaggagcccaggtggcttcacccagtggatcccgcactggggccgcaggtggagctgcctgccagtcccgcgccatgtgcccgcactcctcagcccttgggtggttgataggactgggcgccttggagcagggggcagcgctcgtaggggaggctcgggccgcacaggagcccacggagcagcggggaggctcaggcatggtgggctgcgggtcccgagccctgccccacgggaaggcagctaaggcctggcgagaaattgagcacagcagctgctggcccaggtgctaagcccctcactgccagggccggcggggcaagcggggctctgagtggggggcctgccaagcccacacccacccggaactcgcrctggcccgcaagcaccacgcgcagcccgattcccgccggcacctctctctccagacctccctgcaagctgagggagccggctccagccttggccagcccagagaggggctcccacagtgcagcggcgggctgaagggct

SEQ ID NO: 730978 - DNA, 581 bp, Homo sapiens
taatcctgtgataaacattttggaacaaaaatatttgtctacttttctgagtattaactcctagaataggctttgaaaagagaaattattgagcccaaagctaagaatatatttaagattttttattcttattctcagatttctttctgggaaagtaattacaattttagatcattgtcagttrtgtattaatagaatgcctagctcaccatgtactcaccagtagtgccacacacacatacacacacacatacacacacacacacacacacaatgatttaggagaaaaataatactatattaatttgaatttgaatattttataaaacttgatttgtaaatgtttaggcttcattgttttatgaatttctttttttgtaaatatgttacatatatatgtatgtttcagttttattgtcctatattaaaattatgtatgtgtagtttgtatattaatgtagaatgtacacatatattctgtttatgagctatgaacacttttattacaactcaattgctgtgttttcacttctcagtgtacacaagataggcagaattcactttctgtaacagaaaaacta

SEQ ID NO: 730979 - DNA, 574 bp, Homo sapiens
aaaagtgacttgaaaacttagaattacagaggtgtggggcggggggcgcgggcatgtgcttgagtattcctctggactatactttggtttaaaagcggggttctaaaactagagggaatggattctctagggattcatgattgcccttcaggaattcctatgtgaagttccttgggcactgcatcggaagtttttatcagtttcttaagggatcctggacctccacccatgtctagaatctgcagattcttccaagcaccaatatacacttcttgtatgtttatattacataccgaacacttgagatacaaaaacaaaaaataaaatctctgtttcaaggagctttaagctgtaggagagatacaaatacaagccaataaatagtaaagtgttaaaatttgacagaaatctaataagataaggagtgtagratttggatcttgggacctttgagaacaacttgattgaagagggtactttaacatggtaacattccaggcaaagagagtggcataaacaaacggatactggatgtgaactggtatgctttgcccagagaactgtatctattata

SEQ ID NO: 730980 - DNA, 573 bp, Homo sapiens
catagctctcaccttgcctcaggcccgggacactggccagggagctcaaggcctcgtcctgcctcctctgggatcgagtaggactgcaagaagaacctgtccgggacacccgttctcctcccttccctcaccggcctgaccgtcttctctctgcagttgctgttgtcctgctattagcactccctgcccctcctctactcggattcttattccctgattcccatacggaaaatcgtgggacttgccagcctccataatttcatgaatcaactccttaaaattaatctccatatagatagatgatagatagatagatgatagagctatmtttctctgtctaccgatacagatctatctatctgtatcaatcaatctatgtctatctatctacccatatatccacccacatccaattggtcctgtttctctgaagaaccctgactacgataccagctaaacccctgttcaataacaatgaaaagatgagaacctttcactgataaaaactgagagaatttgccatcagcaaactctcactaaagtaaattttattgtcttttgagacaggatctc

SEQ ID NO: 730981 - DNA, 573 bp, Homo sapiens
catagctctcaccttgcctcaggcccgggacactggccagggagctcaaggcctcgtcctgcctcctctgggatcgagtaggactgcaagaagaacctgtccgggacacccgttctcctcccttccctcaccggcctgaccgtcttctctctgcagttgctgttgtcctgctattagcactccctgcccctcctctactcggattcttattccctgattcccatacggaaaatcgtgggacttgccagcctccataatttcatgaatcaactccttaaaattaatctccatatagatagatgatagatagatagatgatagagctatatttctctgtctaccgatacagatctatctatctgtatcaatcaatctatrtctatctatctacccatatatccacccacatccaattggtcctgtttctctgaagaaccctgactacgataccagctaaacccctgttcaataacaatgaaaagatgagaacctttcactgataaaaactgagagaatttgccatcagcaaactctcactaaagtaaattttattgtcttttgagacaggatctc

SEQ ID NO: 730982 - DNA, 573 bp, Homo sapiens
catagctctcaccttgcctcaggcccgggacactggccagggagctcaaggcctcgtcctgcctcctctgggatcgagtaggactgcaagaagaacctgtccgggacacccgttctcctcccttccctcaccggcctgaccgtcttctctctgcagttgctgttgtcctgctattagcactccctgcccctcctctactcggattcttattccctgattcccatacggaaaatcgtgggacttgccagcctccataatttcatgaatcaactccttaaaattaatctccatatagatagatgatagatagatagatgatagagctatatttctctgtctaccgatacagatctatctatctgtatcaatcaatctatgtctatctatctacccatatatccacccacatccwattggtcctgtttctctgaagaaccctgactacgataccagctaaacccctgttcaataacaatgaaaagatgagaacctttcactgataaaaactgagagaatttgccatcagcaaactctcactaaagtaaattttattgtcttttgagacaggatctc

SEQ ID NO: 730983 - DNA, 619 bp, Homo sapiens
ctgtgtctgattgggctgttgacaatggtcagggctatgactccaagctgggcgcagttgctcgggcctgtaatcccggcactttgggaggtggtggcagggggactgcttgaacccaggagtttgagaccagcccaggcaacaaagcaagaccctgtatctacaaaacatacaaatcacctgggtatttttttgttttttttttttgtggcaattgtgaatgggattgcttttctgatttggttctcagtttggttattgttggtatataggaatgctagcaatttttgtatattgattttgtagcccgcaagtttgctgaagttatcagctgacgaagcttttgggccaagaatatggggttttctagatatagaatcatgtcrtctgcaaacagagatagtttgacttcctctcttcctatttggatgtcctttatttctttctcttgcctgattgctctggctaggacttcccatactatgttgaatataagtggtgagagaggacatccttgtcttgtgctggttttcaaggggaatgtttccagcttttacccattcagaatgatattggctgtgggtttgtcattaatggctcttattattttgaggtatat

SEQ ID NO: 730984 - DNA, 612 bp, Homo sapiens
aggtgttcacaggtagaccagggagtgagtgatggcagtgagggccaggctatcatgggcaggctccccacacccctcaggaacatggctgagtccagaaacagccatcagctgcacagttgtaaaggtgaaattaagatgtagaacaaggcctgggggtatagctcaggggtagagcatttgactgcagatcaagaggtccctggttcaaatccaggtgccccctactccttttaatcactgaagtagtgctgggatttctgccccttctccccacatgtgaccattagtgtgctttatttcatgataaaatttagtgtctggatcaggacaaggtctaagaatcctcccctgatcatcacccagataatataataactactagggtcacatttgattgaagaggctgaccaagttagcccagacaagccccacctctgggtctcttgcccttcatggtctatatgtggacttcactctttctcggtatctcatttcctcarcctcaccgtaatctccagaaagaaggcacagactatctctttgatcttgctactactgtgaagtatgaaggaaatatatgcagcttcctacttcccagaggcaactata

SEQ ID NO: 730985 - DNA, 628 bp, Homo sapiens
atcacccagataatataataactactagggtcacatttgattgaagaggctgaccaagttagcccagacaagccccacctctgggtctcttgcccttcatggtctatatgtggacttcactctttctcggtatctcatttcctcagcctcaccgtaatctccagaaagaaggcacagactatctctttgatcttgctactactgtgaagtatgaaggaaatatatgcagcttcctacttcccagaggcaactataatgatttgaaagcaatgtcaaatttgtctcttttctctgtctgtgaatttcttgagggtgctgcctctaccrcagattctggccatctgattctcccttcttctctcctaacacttcttatttcttaccctgggtcagtatttccttgatgagaatacctagaagtagaccctactttatgttatatttaaaaattcagataaaatatttaagacatataaatggctgtaacaaatcttcagaggattctctactttccttgatgaacaaagaaatctgaaataatcttttatatgaggacaaataaaaattcagaaaatatgaaaaacatctcattaaaagtatcaaagagctaacacaggaaataccagat

SEQ ID NO: 730986 - DNA, 572 bp, Homo sapiens
ggggttgggggtaaggttatagattaacagcatcccaaggcagaagaatttttcttagtacagaacaaaatggagtctcctatgtctacttctttctacacggacacagtaacaatctgatctgtctttcttttccccacatttcccccttttctattcgacaaaaccaccattgtcatcatggccctttcgcaatgagctgttgggtacacctcccagacggggtggcggccgggcagaggggctcctcacttcccagatggggtggccgggcagaggcgtcccccacctcccggacggggyggctggccaggcgggggctgaaaatttcaaaaggaaatttaaaagcatgaaaagtaacttaggagatttgaaaagaagacaaaatataaattttatgtctaaaaatataattaactaaaattaaaaaactcaacgaataggtctatgctcttcttaataaatagattaagccagtgagaaaaatcagtgaactaaaacattgggaggaaaaactatccatcataaaacatggaaagacaaaagtatggcaaacacagaagataaggtaa

SEQ ID NO: 730987 - DNA, 598 bp, Homo sapiens
aggaggattgcttgatgtcaggaagttgagacctgtctgagcaacatagtgacaatctgtacaaaaagtaaaaaattagtggggcatgatggcatctgcctatagtcctagctacttgggaagctgaggtgagaggactgcttgagcccaggagtttgaggctgcagtgagctataattgcactactatactccagcctgggcaacagagtgagaccccaatctctctttaaaaaaagttcartacaacaagaatatgtagcaattataaacatttatgtacctaataacacatggagcaagaaccaaaacaacacaattgaagggagaagtagaaagtactcaaataataaagacttcagcactccactcacaataataaatagaacaatcagactgacaataagtaaggaaatagaagacttaaacaaaataaactaattatatgtagtagatatatatagaacactacccaacaacagcagcagacacatttttctcaagtgcacatggaacattttccaggatagatcatattttaggccacatattaagttgcaatagatttaaaaagatatcatacaaaatatattcttgaa

SEQ ID NO: 730988 - DNA, 556 bp, Homo sapiens
taaatcttgacttctgtgtacctgcaggcccaacacccacatgtaagccatcaagccttgggtcttacaccccctgaagcaatggtctgaactgtacattggccccttttagccatggctggagctgaagcagctgggactcaggggaccaygtcccaaggctgcataaagcaggggtaccctgggcctggcccatgaaaccatttttccctcctaggcctctaagcctgtgatgtgaggggctgctgtaaagctttctgacatgccctggaggcatgttccccactgtcttggtaattaacatttggctccttattacttatgcaaatttctgcagccagcttgaatttctccccagaaactggggttttcttttctgttgcatcaccaggctacaaattttccaaccttttatggtctgcttcctcttgaatgctttgcctgataccctaaatcatctctttcaagttcaaagttccacagatctttggagccagggcaaaatgccaccagtctctttgctaaaacataggaagagttacttttactccaattc

SEQ ID NO: 730989 - DNA, 556 bp, Homo sapiens
taaatcttgacttctgtgtacctgcaggcccaacacccacatgtaagccatcaagccttgggtcttacaccccctgaagcaatggtctgaactgtacattggccccttttagccatggctggagctgaagcagctgggactcaggggaccatrtcccaaggctgcataaagcaggggtaccctgggcctggcccatgaaaccatttttccctcctaggcctctaagcctgtgatgtgaggggctgctgtaaagctttctgacatgccctggaggcatgttccccactgtcttggtaattaacatttggctccttattacttatgcaaatttctgcagccagcttgaatttctccccagaaactggggttttcttttctgttgcatcaccaggctacaaattttccaaccttttatggtctgcttcctcttgaatgctttgcctgataccctaaatcatctctttcaagttcaaagttccacagatctttggagccagggcaaaatgccaccagtctctttgctaaaacataggaagagttacttttactccaattc

SEQ ID NO: 730990 - DNA, 556 bp, Homo sapiens
taaatcttgacttctgtgtacctgcaggcccaacacccacatgtaagccatcaagccttgggtcttacaccccctgaagcaatggtctgaactgtacattggccccttttagccatggctggagctgaagcagctgggactcaggggaccatgtcccaaggctgcataaagcaggggtaccctgggcctggcccatgaaaccatttttccctcctaggcctctaagcctgtgatgtgaggggctgctgtaaagctttctgacatgccctggaggcatgttccccactgtcttggtaattaacatttggctcctyattacttatgcaaatttctgcagccagcttgaatttctccccagaaactggggttttcttttctgttgcatcaccaggctacaaattttccaaccttttatggtctgcttcctcttgaatgctttgcctgataccctaaatcatctctttcaagttcaaagttccacagatctttggagccagggcaaaatgccaccagtctctttgctaaaacataggaagagttacttttactccaattc

SEQ ID NO: 730991 - DNA, 556 bp, Homo sapiens
taaatcttgacttctgtgtacctgcaggcccaacacccacatgtaagccatcaagccttgggtcttacaccccctgaagcaatggtctgaactgtacattggccccttttagccatggctggagctgaagcagctgggactcaggggaccatgtcccaaggctgcataaagcaggggtaccctgggcctggcccatgaaaccatttttccctcctaggcctctaagcctgtgatgtgaggggctgctgtaaagctttctgacatgccctggaggcatgttccccactgtcttggtaattaacatttggctccttattacttatgcamatttctgcagccagcttgaatttctccccagaaactggggttttcttttctgttgcatcaccaggctacaaattttccaaccttttatggtctgcttcctcttgaatgctttgcctgataccctaaatcatctctttcaagttcaaagttccacagatctttggagccagggcaaaatgccaccagtctctttgctaaaacataggaagagttacttttactccaattc

SEQ ID NO: 730992 - DNA, 542 bp, Homo sapiens
gcttttttgcctcatatgtcgtgccccttacaaagcaggttcactgtgcactggttaccacttcggcccactgcatctcaggctgcacccttacagaatccctggggtgttgctttgccagccagaaacctctatgaccagtggtgcctttgcctgagttttgctctggccttctgggcttgttctacccactcagcctgtcagacagtgcccagctcacactactggcctgaatcccacacttgccaaggcaagccaggcatgaagtggcaaggggtccgtgagtgagygtggggtctggccactgtccatagccagacacactggctgtggtggggcgggcagttccaggcactggcatggatgccagctccctgcaaggctggagctggaccaagcataccataagcagcttccacagctcacaccagaaaatgcggtggtgcctggaagctcggagatgccaggaaccacagagccctaaagggggtgtcacagccctggctcagggagctcctaggtctgtggctacagctcctctc

SEQ ID NO: 730993 - DNA, 443 bp, Homo sapiens
gtggaagctttgttcttttgctcttcacaataaatcttgctgctgctcactctttgggtccacactacgtttatgagctgtaacactcacctcgagggtctgtggcttcattcctgaagtcagcgaaaccacgaacccactgggaggaacaaacaactccggacgcaccacctttaagagctgtaacactcactgcgagggtctgcggcttcattcctgaagtcagtgagaccacgamcccaccggaaggaagaaattctgaacatctgaacatctgaaggaacaaattctggacacaccatctttaagaactataacactcaacacgagagtccttggcttcattcttgaagtcagcaagaccaagaacccaccaaaaggaataaattccagacacaatactgtgtttttgaaaattatttgtagagataattttaggtata

SEQ ID NO: 730994 - DNA, 595 bp, Homo sapiens
gtggagagcctataaacagacacatggggggtgcctgtccatatggataagatagggctataaacgccctcatcttgccaaggctcttctaggcctctttagggttaaggcatactccccgctgagaatttctggtctaacctgttgtctagcttcacgtcctgtttctatggattgtttgtaaccacctgttgctgcaactgttactgctgattaatatctttctagtcataggttatggaaagactgkgtttctgttttagggctctgttagaaattactgatgcacacactatattgtaaattcttatctctgtatactgtacttctgcatacagatgttatattaaagaattacttcatccccatgtgaccatctcacttcataatcaaatgactccaaatccctcactaacctaaccctgacttcactaaacttaataataaatgctggtatatccagtgcattggtggcaccataggacgagaaggcggtgatccccctggacccagctttcactatcttgtgtgtgtctattatttctcgacctgcggatcctctgcctgggaacaaagaaacagcaccgttgtactg

SEQ ID NO: 730995 - DNA, 595 bp, Homo sapiens
gtggagagcctataaacagacacatggggggtgcctgtccatatggataagatagggctataaacgccctcatcttgccaaggctcttctaggcctctttagggttaaggcatactccccgctgagaatttctggtctaacctgttgtctagcttcacgtcctgtttctatggattgtttgtaaccacctgttgctgcaactgttactgctgattaatatctttctagtcataggttatggaaagactgtgtttctgttttagggctctgttagaaattactgatgcacacactatattgtaaattcttatctctgtatactgtacttctgcatacagatgttatattaaagaattacttcatccccatgtgaccatctcacttcataatcaaatgactccaaatccctcactaacctaaccctgacytcactaaacttaataataaatgctggtatatccagtgcattggtggcaccataggacgagaaggcggtgatccccctggacccagctttcactatcttgtgtgtgtctattatttctcgacctgcggatcctctgcctgggaacaaagaaacagcaccgttgtactg

SEQ ID NO: 730996 - DNA, 474 bp, Homo sapiens
aaaaaaatagaacacgaaactctgggggagctaaatattgattggtaagaatggaattccctgcttttcagcagaacagtctgaggtgctttgcagaaagttctcatgaagtcatgaaaacttttcccagccttaatcttataaaggggaatctgaraaaaaaaaatcaggtctgatgtgtaaggagtttaacttgatgttttctagcataatttactccccactcctttttatatagttggatcctatataaggtgtgaacactagattttaaagtgcatccttcatgacgccatatagccccctctttgggagacatggtcgggtggtcagtgctcacagtagcccttcattccttcccactgctcgcctggatgagggagacgtttccctggcagcagttaattactgtgggtaactgagtgctctcatatggggctacaggatcaagaagctcaagttgcatgtaactcc

SEQ ID NO: 730997 - DNA, 572 bp, Homo sapiens
acctatcttcaagaatatatattagaactgtgatttcctctatgtagcgtctattaatgcaatctaaataatggcccataaaaatcagcaaataattaacaatgctggtggaaatacctgtaatcaaccagatttgagattaggcagaactgagtttgagctcagattcttttcactgaagctccataaactttgtaaaatgaaggtagaggtgaagactaaacaagataataaggggaagattttgaccaagtacagtgctgtgtgctcaatagaaacataactacacagatatagcctttcttttttagtttcaaatatttcccttgcaaatatatcattgtattataaacatgttattagtaaccttagttgtaacaaagcacatttacaaatatyactattaaactgaaatagaaattttcataatatttgtctgagctcctcacttattagttattttctaaaagtacagcttaagtgttccaccatgacaacattggtgctggtcctgatactgctggggaatagggagaagcagtatttcttttattccaccctctgtgacagtc

SEQ ID NO: 730998 - DNA, 642 bp, Homo sapiens
ttttacaccaaaatcttttttcttagaagcttagtatagagcactatccattcggcctgtgtctcatttcccttgttttgttcctttagtctttgtcttaaggcccagattttccttttggattttactggctgaaaagaaggctgtcatcttctcatrttcagtgggctcaagatgtttgtgagaggcatgtcctgagacaaatccccaaatctgtcaatgtcactgtagcctgtgatttcctggataaaaagcagccaagaataattgaacagtgtaagctttggagaagtattccgtaatactgtttttcatcagtgatgaattcatttggacaggaagttgttttccctaaacctaaaccaattactttcataccaggaaaagcctttctagcaccagcaaaatcccacccatggaaaattcatgttcataatctccctttaaatgattgtgaaatttaaatgtaggttttctattagttcatttaaactgtcaatctaaaatactgagattatctaatttttttcttaaactaattattctttgattcagtgcacatagtattatggaaactacaagtaaaaaagaattgattatagcaaaatacagatgtaaggagataaaacactttatgaatat

SEQ ID NO: 730999 - DNA, 520 bp, Homo sapiens
caagatgaattaaagatttagatgtaagtcctgaaacacggaggtttcagtgagccgagatcgtgccactacactccagactgggtgacagagcaagacttcacctcaaaaaaaaaaaaaaaaaagtccttgaagaaaagctaataaatatgcttctggacatgagccttgacaaataatttatgactaagaagtcctcaaaggcaatcgcaacaaaaacaaaaattgacaagtgggacctaagtcaactaaagagcttgtgcatagcaaaaggaactatcaacagagtaaacagacaacctaaagaataggagaaaatatttgcaaactatgtatctgacaaaggactaatatccasaacctataaggaacttgaacaactcaacaagcaataaacaaataaccccattaaaaactgggcaaaggacatgaacaggcacttctcaaaaataaacaagtggtcaaaaaacatattaaaatactgagcatgactaatcttcagagaaatgcaaataaaacc

SEQ ID NO: 731000 - DNA, 652 bp, Homo sapiens
aaaaacaaatcatgtcctttgcagccacatggatggagctggagaccactatcctaagtgaattaacatagaaacagaaaaacaaatatcacatgttctccctgctaagtgggagctaaacattgagcacatatgaacacgaagaaggaaacagtggacaccggggcttacttgagggtggagggtagaaggaggggactattgagtattatgctgattacctgcatgacaaaattatctgcacaccaaacccctaaagcacrcaatttacccatgtaacaaaactgcacatggaccccttgaacctaaaataaaagttggaaaggaaaaaaacaaaaagattataagggagttgaaaaattcctactgcctagggatgcgcagccattgtaatgtccttgcctaatgcgttactcaggtgtctgtgaggatgctgctgtgctgccagtcttgcacaagtacagcacatacaattatgtacaatatataatacttgatcatgataataaacgatgttactggtttatatatttagtatactatacttttaatcattattttttagtgtactccttctacttataaaagaaagctaactgtaaaacagcctgaagcaggctctttcaagaggtattccagaagaaggcattgg

SEQ ID NO: 731001 - DNA, 639 bp, Homo sapiens
tgcccttgacttggcatgtgtgtgactcctaggaagtccctgaattctctgcacttcagtttccccatgaagctggttgatctctgctcccataaacctttcagaatatctctataagacttgggtatcttagaagaagactccataagaatagccctatataagccagtggttaagaaatcagactaagtttaagtccggctctgccatatattcaccacaagatgctatgactttctaaatcctggtttctgggtttccgtctctacacagcagggatagtagtaataattcttatctggcttggtgttgtggggatgcaacggaaagctctcagcacagtgccaggcataggatgggggggggcacaaagtgtgcatttatcaaacagaggccccaaagtccctcaaagcagagcctcaggggccctgcccaccatgrtcctgtcaccaagagcctcagccttcacctgcagacaccagacctgcattcaccatgagtgtggggctgagtggcatgatctggggagtgcagaccacattacagtgtagggcttttctaccctagtctgttgtccgttagcaatccgcccaaatgatgggtggctcctctggtcaagatggggctccattcaggctc

SEQ ID NO: 731002 - DNA, 590 bp, Homo sapiens
gccctttcagctgtgctcctctgtgtgtagagccgaagtaggcccacagtgtggggagaaggccctgtagaagccacaagtgagataccatgagctgggagtggggtcatctgggtggacaatgacctgacctgaggatactggatctctgagtcctgggaaaagcacagaccagcattatcaggcacagagtgctttctttgcttttagattgacagagatgatggtaatctcactcactgggcaaagtaggggaggtggtgacattactctgtttgtcagggtgaccagcagccaagggaggccacggacacactcaggggagatgagcacagccaccccctagaatgagggtttttgatgtttgcttgaatgttttaattgtgataaaataaacataayataaaatgtactatcttgaccatttttgagtatacagttcagtagcattgtatattcacattctggtgcaaccaatctccaaaacatatcatcttgcaaaactaaaactctgaatagtacccattaaacaactccctattcccattcccctagtttctggcaaccaccactctgcttctgtttttaat

SEQ ID NO: 731003 - DNA, 458 bp, Homo sapiens
taatgtccaccactggaggcaattaataatgattaggagcaaaacagcagggttaaatctgtgcatttaagagagtgttcatacacttttatactatatttcagtctagttgctcaaaggaaaacagaaaatccttttgggggactagaacaatcttatcttaattaacatgtaaacttagatgaaatgtcaaaatcgcttcaatgagacatgcttattcattatttacttaatcctcccttcctgrggttagagaaaaacattgcacaaaagtagcatagtgtggggagaaatgttaagactgagtcgagacgcttgtagaactcttgcacttattgaattgctgcattcagtccacggattgaggtgagtgagaaattcttgcctcttttattttactattctgcagttactatattataaaaaagcaggaaattggcaaaccatagatttgcaat

SEQ ID NO: 731004 - DNA, 585 bp, Homo sapiens
ttaataagatgtcctttcaacaaatgtccatttttccttataaaatgtcagagatgtttaagcaaactcccaaggttatttaattattggataataatatacactggtgatggaaattaattacacaggtactgtgaaataccctgctttgctactgacaacacccagcaatacagagcacatggctgagtccatagaaaactgtggtaattgtgacagcagtaacagcagaagagccacaaagcctcctccacgtaggtctgtcattagctgatgtcaccaaggggccataaacagaagctcctctatatcacatgggccaygagatagcaaggtaaatagagggcagttgtttaatttatctattgtaacagagttgagtgcatggcaaataggtttgtaagtgcatttattaccatctccatatagtatggtttccaccaagagtgagtgagctcagagcctgctcactgtggctgtgcctcatttgatgcaatccaagggccatgatcagggagtctcccgagtgccttccccagtggcagtgagtggcttggggaggcatggggttggaaacacattctg

SEQ ID NO: 731005 - DNA, 612 bp, Homo sapiens
acaacatgggtgaaccctgaggacattatgctaagtgaaataagctagttacaaagggacaagtactgtataattccacttatatgaggtgcctaggataggcaaattcatacagccagaaggtagaatagaaattactaggggctgggagaagagggggaaatggcgagtctttgctttcatgggtacagagtttcagtctgtgatgaagttctggagctggatggtggtgctggttgcacgacaatgtgaatgcatttcatgccactgaattgtatacttagaaatggttaaaacggtcaattttgtgttgcatatattttgccgcaacaaaaaatgtagttctagacctaaaaaaaaaaaaamaaaaaaagatcaatgctgaaattaaaaaccagaggagcttccacatgccacaaggagcttgctctgatgagtctggtggacagacttctcattgctatattgttttgtgatgcttccatttgtatctcctttccaacatgtgacatttgtcacaactccaaaagatgtgagaaagttgggacgaggccagaataaatgtttttggatgggttgtgcttttgtgtttggccatgtgaaagcgttttt

SEQ ID NO: 731006 - DNA, 493 bp, Homo sapiens
gaataacctgaatgggtgagctagccaggaaatctactgaattctaaagtattaaacaatttttccttctactgattagatttaggctattaattcctaacctaggtctaaaacactttgccacctgaaggccaagtccagttttagaggatttctaccatctgcacagtatttgtaaacatcgtgaatttcttgctattatttaaaacctagatttttacataatagctggatttccagtttgtcttggaaaatcagattgaaatggaatttactattattttcttctcttaagataaagtcccctacttttcyttttcttattcataataccacttttccatatcatttctgtacatcccttcttttctcattcaaacttcacccatcttaatccagtcccgtttcagtacaactgtcttaacttcttggctccaggctcttctcagtctctctagcatgctattttacatttaatctctcttaaatactt

SEQ ID NO: 731007 - DNA, 493 bp, Homo sapiens
gaataacctgaatgggtgagctagccaggaaatctactgaattctaaagtattaaacaatttttccttctactgattagatttaggctattaattcctaacctaggtctaaaacactttgccacctgaaggccaagtccagttttagaggatttctaccatctgcacagtatttgtaaacatcgtgaatttcttgctattatttaaaacctagatttttacataatagctggatttccagtttgtcttggaaaatcagattgaaatggaatttactattattttcttctcttaagataaagtcccctacttttccttttcttattcmtaataccacttttccatatcatttctgtacatcccttcttttctcattcaaacttcacccatcttaatccagtcccgtttcagtacaactgtcttaacttcttggctccaggctcttctcagtctctctagcatgctattttacatttaatctctcttaaatactt

SEQ ID NO: 731008 - DNA, 583 bp, Homo sapiens
atggtatctcattgagattctaatttacttttccttgttgactgatgatatgggtcattttccttgtggtggtttgctgttcatgtatcttgctaggtgaagtggctgttcatattttttgcccggtttttattgagctgttttttcattattgagttttaagagttctttatatatcctttatatacattatttatcaaatatgtgatttccaggaattttctcccatttttgtggtttggacagatgaatttatttatttatttattgtttgagacgaagtttcactcttgttgcccaggctggagtgcaatggtggggtctcagctcactgcaacctccgcctcccaagttcaagtaattctcctgcctctcagcctcctgagtagctgggattgcaggcgtgygccaccacatccagctaatttttatattattagtagagatggggtttcaccttgttggctaggccaggtctctaactcctaacctcaggtgatccacccgccttggccccgcaaagtgctgggattacaggcgtcagccactgcgcccggctgacaggtgaattctttatccccca

SEQ ID NO: 731009 - DNA, 541 bp, Homo sapiens
tgatggatggcttgaagaagttgataactgagataagcagccattgtccctgttgctgttgctatgttaggggttcttaacccatgttgagtttggagggctgcatgcagtggtctggaaacttctgacactacatgtaaaattttagrtttgtatttttggggggagaacattccctgcattacatcagattctcaaagatctgtaacccccaaaatattaagaattacttttttagatgttgctttggtttactagctccttgggctgtgatttcttaggatatttttatcttaatggtaaaggtgggagagttgttgtcaggtggggcatatctcattgggtacctttactagtttggcgtcagaaagtagaatgtgagaacctttttacttgttatcttaaaaaggaaaacttacttataattagtagtgattatttgctcatggtttgccttttcactgattatccgaatccaaggtgtttttctgctgccttgccctcagccccgtgtttcctcatgcagagtgcccagcttgtt

SEQ ID NO: 731010 - DNA, 451 bp, Homo sapiens
atattgctggtaccaagggagaccatattactgctacaaagcagctagtgattaacaaccatagtaattggtgatcaggaaacaagttaaacatgctcacataatagtttgctacttatatataggtgtttttactgtgttttagttatgtcttaagaaattggttgagggttttagatgatatattccacattgtaatttttcccatctaaagtgatgggaaataagcttgccattatattttcccaccsatttgattttcaggaacgtattactgatattaggcagggattcctttactaatctggaccagctatgttattaagtcagcaattctgctgatgataatgtagtctttaactagcaactcacctgtatccctcacatattttaaatgttacatatttggaaatgtatttccaaaacgctgaaggcaataaatgaaaccata

SEQ ID NO: 731011 - DNA, 661 bp, Homo sapiens
atattgactctttagtggaaagcatacctattgaatgaataggtctttgttaacagcatgaagatttctggtgatacactacatgctactagaaaaagtcaaagcatggataagatactaaatattgaaactaatggcatatattaccctaggcaaggaaaaaagcaaatgaaaaattagctttttatttctgacacaaaactatcattgaatttaaatcatgttgtgatggagactatataatgaatatcttaatgacaatgcttrtaatgctattttgtttgattgtgtttatttgttgaattaataagcctttgagagcactctattagtatctagggttcattagaagtacattttgcaatttctgggttgtaaattctttataataatttgacatgtaaatagaatttatatagagagatttagatccaatttaacacctgttgaataaatggttctgtgatttaaaaattattttagcatatatctacttttagtttcatataattagtttgataaataaacactgaactgaattaactgtataactgaatttcattatatttatctgagctctgctgtgctgtataaatcacatagaaagttaatgtatcagatatgttttctgtttcatagttcttgtttctgtttcttgaca

SEQ ID NO: 731012 - DNA, 582 bp, Homo sapiens
tgtaagtccaagagtccaaaagctgaagaacttggagtctggtgttccagggcaggaaaacatccagcatgggagaaagatgaaggctggaagactcagcatgtctagtccttccatgttttcttgctttattctagctscactggcagctgattagatggtgcccgcccagattgagggtgggtctacctctcccagtacactgacacaaatattagtttcctttggcaacaccctcacagatacacccaagaacaatactttgcatcctttaatccaatcaagttgacactcaatattaactatcacaccatctgtgttttctcattggctttatgtgaaggtaaaatgaaactcttatatctttatgacaaaatgtagttttatgacatagccagacacccattgaaattagactccttccctctcacagaaaataggagactgagtgctatcttctttgatgatgacatgtcgaagacatgactctcaggtccttgaaaaaaaatttctgggttataaaactgtcaggaagcttttaaaaagatctatatctcaaagggtcagagaaataatttacaa

SEQ ID NO: 731013 - DNA, 582 bp, Homo sapiens
tgtaagtccaagagtccaaaagctgaagaacttggagtctggtgttccagggcaggaaaacatccagcatgggagaaagatgaaggctggaagactcagcatgtctagtccttccatgttttcttgctttattctagctgcactggcagctgattagatggtgcccgcccagattgagggtgggtctrcctctcccagtacactgacacaaatattagtttcctttggcaacaccctcacagatacacccaagaacaatactttgcatcctttaatccaatcaagttgacactcaatattaactatcacaccatctgtgttttctcattggctttatgtgaaggtaaaatgaaactcttatatctttatgacaaaatgtagttttatgacatagccagacacccattgaaattagactccttccctctcacagaaaataggagactgagtgctatcttctttgatgatgacatgtcgaagacatgactctcaggtccttgaaaaaaaatttctgggttataaaactgtcaggaagcttttaaaaagatctatatctcaaagggtcagagaaataatttacaa

SEQ ID NO: 731014 - DNA, 604 bp, Homo sapiens
gctgaggtacatccttgaggaagagacaagcactgctataattctgagttctgttcctctatttcaaaatgtcaagcccagtgaaagttgggcttgacaaaaatcaagttctaatttcaagcttaatagaatgttaaagaaagtcccaatttctgcttccttaccaaattttagaattataacacatctacctcttaggctatctactagctccttaggctcctagaatcttagaattttagtttcttccagagagatcctaaaatgaaataattttctttgagatggtttggagaataggggcagaacatgaatgacacttgtatttctctgctttcctgaaacaggaaatagagacaattcttgaagaagtgatatccttgtttcaactcctgaatcaaatawaatattcagggtagcaattgtgtgtagggaaacactgaggtgtttgctctggatggctatttatgttctctaagcttagtgatcaagagagcagatagggtagaaatgggaggaatatagaaaagcaggcataactggcattggcagttttgcttgggtgaatcccttggtgtaataaggatttcttgtctctccctgc

SEQ ID NO: 731015 - DNA, 521 bp, Homo sapiens
atggacagcagaatttttcaagcagaagaaagaatctatgaagacagtttatataaaaatatgcaatcggagaaaaagaaaaaaatgaaaatgaataaagatttcaggatttatgggacagcatcaaaagagcaaacattcaatttataggagttaaaaagrggaggggagagaccaatggcagaaagcttaaagagataacatcaatatactttccaaatatgaggaaagatataaaatatcctggcacaggaaagtcaagtctccagataaaatccaaataagatgacaccaaaacattatattcaaactgtcaaaaataaaaaacataaagaagattttgaaagcagcaagagaaagaagcaaatgacaggtaagagagtttcaataaggctagcagcagatttatcagcagaaattctacagtccaggaaataaaaggatgatagagtcgtcactcagcatccatgtggggttggttcaaggccctcccatggataccaaaatccatagatgctcaa

SEQ ID NO: 731016 - DNA, 492 bp, Homo sapiens
aatttttcaagcagaagaaagaatctatgaagacagtttatataaaaatatgcaatcggagaaaaagaaaaaaatgaaaatgaataaagatttcaggatttatgggacagcatcaaaagagcaaacattcaatttataggagttaaaaagaggaggggagagaccaatggcagaaagcttaaagagataacatcaatatactttccaaatatgaggaaagatataaratatcctggcacaggaaagtcaagtctccagataaaatccaaataagatgacaccaaaacattatattcaaactgtcaaaaataaaaaacataaagaagattttgaaagcagcaagagaaagaagcaaatgacaggtaagagagtttcaataaggctagcagcagatttatcagcagaaattctacagtccaggaaataaaaggatgatagagtcgtcactcagcatccatgtggggttggttcaaggccctcccatggatacca

SEQ ID NO: 731017 - DNA, 670 bp, Homo sapiens
aatagtagaaacctgacaagaaaagttgaaattatttaagaaatcaaacaaattttggagctgaagtatacaataaatgtaaaatgcaatacagagcatggacagcagaatttttcaagcagaagaaagaatctatgaagacagtttatataaaaatatgcaatcggagaaaaagaaaaaaatgaaaatgaataaagatttcaggatttatgggacagcatcaaaagagcaaacattcaatttataggagttaaaaagaggaggggagagaccaatggcagaaagcttaaagagataacatcaatatactttccaaatatgaggaaagatataaaatatcctgkcacaggaaagtcaagtctccagataaaatccaaataagatgacaccaaaacattatattcaaactgtcaaaaataaaaaacataaagaagattttgaaagcagcaagagaaagaagcaaatgacaggtaagagagtttcaataaggctagcagcagatttatcagcagaaattctacagtccaggaaataaaaggatgatagagtcgtcactcagcatccatgtggggttggttcaaggccctcccatggataccaaaatccatagatgctcaagtaccaatataaactggcatagtatttgcatataacctatgcatatactacc

SEQ ID NO: 731018 - DNA, 670 bp, Homo sapiens
aatagtagaaacctgacaagaaaagttgaaattatttaagaaatcaaacaaattttggagctgaagtatacaataaatgtaaaatgcaatacagagcatggacagcagaatttttcaagcagaagaaagaatctatgaagacagtttatataaaaatatgcaatcggagaaaaagaaaaaaatgaaaatgaataaagatttcaggatttatgggacagcatcaaaagagcaaacattcaatttataggagttaaaaagaggaggggagagaccaatggcagaaagcttaaagagataacatcaatatactttccaaatatgaggaaagatataaaatatcctggcacaggawagtcaagtctccagataaaatccaaataagatgacaccaaaacattatattcaaactgtcaaaaataaaaaacataaagaagattttgaaagcagcaagagaaagaagcaaatgacaggtaagagagtttcaataaggctagcagcagatttatcagcagaaattctacagtccaggaaataaaaggatgatagagtcgtcactcagcatccatgtggggttggttcaaggccctcccatggataccaaaatccatagatgctcaagtaccaatataaactggcatagtatttgcatataacctatgcatatactacc

SEQ ID NO: 731019 - DNA, 670 bp, Homo sapiens
aatagtagaaacctgacaagaaaagttgaaattatttaagaaatcaaacaaattttggagctgaagtatacaataaatgtaaaatgcaatacagagcatggacagcagaatttttcaagcagaagaaagaatctatgaagacagtttatataaaaatatgcaatcggagaaaaagaaaaaaatgaaaatgaataaagatttcaggatttatgggacagcatcaaaagagcaaacattcaatttataggagttaaaaagaggaggggagagaccaatggcagaaagcttaaagagataacatcaatatactttccaaatatgaggaaagatataaaatatcctggcacaggaaagtcaagtctccagataaaatccaaataagatgacaccaaaacattatattcaaactgtcaaaaataaaaaacataaagaagattktgaaagcagcaagagaaagaagcaaatgacaggtaagagagtttcaataaggctagcagcagatttatcagcagaaattctacagtccaggaaataaaaggatgatagagtcgtcactcagcatccatgtggggttggttcaaggccctcccatggataccaaaatccatagatgctcaagtaccaatataaactggcatagtatttgcatataacctatgcatatactacc

SEQ ID NO: 731020 - DNA, 601 bp, Homo sapiens
ttaccacagtggttcttcagtttatttacaattttgtttcctccaatactctgggagtgctgaaatgaatctagaagacagtaaaatgtccagacttgtgatctgaaaattaggacatagaccaaaatgacaggttcaaggaaaagtttgaataaaagacatgaaaccagaattaaaagatgataccatgggaaattctagacctaaatagagttttgcaaattccagtagagattaattccagctcctagtcttcctaagtcctgcagaggtaatcaaagacacaaggtcccccagggctagagaatatgtgtggctaggctataaaggctcacactgaccatctgtctaatgtgcaaactcataatgacacagatcttcaaacccaaaacccaagagaaatcagattaacattttaaataatagaagctgacctaycactctgtttaggcagtaaaggtttatttgtataaaccttcaaaaaggttaagtaaacctctgccttcttccccaatttcttctctatcagatagaaggctaaatacgggggataaatatctattttatttaatttgttttctttttttaaataggagaaaaa

SEQ ID NO: 731021 - DNA, 654 bp, Homo sapiens
aactgcaacttgtcatagtatgctaaaaaggaatgaaaaagggaaggtaatactaccaccccttcacatgatagaactcctatgatttcttgaggatacctcactgatatggtttggctatgtcccctcccaaatctcaacttgaattgtatctcccagaattcccacttgatgtgggagggacccaggggtaggtaattgaatcatgggggttggtcttttctgtgccattctcgtgatagtaaataagtctcatgagatctggtgagcttatcaggggtttctgtttttgcttcctcctcatttttctctttccgctgcatgtaagaagtggcttttgcttcccaccatgattctgaggcctccgcagccatgtggaactttaaatccaactaaacctctttttcttcccaatctgatgtatgtctttatcagcagcatgaaaatgcactaatacaataaattggtaccagyagagtggggcattgctgaaaagatgcccgaaaatgtggaagcaactttggaactgggtatcaggcagaggttggaacatgttggagggctcagaagaagacaggaatgtaggaaagtatagaacctcttagagacttgttaaatagctttgaccaaaatgctgacagtgatatgaacaat

SEQ ID NO: 731022 - DNA, 581 bp, Homo sapiens
ctcccaccaaacttgagcatcccagattgacttcagactgctatgctggcagcgagaatttcaagccagtggatcttagcttgttgagctctgtgcgggtgggatctgcttagtaatagtactaggctccctggcttcagctccctttccaggagagtgaatgattctgtctcactggcattccaggtgcgactggggtacgaaaaaactaatgcagctaactcggtgtctgcccaaacagctgtgcagttttgtgcttgaaacccmgggccctggtggtgtaggcacctgagggaatctcctggtgtgtgggttgcaaagatcatggtgaaagcctagtatctgggccagatagcaccgtccctcaaggcagagtccctcatggcttcccttggctaggggagggagttccccgaccccttgcacttcctgggtgaggcgatgcccccctctgcttctgctcgccctctgtgggctgcacccactgcctaaccagtcccagtgagatgaaccaggtacctcagttggaaatgcagaaataacccaccttctgtgttggtctcgctgggagctgcagacga

SEQ ID NO: 731023 - DNA, 632 bp, Homo sapiens
caataggctcccgcctcacagattgaataccaggacaccactcaggagctgaaggggccaggctcctccctgctgcataaagcatgaatttctggtgcccaccccattctcccagtgtgcaggtggaccccagttcaytgtgggcatgcccagacaaaaccctgggcaggttccctcatctgcaaaaaatcatctaatgtaaacacttgtggggcaggtcggagattctctggggaccctcctttatctgcctcctgcatctatcataatgatatatgaaataatgatataaacttatattggccaaacttttggcttaacatctattgggagaattctgaaacaacaaggtggaaaaggagggaaatcttaaagaatgctgcctctggtttaattcttggtttggagagaagacttccgttcatcacttctgaggaagcagaaagtcaaacagcaatattatgcctatgaaatacttgtcagtaaaagtgaggatagtactcaaggtggagatagagtattctttaagttaaaatttattaccaaaaagcatgaagaaactttagaaagcatttgttttgtatagttaataatggattgcacatatagatgctctaaaagaaaatatagtg

SEQ ID NO: 731024 - DNA, 632 bp, Homo sapiens
caataggctcccgcctcacagattgaataccaggacaccactcaggagctgaaggggccaggctcctccctgctgcataaagcatgaatttctggtgcccaccccattctcccagtgtgcaggtggaccccagttcattgtgggcatgcccagacaaaaccctgggcaggttccctcatctgcaaaaaatcatctaatgtaaacacttgtggggcaggtcggagattctctggggaccctcctttatctgcctcctgcatctatcataatgatatatgaaataatgatataaacttatattggccaaacttttggcttaacatctattgggagaattctgaaacaacaaggtggaaaaggagggaaatcttaaagaatgctgcctctggtttaattcttggtttggrgagaagacttccgttcatcacttctgaggaagcagaaagtcaaacagcaatattatgcctatgaaatacttgtcagtaaaagtgaggatagtactcaaggtggagatagagtattctttaagttaaaatttattaccaaaaagcatgaagaaactttagaaagcatttgttttgtatagttaataatggattgcacatatagatgctctaaaagaaaatatagtg

SEQ ID NO: 731025 - DNA, 468 bp, Homo sapiens
accaggctggtcttgaactcctgacctcgtgatccacctgcctcggcctcccaaagtgctgggattacaggcgtgagccaccgcacccagacccctcttgtccattcttttcatggatgaggaggctgaggcccaagccggtcaagggggkgccaggactggggctccgacattttctctcccaggggattctcaggatccctctctgggaacatgatcagtggctttaaggggccaggggctttccctccagccagccctggactcacaggccccagagaacctggagaagccagcctcgcatggctgggattttcatcgggagaatcccactggccatgtactgggctctctcccagtccgagattgggctctgggctcagcactgagcaggacccaaggaagtggcttaagtctttgtggccaggcggtgtctgctgtagaaagcagtgtggcatgtggccgggt

SEQ ID NO: 731026 - DNA, 468 bp, Homo sapiens
accaggctggtcttgaactcctgacctcgtgatccacctgcctcggcctcccaaagtgctgggattacaggcgtgagccaccgcacccagacccctcttgtccattcttttcatggatgaggaggctgaggcccaagccggtcaagggggggccaggactggggctccgacattttctctcccaggggattctcaggatccctctctgggaacatgatcagtggctttaaggggccaggggctttccctccagccagccctggactcacaggccycagagaacctggagaagccagcctcgcatggctgggattttcatcgggagaatcccactggccatgtactgggctctctcccagtccgagattgggctctgggctcagcactgagcaggacccaaggaagtggcttaagtctttgtggccaggcggtgtctgctgtagaaagcagtgtggcatgtggccgggt

SEQ ID NO: 731027 - DNA, 665 bp, Homo sapiens
tcctaaatattttatcatctttaaatttgtttctgtattattatatgtgctcctgaagcgagcactctttttatctatgatacttccataataatctcttctatttatagctattggtagttcccctaaattctgrcgatagaaatttttatttgctgtttaggtttgtgactgaattgtgagaattcagttgtgatttttaacatgtgtcagatatatatactaacacgtctaatatatactattttattggtttattttgaaaaacatgggtatagaattatttaaatattattttatttatttaaatatttattaaatatatttatttatttaaatgttattattactttaaatattattttaaatattttggaaatactggtatttttgaatagatgctgtttctataaagctgtgtgatggtattataactgttatatacacatacatataattttgttttcctttttaagagaggattcttttcatcctaaatcttttacctttcaatctttgtatctattattacacgtgctgctgaagggagcatggtttttatctatgatacttagttaacatatatattacatttatagctatgtagtagttcccctaaattcttgtaaaaataaatttttatttgatatttcatctatgtttga

SEQ ID NO: 731028 - DNA, 665 bp, Homo sapiens
tcctaaatattttatcatctttaaatttgtttctgtattattatatgtgctcctgaagcgagcactctttttatctatgatacttccataataatctcttctatttatagctattggtagttcccctaaattctgaygatagaaatttttatttgctgtttaggtttgtgactgaattgtgagaattcagttgtgatttttaacatgtgtcagatatatatactaacacgtctaatatatactattttattggtttattttgaaaaacatgggtatagaattatttaaatattattttatttatttaaatatttattaaatatatttatttatttaaatgttattattactttaaatattattttaaatattttggaaatactggtatttttgaatagatgctgtttctataaagctgtgtgatggtattataactgttatatacacatacatataattttgttttcctttttaagagaggattcttttcatcctaaatcttttacctttcaatctttgtatctattattacacgtgctgctgaagggagcatggtttttatctatgatacttagttaacatatatattacatttatagctatgtagtagttcccctaaattcttgtaaaaataaatttttatttgatatttcatctatgtttga

SEQ ID NO: 731029 - DNA, 665 bp, Homo sapiens
tcctaaatattttatcatctttaaatttgtttctgtattattatatgtgctcctgaagcgagcactctttttatctatgatacttccataataatctcttctatttatagctattggtagttcccctaaattctgacgatagaaatttttatttgctgtttaggtttgtgactgaattgtgagaattcagttgtgatttttaacatgtstcagatatatatactaacacgtctaatatatactattttattggtttattttgaaaaacatgggtatagaattatttaaatattattttatttatttaaatatttattaaatatatttatttatttaaatgttattattactttaaatattattttaaatattttggaaatactggtatttttgaatagatgctgtttctataaagctgtgtgatggtattataactgttatatacacatacatataattttgttttcctttttaagagaggattcttttcatcctaaatcttttacctttcaatctttgtatctattattacacgtgctgctgaagggagcatggtttttatctatgatacttagttaacatatatattacatttatagctatgtagtagttcccctaaattcttgtaaaaataaatttttatttgatatttcatctatgtttga

SEQ ID NO: 731030 - DNA, 593 bp, Homo sapiens
ctaattctaaattcatcatgctaaatttatgcttctctgtaaacttatggccacagaatacatatttttttttttggaaagcactgtcactttggccctaaaggaacataagcaatataaagggccccagaggccaaggaaattgaagagaagtcagaagaagggatataaaatggaatgtgttaacggattttagtccctttaagtttgcacttttgtgagagggttcaatggaragctttaatgcagatgagacttgaagcttttgaagaagatctaagtcttgatgaggttattcaaactcagatcttgaacgcataatgatgataggccatggtcttcaaaaacgtggtacttgatgctctcccacagtgccaggactggaatgtcacaatacatatagattcatgtttttgtccattaatggtctgtgggtttctttaaatgaagcccattttagagtccatagatatcagtgttctgcgaaactgttggggattggaggctcccaaaagaccccagatgctctgccctgcccatggcatcaccctctaaagcgattcttgtgcctcagcctcctgagtagctggtta

SEQ ID NO: 731031 - DNA, 602 bp, Homo sapiens
gcaatactgctcaccttgagcccagagcagctactatccccggcccctccgctggctttctgggaggtcccaggaagacgtgacctcttgtcaggcactcgtgggctcccccatagctgccggggtggttcttgcccctccaaaatcacacatgctcctcggcaaggatgcgtcagctaacacaggggatcggggctctgctttccttgcgaatgattttgttgcggaggggacaccacgtggctcatgctcacacctctgacacttccatgtgtctctgatttttaaaactatgaggaaacacattaggaattgccggtgcacagcgtggacacaaagcccataaggggccttgctggtggtgctgggggaggctctggggcctggggtcctgccasagggaagcagggagcagcccaggaggatgggtggcactggggaggcacccggagactggcactgctctccccacccacatgttccctgggcagaacctcaactaagctggagacacctacagcagcagatgtgtgtccctttcgtcccgcttgacttcatttctctctcccgtccttcaggagaagacagacctcccagggtcc

SEQ ID NO: 731032 - DNA, 630 bp, Homo sapiens
aaagcggagcccctcccaagctccccctggctggccccacccacagcccagcctggctctgctcaccgggttcctctctggcatctctagcactacgcacctcaagaccatgcccaggaaggctgcggctggcgctgctcactcagcacgtctctctcccggcccagcaggcatctctggcacctcctgtcctagcctggtcctggacctcatcctccgtgctgcaaagtgaagccactgtcccttggagtggcccttctgcagggccctgggagatgctctgtctgggacacctactggtggcctyggctgtgtttcccagcatcccttccatttcccgcagcccctcctttccacaggaccccttcctgcctcccctgcaccggcggagggcatgtggccgggacatcccctcgccctccaaggccatgtctagaccactgttcccctcttgattttctcctgacttcccgaaccatcattcccacctgctgcatcgggcaccctgccattgtccttgaggacagcttcagccccaaggaagaatctcgtgcccaccagactgccctcctgaccccagctcccagcaggcactcccaggctgacctgtcctcatgccgtacccacccc

SEQ ID NO: 731033 - DNA, 457 bp, Homo sapiens
gcaatctccgcctcctggattcaagcaattctcttgcctcagcctcgtgaatagctgggattacaggcatgtgccaccacgcccacccagttttgcatttttagtagagacagtgtttctccatgttggtcaggctggtcctgaactcctgacctcaggtgatctgcccacctcagcttcctgaagtgctgggattataggcgtgagccagcaagcctggcaaaaagtcactttctttatatcagactttgctcttgttcrtcggactctacaagcagcaagtgactgaacccgcaattcggttacactcagaacactgacattagcctacggttgggcaaaatcatctggcaacacagtacactgtacagtatcattgttgactctcatggttgcctggctgactgggagttgcagctcactgcaagagagtatcatactgcatatcgcttgcccc

SEQ ID NO: 731034 - DNA, 554 bp, Homo sapiens
tggagttctgaacacatctggttctcatctaatcctcagctcacagctgcctcagtcagcctccaacaagattcctctgtcactggtggctctgcgagaaaaccaatccctgaactgaccagctcttctgactgctcagaagtaggatcatgtttttgtttttgttttgagatggagtttcactcttgtcatccagtctgaagtgcattggcacgctcttggcccactgcaacgtccaccttccacattcaagcaattctcctgcctcagcctcctgagtagctgggattacaggcaygtgccagcatgtccagctaatttttgtatttttagtagagacggggtttcaccatgttggccaggctggtctcgaactcctgacctcaggtgatccgcctgccttggtctcccatagtgctgggattacaggcatgagccaccgtgccaggccagaagtaggatcgtgtttacagagcactgcttgcattcactcattcattcattcattcaataaacatgatgtcttgagcatcccttgtgccaggcaatgtgtt

SEQ ID NO: 731035 - DNA, 661 bp, Homo sapiens
ataatataatgtagcaaatttggaaatcagattccctgaccccccaccacaaagagtttgttgttgctattgctgtttgtttccttagtgatttttctggattaattctataaagtctgtgttctttttcatgttttgctgctaaaattcctgttagcttagtagtcaactaatgattgcacaggctttttttttttttttttttttgacagagtcttgctctgtcatccaggctggagtgcagtggcgtgatcttggctccctgcagcctctacttcctgggtttaagcaattctcrtgcctcagcctcccaagtggctgagactacaggcacacaccaccatgcctggctaatttttgtatttttggtagagatggggttttgcgtgttggccaggctggtctcaaactcctggcctcaagtgatccacccacctcggcctcccaaagggctgggattacaggtgtgaaccactgtgcccagcccagatatttctttaaatcccttaaccccataagtgtcccagcctttgctgaggaacactgtgtgtgtgtggagcctgacttcaatgctttatcaagcagtttgcagctctgccgtagccttcatttccttcttgtgcagagcctcaaggtcagccagaggtgagacatcagggtc

SEQ ID NO: 731036 - DNA, 413 bp, Homo sapiens
ctctggcctcagtcttctcatctgtcaaatggtataataataggatgtactcctcagggttgctgggagggttacacacgttagtgcacactgcctggggctcggtgactgttctctaagtgtttgctgctatttttttttacttaaggaaacttaacatcgaataggttaagcagccggggcttgaatttagtcttctctgcaccaaagttgcgctgtggactcttgtgccgactgtgatctagagattcccaagccccagrggctttggggaaggcggagccaggagaggctgctcagctgtcagtagatggcgctgtggagccacaagggccgccctcgctgcaaaagcccgttgacgcaccaggctgtgcacagactggggtctccccgccctgggccaggccctgcac

SEQ ID NO: 731037 - DNA, 408 bp, Homo sapiens
cgctctgttgccaggctggagtgcagtggcacgatctccattcactgcaacctccacctctcgggttcaagtgattctcctacctcagcctcctgagtagctgagactacaggcgcacaccaccatgcccagctaatttttgtatttttagtagagacggggtttcaccatgttggccaggatgatctcgatctgttgaccktgtgatctgcccgcctcagcctcccaaagtcctgggattacaggcatgagccactgtgcccagccaggaagtagtttttaaggaaaaaaaaataacccactgttcaaatggtacaaataaaataactaacatatttataaactttcatgcagaccttttcataacccaaaaattgaaacaggaaaacctatttaaatatttgaata

SEQ ID NO: 731038 - DNA, 488 bp, Homo sapiens
tatttccaatgcagaaatctcttaactgccagtcaagtaaaaggataaaaatgaaatccaaaatgaaaatccaaaatgaaggaagaaaccaaaaggaaggcatgagatccggaaaaataaaattcaacaaaagttaaagaaattcccagaatgtcaactaaggaaagtcccaaggtgacagctatgcagcaggcctaaagaggaaacaacccaggctaaagcagtaaggacagctacagaagggatgtcgtttttttttgttgttgttgttgttgttktttttttttttttttttttgagccagagtcttgctctgtcgcccaggctggagtacagtgacgccatctcagcttactgtaacctccgcctcctgggttcaagcgatgcctcagcctcccaggtagctgagactataggtgcgtgccgccacacccggctaattttttgtatttttagtagagatggggtttcaccgtgttgcccaggct

SEQ ID NO: 731039 - DNA, 592 bp, Homo sapiens
aaaaaaagaataaaaaggaacaaacaaagccacccagaaatatggaactatatgaaaagaccaaatctatgtttcattgatgtacctaaaagtgatggggagaatggaaccaagttgaaaaacactcttcaggatattatgcagaaaaacttccccaacctagcaagacaggcctacattcaaatttaggaaatacagagaacaccacaaagatactcctgagaagagcaaccccaagacacataactgtcagattcaccaaggttgaaatgaaggaaaaaatgttaaggggagccagagagaaaggtcatgatacccacaaaaggaagccaatcagactaacagcrgatctctctggaaaaaccctacaagccagaagagagtggggggcaatattcaactttcttaaagaaaagaattttcaacacagaattgcatatccagccaaatcaagctttataagtgaaggagaaataaaatcctttacagacaagcaaatgctgagagattttgtcaccacctgggctgccttacaaaagctcctgaaggaagcactaaatatggaaaggaaaaaccggtaccagccactgca

SEQ ID NO: 731040 - DNA, 640 bp, Homo sapiens
atatgtccagaatgagcctgtcctctgactgcaccttctcagtcccttctggtcgttttgatcaatatttgaatgtcaacccagagttagtttaacagaccaccatactaacttcctcaagacttgctaactcctttaacattaaaatgttttttggtgacattaccatttttcagatcaccaagttaggaatcttgaattagctgagaccctcatctttctttttcatgaagaatcagccaagattcttttcagatatgttttctctctcccccsccggctctgtttttctgtttgtttgttttttgagacaggatctcactcccattgcccatgccagagtgcagtggtgcaatattggttcactgcagcctcgacttccaagcctcaggtgattctcccatctcagactcctgactagctgggactacaggcatgtgccaccacacctgtctaattattattattattattattattattattattattattattattattatttgtagcgaacaggcctctctatgttgctcaggctggtctctaactcccgggctcaagcaatctgcctgcctcagcctcccaaagtgctgggattacagggctgcgccactgcgtctggcctcttctatctttt

SEQ ID NO: 731041 - DNA, 640 bp, Homo sapiens
atatgtccagaatgagcctgtcctctgactgcaccttctcagtcccttctggtcgttttgatcaatatttgaatgtcaacccagagttagtttaacagaccaccatactaacttcctcaagacttgctaactcctttaacattaaaatgttttttggtgacattaccatttttcagatcaccaagttaggaatcttgaattagctgagaccctcatctttctttttcatgaagaatcagccaagattcttttcagatatgttttctctctcccccgccgkctctgtttttctgtttgtttgttttttgagacaggatctcactcccattgcccatgccagagtgcagtggtgcaatattggttcactgcagcctcgacttccaagcctcaggtgattctcccatctcagactcctgactagctgggactacaggcatgtgccaccacacctgtctaattattattattattattattattattattattattattattattattatttgtagcgaacaggcctctctatgttgctcaggctggtctctaactcccgggctcaagcaatctgcctgcctcagcctcccaaagtgctgggattacagggctgcgccactgcgtctggcctcttctatctttt

SEQ ID NO: 731042 - DNA, 623 bp, Homo sapiens
gccataatacagatttaagacaaaaaacgtctggaactaattttagaaagctcttcatatccctgcgaattagcttcctctctgatgagtagtcttggcgggagggttccattagaattaaacatgatttatcattaggtgactgttttagggtcgggggtcctgacaactgatttatggcaagtgaagttggaagacacagggtgagatgggacatgcgtggtgctgaggaaggggactttagtcctgcgtgctcctgcaagaataatggccagacaggctggaaagagtaaaatgcagttaaaccaaagggccacgtccagtccccaccccaggggarcagagctgtcggccagtcttagccagagcacactcactctggtctgacccattctggcctctcagtgtgtggggatgtgaagctcccgtcttggttgggggaatagaaatagaccccagctttagtctccccgggaccctggggctctggtgtggaaagggcaggtgagaacagcttcctcttgcttttctattcccaatggttctcaacctcggctgcaccctggagtcaccaaggagcttgtgaatatcccaaatgccaaatgcccaggccgatgacactg

SEQ ID NO: 731043 - DNA, 614 bp, Homo sapiens
ccttttaagctttatgatgcacctattgtttgctccagtgttatccactgcttcagcttctacaatctttaacaattgcctctaattgttttttgacaaattctctcccaccttttcattccccctattttctggccctatgtaaaaaagctttttatactgggtaagctccaagtcaggtcatataaaaatagccctgtgagcggggtcttccagggatctaccagatggtcaaatcatcacagttctctgggaaaaggctttgaaagagctccaaccctgttctgcctcctctggtggctgcaggctgctcattttcaccatgactgtgggctactggctttcaaggctactgtggaactggrgaggagggagatgagaatagagcaagttaaaatgtcacaaagcttgctgttcttactgaggttccaacatttttcttgaataaacatgctccagattgctgcaaacctctggttcatttccagagtcctagaaaagtgaattctgatcatttttgccagtttcctcattgattttatggaggagaaaaattgtaaaggtctttagtccaccactgtgattgacactacccctctctattttttaaatac

SEQ ID NO: 731044 - DNA, 688 bp, Homo sapiens
aacaaggcagatgaatacatgcatttatctctgcttcctcctgcaacccactaaaagtataaaggaattttttaaaaacagacaaataggaggggggcttcaagatggctgactagaggtgcgaagcacttgcctcctccacacagaaggaccaaaacagcragtagataaccacacgttgaatgtagcaaatgagagaacactggaattcagcatagaacttctgaggcatggaaggagaaggaagcgaagcagctggcctggccaggatcagctcagagccaggaaaaagtccccagtgtggagaaagggtgagcaagagatcccctgtgttccacattccccgcacaggctcctgcaatcctacccacaggagagccctcaggccttgcaggccctgagactaatacaggggacttctgggggtacatgtgacagcattgttcccaagagggagtttgcactgggtcccaccgatcccctgatacccaagcagctgcagcacagcaccattttgagagcccagtccccaccagtctacatcttgccctggagccctacagatcctgtatctccaaatccctggggccctgctgacatcccctcatgtccactcagacagctgcagtgttccaatgccagctggacccagcagtgcggccaggtccctagcattctagcccatgca

SEQ ID NO: 731045 - DNA, 573 bp, Homo sapiens
tatggggagtgggacaagaaaggcttcctggggagaggatggtaatcctgaggcctagaggacggctagatgttggcaggaaaaggggagaggggtgttctgtgcaaaagggacagtatgtttaagaatgggcatggggccgggcgcagtggctcacacctgtaatcccagcactttgggaggccgaggcagttggatcacgaggtcaggaggtcgagaccatcctggctaacacggtgaaaccccgtctctactaaagatacaaaaaaattagcgggcatggtggcgggtgcctgtagtcccagttactcgggaggctgaggcaggagaatggcgtgaacccgggaggcagagcttgcagtgagcccagatcgcgccactacaktccagcctgggtgacagagcgagactccgtctcaaaaaaaaaaaagagtgggcgtggcgaagcctgatcagagagggggcagtggtgagatgaggcccaagggggtcagcttatgtggggctgtgcacaccctgaaagtcagaagcttagaccttattctaagggtagcaggaggccgttataaccaa

SEQ ID NO: 731046 - DNA, 573 bp, Homo sapiens
aaccagattccaggaatagagagccagttaattttacttttgattaatgttcaaggcctagactgacttgaggatgatatagaatcctggagctttagagtttaggtaaacttgaagctggccttggctctcagctgggaagtgggcctggagcaggaatgaacctgccacatgtcatctgactcgcaagacacycgaggacaggacaggcgccactcctctctggttggtcctgctgagtgaagagaagactggctggatcaacctttgagctgccaaagctgtgtaagttcgtgaaacaggtgcccattctctttattttgcaatagggagagaaatacagggaggacatcaatttgcccaaggtcaggctgaatgaaacccaagtgtcctgatcaggaagccagtgtttcttctagtagccaggggcagtgtgatttggcgaaaagatcagagccttgaagagacataatcctagattcacttactggggatgtgacctcagacaaattacttgccctgtgtgcctctcagattctccattggtgagacactcgtgctaatggtacccac

SEQ ID NO: 731047 - DNA, 573 bp, Homo sapiens
aaccagattccaggaatagagagccagttaattttacttttgattaatgttcaaggcctagactgacttgaggatgatatagaatcctggagctttagagtttaggtaaacttgaagctggccttggctctcagctgggaagtgggcctggagcaggaatgaacctgccacatgtcatctgactcgcaagacactcgaggacaggacaggcgccactcctctctggttggtcctgctgagtgaagagaagactggctggatcaacctttgagctgccaaagctgtgtaagttcrtgaaacaggtgcccattctctttattttgcaatagggagagaaatacagggaggacatcaatttgcccaaggtcaggctgaatgaaacccaagtgtcctgatcaggaagccagtgtttcttctagtagccaggggcagtgtgatttggcgaaaagatcagagccttgaagagacataatcctagattcacttactggggatgtgacctcagacaaattacttgccctgtgtgcctctcagattctccattggtgagacactcgtgctaatggtacccac

SEQ ID NO: 731048 - DNA, 573 bp, Homo sapiens
aaccagattccaggaatagagagccagttaattttacttttgattaatgttcaaggcctagactgacttgaggatgatatagaatcctggagctttagagtttaggtaaacttgaagctggccttggctctcagctgggaagtgggcctggagcaggaatgaacctgccacatgtcatctgactcgcaagacactcgaggacaggacaggcgccactcctctctggttggtcctgctgagtgaagagaagactggctggatcaacctttgagctgccaaagctgtgtaagttcgtgaaacaggtgcccattctctttattttrcaatagggagagaaatacagggaggacatcaatttgcccaaggtcaggctgaatgaaacccaagtgtcctgatcaggaagccagtgtttcttctagtagccaggggcagtgtgatttggcgaaaagatcagagccttgaagagacataatcctagattcacttactggggatgtgacctcagacaaattacttgccctgtgtgcctctcagattctccattggtgagacactcgtgctaatggtacccac

SEQ ID NO: 731049 - DNA, 589 bp, Homo sapiens
taaaggcatgggttggctgggcacggtggctcactcctgtaatcccatcactttgggaggcagaggtgggtggatcacttgaggtcaggagtttgagaccagcctggacaacatggtgaaaccccatctctactgaaaaaaaaaaaaaaactagtcgggcatggtggtgggtgcctgtagtcccagctactctggaggctgaggcaggagaatcacttaaactcaggaggtggaggttgcagtgagccragatcgcaccattgcactccagcctgggcaacaagagcgaaactccgtctcctaaaataaaataaaataaaataaaataaaataaaggcagggtaaatttcaggaaagcagaagctacaggcaaaattgtggagcttacacattggttttggtataaaagagtggaatatcttgaagtgagggcttacaggttataggcagattcaaagactttctgatttgtgattgattcagaaagcaagttatgtctaaaaatttgggatcagcagaaaaaaaacgttagctctggctcgtggacgtgaccttcttcaggcccctcaggaagaaatttagaaaaaag

SEQ ID NO: 731050 - DNA, 589 bp, Homo sapiens
taaaggcatgggttggctgggcacggtggctcactcctgtaatcccatcactttgggaggcagaggtgggtggatcacttgaggtcaggagtttgagaccagcctggacaacatggtgaaaccccatctctactgaaaaaaaaaaaaaaactagtcgggcatggtggtgggtgcctgtagtcccagctactctggaggctgaggcaggagaatcacttaaactcaggaggtggaggttgcagtgagccgagatcgcaccattgcactccagcctgggcaacaagagygaaactccgtctcctaaaataaaataaaataaaataaaataaaataaaggcagggtaaatttcaggaaagcagaagctacaggcaaaattgtggagcttacacattggttttggtataaaagagtggaatatcttgaagtgagggcttacaggttataggcagattcaaagactttctgatttgtgattgattcagaaagcaagttatgtctaaaaatttgggatcagcagaaaaaaaacgttagctctggctcgtggacgtgaccttcttcaggcccctcaggaagaaatttagaaaaaag

SEQ ID NO: 731051 - DNA, 589 bp, Homo sapiens
taaaggcatgggttggctgggcacggtggctcactcctgtaatcccatcactttgggaggcagaggtgggtggatcacttgaggtcaggagtttgagaccagcctggacaacatggtgaaaccccatctctactgaaaaaaaaaaaaaaactagtcgggcatggtggtgggtgcctgtagtcccagctactctggaggctgaggcaggagaatcacttaaactcaggaggtggaggttgcagtgagccgagatcgcaccattgcactccagcctgggcaacaagagcgaaactccgtctcctaaaataaaataaaataaaataaaataaaataaaggcrgggtaaatttcaggaaagcagaagctacaggcaaaattgtggagcttacacattggttttggtataaaagagtggaatatcttgaagtgagggcttacaggttataggcagattcaaagactttctgatttgtgattgattcagaaagcaagttatgtctaaaaatttgggatcagcagaaaaaaaacgttagctctggctcgtggacgtgaccttcttcaggcccctcaggaagaaatttagaaaaaag

SEQ ID NO: 731052 - DNA, 589 bp, Homo sapiens
taaaggcatgggttggctgggcacggtggctcactcctgtaatcccatcactttgggaggcagaggtgggtggatcacttgaggtcaggagtttgagaccagcctggacaacatggtgaaaccccatctctactgaaaaaaaaaaaaaaactagtcgggcatggtggtgggtgcctgtagtcccagctactctggaggctgaggcaggagaatcacttaaactcaggaggtggaggttgcagtgagccgagatcgcaccattgcactccagcctgggcaacaagagcgaaactccgtctcctaaaataaaataaaataaaataaaataaaataaaggcagggtaaatttcaggaaagcagaagctacagrcaaaattgtggagcttacacattggttttggtataaaagagtggaatatcttgaagtgagggcttacaggttataggcagattcaaagactttctgatttgtgattgattcagaaagcaagttatgtctaaaaatttgggatcagcagaaaaaaaacgttagctctggctcgtggacgtgaccttcttcaggcccctcaggaagaaatttagaaaaaag

SEQ ID NO: 731053 - DNA, 552 bp, Homo sapiens
ccttcccatcactattttctaccctctccctcactccatttttatggcgtgaaatacaaacaaaggcagaacactagttaaaatggtaagcccattttaatctgtgataacttttgcactagggaagaggatcctacatgaactgaactctaatttgtccagaggtgactgggyattttacagggagatgaaggaatagggagtgggcaagtggagaagcaaggagtggaaaaattacaaagggtttgtgagtgtaagtgctgataaggccagctgaatgtactagctggcaatatcaaagttaaactctatcttcccatacagactgggaggcagtggccatctccttcctgatgattacatttttaaaggaatggcttttctatccttgtgaaaaccactcctagttgtaggagatacatatacatcccaaagggacagaggaaggattcacaattgtaagaactttttagtaaatactgtaagtacggtcaggggcctatggtcaggtgttggctggaaaaaacagtaagttcacttgatagcattgag

SEQ ID NO: 731054 - DNA, 541 bp, Homo sapiens
gcacgaaagcctccaggatatcaatcgtaaaaacacagatatttaaaatatagccatactgtcaaaaaactcctttagtaaaataggcagtgacctaaatcccctggaaatacccagaagtttgctggttatcttgtgtcaaaaaacttaagaagggctgtaaattaataataaattatacattattttttaagttcaaaatataatggcctattcttggatgacagatawccctcaagagcctatggcatccataaatattttcagaaaaaataaacgtacttaatttgttacctcaaggtaaagatgacatttaaacgatgaatgagaaactaatgctttccaataaaaaagaatacttgtactactagagagtcattttgaaatggatgtttggaaatgtttctatgattaatgatttgtggctgaaaatgctataatttaatttataaaaactcatatgttcacacttgaaaaacttggaaacagattttctaggcttttaaacgccttccatatgaagagtttcagcaggttttgg

SEQ ID NO: 731055 - DNA, 638 bp, Homo sapiens
ttgagcaaacatcatagagtgtacctacacgaacctagatgcctactacccacctaggatacaaatctgtacagcatattactgtactgaatactgtagcaactgtaacacagtgttaaatattgatgtatctaaacatgtaaacatagaaatgttacagtaaaaatatggtattataatcttatgggaccactgttgtctttgtggcctatcactgattgaaatgttatgtggcgcataattataattttaaaaaatcaytcagacctaatgtatgcatttaatgactccactctaaggaaagcccagatgcacttaaatatacttctgtttatactgctttcattggaaatgaaatgccatgtcaactatgatgctttcagttgtaagtagcaaaactgccaactcaaactagcttaaaaaataaagtgaatttattggttcatgtaactggaaagtctcatgaaaatgtcagcttcaggagaagcttgacccagcagcttcatgatgtatggaaatacctgggttttttgtttctgctctgctactgtggtatcagctttattccaagtctggcttcctttgttgttgcaaaatgcttgtcagaagaagcctgggtccatctgttaggattaagt

SEQ ID NO: 731056 - DNA, 618 bp, Homo sapiens
catgctcccccctgcacggcatggtcagctgtgtttgaagccaccttcaactagatcacgagagctggttttgtgtattgcctcccaactcccgtgcaggggtgtcgtattggtggcttgaaattggccatgctgggagtatttacaccatggaaattgacagacactacagagagctggttgttaaacacttaccagcacaccattggtggccatcccaaatgtgtggttgtgttacaagaaaggggtcccaatagagaccccaagagagggttcttggatctcacacaagaaagaattgagggcaagtccacagtgcaaagcaaaagcaagtttatgaagaaagtacaggaataaaagaagggctactccayagacagagcagccctgaggggtgctggttgcccatttttatggttatttcttgatgatatgctaaacaaggggtggattattcatgcctcccctttttagaccatatagggtaacttcctggtgttgccatggcatttgtaaactgtcatggtgctggtgggagtgtagcggtgaggacgaccagaggtcactctcatcgccatcttggttttggtgggttttggccggtttctttactgcaaa

SEQ ID NO: 731057 - DNA, 618 bp, Homo sapiens
gcacccggctcagtgacatgagtgagcgactgaccacactggaggccaaggtcagtcgggctggggagtctgggcctggggagctgcctggggaccttgggtggtggagggaggcatcaggcaaccactgggtgtggccgtggaattcccagccccgggtttccaagcaggcttggacagccggtcccaggtactgggtactgttcaggccttggtggctctgggtggccttcttgggctgggaggtcccgggcagcaggctggttttgggcaggtcagaatggtgctgagctcccaggacccgggggctgggaggctggacacccagaagacagtggaaagaggagggagtctctgtccctccagggccactgttsccacctccagaatggggctgggcacagaggaaccgatgggaaaagactccgtggaggaggaactgctgggaagtgaccagcttttggcccagtctataagaacaggactccctaagtggagtcaacccagaggcagaaggaatccacaaaggacaagtaatttacctggcagtgaccccaggcagcactgggcagggagagaggccaagaagggtatgcccagtacaggtgtgttcatggg

SEQ ID NO: 731058 - DNA, 664 bp, Homo sapiens
accctaggagatgaccacccagaacctgccgaaatacttctggtgatggggaaccctcttcttgcagagaggtctgtttcattgctaaaaacttctggtccttagaagtttcttccctttgttgagccatacagagcattctcagactttcttttcttttcttttttttttttttgaggcagggtatcactctgtcgcacaggctggaatgcagtggcacaatctcggctcactgcagcyttcgtctcccagggtcaagtgattctcccacctcagccttctgagtagctgggactacaggcatgggtcagcatgcccggctagtttttgtgtttttagtggaaacagggtttcaccatgctggccaggctggtgtcaaactcctggcctcaagtgatcctcctgccttggcctcccaaagtgctgtgattacaggtgtaagccatcgcgcctggcctatatatgtattttaaacctcaataggttctagaaaataattcaataccccttcctaaataagctatcttaatttctgatatgaagttccttctgcctctcacttttacaacagtgaaactgtatttaaaatatcttgtccaaagtagcaatttttgttacattactgtgtttgggttcttcttaattttgcctgtgttattgaaag

SEQ ID NO: 731059 - DNA, 584 bp, Homo sapiens
aaattactgtctcatctttcctcctttgaggctccatttcctgcctgcaggttgtgatatctccttttagaaataaagcatttctggccaggcatggtggctcacacctgtaatcccagcactttaggaggccgagtcgggtggatcacctgaggtcaggagttcgagaccagcctggccaacatggtgaaaccccatctctactaaaaatacaaaaaaattatatgggagtggtggcaggcgcctgtaatcccagctaattgggaggctgaggcaggagaatcgcttgaacccgagaggcaggggttgcagtgagctgagatctcgccattgcactccagcctgggcaacaagagcgaaactctcaaaaaamaaaaaaaaaaacaaaaacaaaaacaaaaaaaaaacacaaaaaaacagcaagcaagcatttctttctaaatatatagatttttgtgacttttttgattggcaaacctttagagaccatgggaaggccggcgtcagagccagaggagtaaagttgctgacagcccagaggaggcagcagacagaacacatgtggccttgtaggctacattaag

SEQ ID NO: 731060 - DNA, 439 bp, Homo sapiens
aaagaccgtgatctctgttaggggagaaaccaatgaggcaaagtgtttccagctgctgcgggaggagggcagccgagcagagcccagtggtctccctgagtgcaggagacagagctgaaagtgtgagcaggcctggccaggtgcagtggttcacgcctgtaatcctagcaccttgggaggccgaggtgggtggatcatttgaggtcaggagttcgagaccagcctggccaacgtggtgaaaccctgtctctactaaaaatacaaaamatttagctgggcgtggtggtgcatgcttgtaatcccagctactcaggcggctgaagcacgagaatcacttgaacctgggaggcggaggttgcagtgagccgagatcgcgcccctgcactccagcctgggccacaaagtgagactccatctcaaaaaaaaaaaaaaaaaaaag

SEQ ID NO: 731061 - DNA, 640 bp, Homo sapiens
agcagctagtcttggaagattatatactgtatggctccacttatataacatcccaatttattaagttaagtgacattctttaaaagaaaaaactacaggaatggatggcagatcagtggttgccagagattataggtaggcaaagaggtgactataaaggggtagcatgagggagttttagggggttacaaaactcttctgaatctttattataatgaaagtcacaaaaatccatacatgtatttaaattcctggrattgtatatgtgtatgatcatttagaacggtatgggccaggtgtggtggctcacatctgtaatccccagcattctgggaggccaaggaagaacgatcccttgagtctaggagttcaagaccagcctgggcaatatagcaagaccccattgtaataaaaataaataaaactgtaggatctttttttttgtttttttgtttgtttgttttttgagatggagttttgctcttgttgcccaggctggagtgcagtggcgtgatctcagctcactgcaacctctgcctcctgggttcaagtgattctcctgcctcagcctcctgagtagctgggattacagacacgcgccaccatgcccagctaatttctgtattttagtagaggtggg

SEQ ID NO: 731062 - DNA, 600 bp, Homo sapiens
acaattttatagctttttttttttttttctttttttttaagacaggatcttgcaggctagagtgcagcagcaagatcatggctaactacagcagtctcaagcaatcctcccaactcagcctcccaagtagatgggaccacaggcacatgccattaaacccaactgattctttttttctttcttcttctttttttttttttttttttttttttttgtagagatggagtgtcactatgttacccaggctggtctcgaactcctggcctcaaatgatcctcccaccttggcctctcaaagtgctgggattacaggtgtgaaacactgctcacagctgagaattttatagctttaaacttaaacctattttagaaaataagaaagatctcaatcgtcttcactttaagaaactaaacagtaaagtaamcccaagcaagccaaaagaaagaagttaaagtttagagcaaaacccaatgaaactgaaaacagaaaaacagtaaaagtcaataaaaccaaaagctggttctttgaaaaagtaaataaaatagacaaagctttatttagattgaccaagaaaaaaagaaaattatcccccccaaaatt

SEQ ID NO: 731063 - DNA, 472 bp, Homo sapiens
acatgagtaagttgggctgtgccaacatttaggaacaccagggcagccatcctggtacagcaaaacagcagtcgcattagaaatatgcttcactttttttaaaagggggtgaaagagaactttgggtcgaattctggagttcctaacattttaacaccaggttgttttctgttatttttctttttatgaaaagattttactgtagaacttaaattwcattttggttaatgtctgatggaaaccaacaaatttatttgactcatagtttattttcctggcttatgggcatagagttgactgtgggccacacagtcaacaagcttcctcactgtcatgggcttttccttggctttgctcttgagtgtggtctccttaccatgcagacaaatggctgggtaactctccagggccactctggttttccacccagactccgtttgtagtggccatcagtcagcaaacactgccaacc

SEQ ID NO: 731064 - DNA, 472 bp, Homo sapiens
acatgagtaagttgggctgtgccaacatttaggaacaccagggcagccatcctggtacagcaaaacagcagtcgcattagaaatatgcttcactttttttaaaagggggtgaaagagaactttgggtcgaattctggagttcctaacattttaacaccaggttgttttctgttatttttctttttatgaaaagattttactgtagaacttaaatttcattttggttaatgtctgatgraaaccaacaaatttatttgactcatagtttattttcctggcttatgggcatagagttgactgtgggccacacagtcaacaagcttcctcactgtcatgggcttttccttggctttgctcttgagtgtggtctccttaccatgcagacaaatggctgggtaactctccagggccactctggttttccacccagactccgtttgtagtggccatcagtcagcaaacactgccaacc

SEQ ID NO: 731065 - DNA, 660 bp, Homo sapiens
ctgcagggatcctgctataagtaagactcagtccctgattttaggtatcctgtgataagcagaattaagacaaatacacaagagacaaagcacaaaaaataaatatcataaggggatgaacaaaatggtggagaaagagtagacaaagtttttsatcacctgccttcaaagaaaggctgtgaattttgttcacttagacagcttggagacaagaaattacccaaaagtaaggtgaggaggataggcaaaaagagtagaaagatgtgaatggacattgttgagaaatgtgataggaaaacaatcatagataaaggatttccaagcaacagagcatatccagatgaggtaggatgggataaactcttattgaaccaatcttcaccaattttgtttttcttttgcagagcaagctaggaattgtttcccttctactgggcacaatacacgcattgatttttgcctggaataagtggatagatataaaacaatttgtatggtatacacctccaacttttatgatagctgttttccttccaattgttgtcctgatatttaaaagcatactattcctgccatgcttgaggaagaagatactgaagattagacatggttgggaagacgtcaccaaaattaacaaaactgagatatgttcccagttgt

SEQ ID NO: 731066 - DNA, 636 bp, Homo sapiens
tccaaatggttcagtaatggaataatccaataagagacatcttaaaagtctaatgcatcagggacaatagtcctaaacaaacctattcactcttgatctttaacagaagacaggcaggtaacctgggaaaaatctcacatttgtaaagttgaagcactgaatgtatttaataatattagcaactttccatgggctactattttaggatacaataaagcaattttcactaaattgcaaaaatatattactattttattttattttatttttgagacagggtctcactctgaagcccaggccgsagtgcagtggcatgatcaccaaaaatatattactttagctgtggtgcctgtgttggttcttggccttcatgtaaaaagctaattgtaccctgtgaatccaataaaaatgaatgtaatttgtaatttgaagaaccttcatttctacaataataaatttctaactggagccctgctaagctcctgtatttattcaacttctggtcctcaccatatatccaacacccccaatctcagctcaaagttcactctaaactctgacatccttcagcaaaaggaatgaggcaatacggaatcatctgtctgtgtaagatgacactctttgtgtgccctagta

SEQ ID NO: 731067 - DNA, 646 bp, Homo sapiens
ctgtgaaggctctgtgacctcatgagcccagagttgtcactctttttttttttgcattcattattgaactattgtacctagctgtgaggcacacacagctttgaaatattaattatttctttggctatatctataagttccccagcttgtaattacttgagaacaaataaaaggccaaaatccatagtctttccagtgccttctayatagtaggtattcaaccaacatttgagtgactattacttgtagattatcagatactgaaagtcttgtgactttttttcaattatgttagtacattttaaaatgttttttctgcaagtcatgcaagccaaatatatgtggatgtaaataattctgaatgcaccttacagagttccccaattttttaaaggtctatttcttctggtagcctcttaatacaggaaactgaaatatgaagaaataaagtgtggtacccaacatgatgcaagtattggcaaaagcagaaactagttactgttaggttctcctattcagtgattctcaactttggctacacactaaaatcatctgggtaaattcttaaaaataccaatgccaggccaattatcctcatctctagggtagggccaaggcgctggtaacttttttaaattccccaggc

SEQ ID NO: 731068 - DNA, 646 bp, Homo sapiens
ctgtgaaggctctgtgacctcatgagcccagagttgtcactctttttttttttgcattcattattgaactattgtacctagctgtgaggcacacacagctttgaaatattaattatttctttggctatatctataagttccccagcttgtaattacttgagaacaaataaaaggccaaaatccatagtctttccagtgccttctatatagtaggtattcaaccaacatttgagtgactattacttgtagattatcagatactgaaagtcttgtgactttttttcaattatgttagtacattttaaaatgttttttctgcaagtcatgcaagccaaatatatgtggatgtaaataattctgaatgcaccttacagagttccccaattttttaaaggtctatttcttctggtagcctcttaatacaggaaactgaaatatgaagaaataaagtgtggtacccaacatgatgcaagtaytggcaaaagcagaaactagttactgttaggttctcctattcagtgattctcaactttggctacacactaaaatcatctgggtaaattcttaaaaataccaatgccaggccaattatcctcatctctagggtagggccaaggcgctggtaacttttttaaattccccaggc

SEQ ID NO: 731069 - DNA, 634 bp, Homo sapiens
cagccaaacaagactgtaggtacaaattgaggtcatactaatattattaccaaacttcgctagtttgccttacataactggatgacctcatcacatcatcccccttccaagtatcatgtcatgctcttttttttttttttttttttttttgagatggagtctcactcttttgcccaggatggaatgaagtggcaccatctcagctcactgcaaattctgcctcccaggttcaagtgattctcctgcctcagcctcccaagtagttgggattacaggcgcctaccgccatgcctggctaatttttgtatttttagtagagacggggttttgccatgttggccaggctggtcttgaactcctgacctcaggtgatccgcccgcctcggcctcccaaagtgcatgtcatgctctactatctgtagttctgaagtcatgtgatgaaaccatgtcatcattgctgtgatgctgtacctcctaaaagagtgactagagtgactkcctggccaagattttgtctagtgctctaaaagctccaaactatttggtgacttgactatgcattatctttttagttttctatactggtaatacagtccagacttctaatattggttgctagagacagctataaaca

SEQ ID NO: 731070 - DNA, 510 bp, Homo sapiens
atcagaaggcaaatgttaaagtaggaaactaaggagtggtttatggtgtgactgaattagagaagttttaggagaaatgagttaaagtgattttgaaactgaatgcatttgttcattttcttggaggatttgaggtttatagcatagacttgatttatttacaaagattaaacatataaataattatctttctcttctacctgcctccttatctttataatcactgtatgtttggtagaatttgccttaagaatatgttttagaaagttgacttttgttctactagcatattggaatatattcatttataaccttgtaacttaatgcatrtcaaatgttttaggaattctttcagatccttttaaaatgatagactattttacccaagagaaaatcttcaggattttagtactctcctgggtaaacagacctgattatatatgatttcaataacttgctaaaacttctaacgagtactggaattgaatgtgtttttgttaaacttggaga

SEQ ID NO: 731071 - DNA, 576 bp, Homo sapiens
gattaaaatgtaatagatgtgtttttaacttattgaacaaataatatattcacattgttaaaaaaattcaaggtctctttgattattgccattttagccagtggaacgagacaaagaacagatggctagagctaaagattccctcttaaattagcaaagcagaagttgcacacattacttctgttttgtactgcagtggcaagagcttagtcccatatcaacgaytactgcagagacttagggacatgtttttcctgggtgggcagccatagctagacacaattctattactatgaaagtaaagaagaccgacactgatggacatgtagtagtcttcaaccatcagagaatggtaattcctcagagtatctggagcctccatgactctcgctatgactctaaagtccacactccttatattacattaaagagcctggcttcatatccaaaagtgatgacaaaacaactgttttgttctgttatcttttatatgtgtgtgtgtgtgtgtgtgtgtgtgtgtgtgtatatatattctccattgcccttcactaacagaatttaaagaaaaaattgttt

SEQ ID NO: 731072 - DNA, 567 bp, Homo sapiens
tgctcattgcctttatagagcctaatggcaggatccaaaaccatcatttgaaagagaaatttcagattttaaaaaaagtagtcaacatgaatccaagaaaagctgtttaatctgatagctagggactgcatcatggagatggcaagaatgtgagatctgttgccacatgactagacagcaaataagtcctactcagaaacaaatcttcagtagggaatagaaaagaaactcctgcttgtctgccttaaattgggaatcactaatgggcaaatcaaatccacaagtagtagtattacttttaagtctctccttttgttaacagcaagaccttcygttatatcttagctaagagaatttaatggctttaaggcaaatattatacacctataggtatgtgattttaaagcccctttaaaaaaaaatacctcacagagcatttgataaacaaatggcaatgggtttgtaacagtgcatttcatatatctttgtgcatctaggtgcattttataagccattctttctatatttttatgcatgtttaattatatgcctacttgttataatttc

SEQ ID NO: 731073 - DNA, 663 bp, Homo sapiens
attggttaaacatttgaaaaatgtttctgttcaataaatacaatacaggcacacctcattttatggcacttcactttattgcactttgcaggtgttttttttacaaattgaaggtgtgaggcaaccctgcattgagcaagtctgtcagtgctatttttccaacagcatgtgctcayttcctgtctctgtgtcacattttggtaattcccacaatatgtcaaactttgtcatattattacatctgttttggtgatttctaatctgtgatctttgatgttactactaatcttttggggaatgccacaaactgcactcacagaagacggcaatcaatcaacaaatgtcaaacaatcaacaaatgtcgtttgagttctgactgctccacccaccagccattccccatctgcctccctctctttgggctctctagtctctgagaccacaacactgaaattagaatggcctctaagttcaagcgaaacttgaaagtgaaaggaagagtcacaggtgtctcattttaaatcaaaagctagaaatgattaagcttagtgaggaagacatttgaaagttgagaggctgaaagctaggattgtaccagttagccaagttgtgaatgcaaaggaaaagtttttgaagaaaattaaaagtactactgcagtgaac

SEQ ID NO: 731074 - DNA, 610 bp, Homo sapiens
gctaatcacaatgatttggggtaggactccaacacaatcttgggaaaaaaaacatttaatgtaaatgtttagccattagaacatacaaataaataaataagctcagaatagctgagaaaaaaaccacaaataagtgaattgtcaatttctcttcagtctcagatatgctatttccaaaatactaataaaatatacaaattaactaataagatatagaacattcaacataaaacaacctaaaataaaaaagaccaaccctaattattttatttctgtatatcaagactacaaatagcatttaaacgcttaatttattattcaaattaagaaattatacattttgttttgataatgttcattgtcttaaaagtgtcattcagctttcccactttaaaagtatattgctaattatggtcaattaactatgacagcccacagagcctccagtgacagtaaaatackagacatagaagagataaatgaggatttagatcccctccccccagcatcagcaaagggtcactctgctcccacagctgacgctttgaaacgctttctgtttgtagagactaaaatcacccagcaacaggtcaggtcctgataaagtgcc

SEQ ID NO: 731075 - DNA, 652 bp, Homo sapiens
tggagagtttagtccatttatgttcaatgttattattgataagtaagcacctactcctgccattttgttatttgttttctggttgttttgtggtcttctctttcttatttccttccttcctttcttccttttagtgaaggtgattttttgatggtatgatttaaattcttgctttttattttgtgtgtattgtatattttttgatttagggttatcatgaggcttgcaaatactatcttgtaacccgttattttaaactaataacaacttaatactgtttgcataaaataacaaataagcaaaaagaaaactaataaataaataatttcagatggaaatattccccttagcatttcttctaggacatgtctggagctaatgaagtccctcagctatttgttttgggaaagcttttatttctcctttttgtctgaaggatatttttgacaaatatactactccagsgtaaaagatttttttccttcagcacttgaaatatgtcatgctactcttacatgcttgtaaattttccactgaaaagtctgctgccaggtgtattgcagctccatggtatattttttgtttctttcctcttgctgcttttaggatcctttctttatcattgacctttgggagtttgattattaaatgc

SEQ ID NO: 731076 - DNA, 584 bp, Homo sapiens
tcgggagtttggccaacatggggaaaccccgtctccactaaaaatacaaaaattagccaggcgtggtggcatgcgcctgtaatcccagctactggggaggctgagagaggagaatctcctcaatccagggggcagaggttgcagtgagccgagatcgtgccattgcactccagcctgggcaacagagtgagactctgtctttaaaataaaataaaataaaataaaatagggctctctcctctctggcagtayccccactccccacaacatacacagtagggcagtttgccacttgcgttcttgcataaaggtccacagcctaaggggcagtggcaggagcagcggcaggaaatattcctggcaggggttctttgtctgaaattttccgcctagagatggtgtctttttttttttttttggaactcctcaaaggctggggtttgttcaacacacccaaggggccaccagtgctctgaagcaactgaaaatgaatgacgtggcccaagaaagaatgtgactgttggccacaaaatggggagtggtgttgagcaaagaaatttaaactctaatacccataatcccag

SEQ ID NO: 731077 - DNA, 542 bp, Homo sapiens
gaacagagggtcagagaatcagagaaaatactaaaactctgctactgctattgccatgattaataaatttttttccctgacccaggaatgtcccatcttctgccagcatctataaaactattgaagcctaacttgttagcttgcaagtagagtaaactatcaaactttttaaagtttttgacatggatctaaagtcaaagtaggacataaccaagccaaagcaggccaggggtaaggacttcataaagagcattgtaaaaaaaggccatcacatttattggcctggtttgttcagcatcacagaaatggamctgcagttgaggatatgaactggaaagaccaaaatttaacaggtaatcctagcctaatttgttgagtgctcactatgttctaggcactattcacatttcacattaattaacttatttaattttctacaaactttcacataggatatatttgtgattctcattttatacccgaagaaacaaaggcaaagaaaagataagttacttgtccacagtcacatatttagttagaag

SEQ ID NO: 731078 - DNA, 580 bp, Homo sapiens
cccggctaattttttgtatttttagtagagacggggtttcactgtgttagccagggtggtctcgatctcctgacctcatgatccgcctgcctcagcctcccaaagtgctgggattataggtgtgagccaccgcgtccgtcctagattttcttctaaattatcttttatgagtgttaaattcttgcattttactttcagtttcaaaatccattttgagttaatttttgtgaaaggtctaaggtctgtgtctagattcatattttagtatgtggatgttcatttgttccaggtaccttttgctgtaaaaattacctttactccattacattgcctttgctcttttgtcaaagatcagttgattatatttgtgtggatctatttctgggctctctattctgtcccaktgatctatttgtctattcttttgctaacaccacactttgagttttgtagctttgcagtaaatcttgaattcatgtagtttcagcttttgactttgttcttctcttacatatgtgtattggctattcttggtcttttgggtctccacataagctttagaatgtttgtcgatatccac

SEQ ID NO: 731079 - DNA, 564 bp, Homo sapiens
ttatcattatagtatgacttgctttatctctttttatagtttttgtcttgaaatttattttgtatgatataaggtagctactcctgctcctttttggtttcaatttgcatggaatatcatttttccatacctttattttcagtatatatgtgtatctttatagatgaagtgtgtttctggtagggaacagatcgttggttcttttttttttcttttaatccattcasccactctgtgtcttttgattggagagtttaatccatttataatcagtgttataattgataagtagagctgttcctgtcattttttaaattggtttttgggttgttttgtggttcttcactttcttttcttcctatcttttttttttttttagtgaaagtggtgttctactttgatacaatttagtttctttttattttttgtgtattcattgtaggctttttggtttgaggttatcatgaggcttgcaaatgttatcttataacccatgattttaagctaataacagctgaacactgtttgcataaacaaacaaaacaagcaaaaataaaactaatg

SEQ ID NO: 731080 - DNA, 637 bp, Homo sapiens
aatataaatcaatttcttcaaatagttattttatcctgaaatattcaaaattactcaaaattatctatcaccataagtggataactaaaaattatataaattatagttaagaaatatcgaaaaagcaacacttaaataaaattaaaattttcattctttatamaaatttaattaaatttttaaatattttaaatttttgtggaaaatgttcatccagctgtcctgtgaagaatttgtgtcatacttcatgcctgctatgtctagtaaagtatgtttttgtaaataaataaattttagaagaatatgaactttttaacattgcacaaagcttccagtcactgttggtaattgttcaaatgccatgctaaattatgactactttcacaactacaaattggatctgcaactgaagcaagaaaaggggcacttggcagtcctgggaaacaatactttgttatccaagactccactgcaagtatgcaaactgagaataaaggtgtggcaagttaatttgtcttatcctttaccaaagcccatcttgtgttcaaatatccctgagctctaaagcagtgttcctatcaaacactgacagtgccacagctcaagtcttttatggtactcactcatagtcaaatgc

SEQ ID NO: 731081 - DNA, 637 bp, Homo sapiens
aatataaatcaatttcttcaaatagttattttatcctgaaatattcaaaattactcaaaattatctatcaccataagtggataactaaaaattatataaattatagttaagaaatatcgaaaaagcaacacttaaataaaattaaaattttcattctttatacaaatttaattaaatttttaaatattttaaatttttgtggaaaatgttcayccagctgtcctgtgaagaatttgtgtcatacttcatgcctgctatgtctagtaaagtatgtttttgtaaataaataaattttagaagaatatgaactttttaacattgcacaaagcttccagtcactgttggtaattgttcaaatgccatgctaaattatgactactttcacaactacaaattggatctgcaactgaagcaagaaaaggggcacttggcagtcctgggaaacaatactttgttatccaagactccactgcaagtatgcaaactgagaataaaggtgtggcaagttaatttgtcttatcctttaccaaagcccatcttgtgttcaaatatccctgagctctaaagcagtgttcctatcaaacactgacagtgccacagctcaagtcttttatggtactcactcatagtcaaatgc

SEQ ID NO: 731082 - DNA, 637 bp, Homo sapiens
aatataaatcaatttcttcaaatagttattttatcctgaaatattcaaaattactcaaaattatctatcaccataagtggataactaaaaattatataaattatagttaagaaatatcgaaaaagcaacacttaaataaaattaaaattttcattctttatacaaatttaattaaatttttaaatattttaaatttttgtggaaaatgttcatccagctgtcctgtgaagaatttgtgtcatacttcatgcctgctatgtctagtaaartatgtttttgtaaataaataaattttagaagaatatgaactttttaacattgcacaaagcttccagtcactgttggtaattgttcaaatgccatgctaaattatgactactttcacaactacaaattggatctgcaactgaagcaagaaaaggggcacttggcagtcctgggaaacaatactttgttatccaagactccactgcaagtatgcaaactgagaataaaggtgtggcaagttaatttgtcttatcctttaccaaagcccatcttgtgttcaaatatccctgagctctaaagcagtgttcctatcaaacactgacagtgccacagctcaagtcttttatggtactcactcatagtcaaatgc

SEQ ID NO: 731083 - DNA, 637 bp, Homo sapiens
aatataaatcaatttcttcaaatagttattttatcctgaaatattcaaaattactcaaaattatctatcaccataagtggataactaaaaattatataaattatagttaagaaatatcgaaaaagcaacacttaaataaaattaaaattttcattctttatacaaatttaattaaatttttaaatattttaaatttttgtggaaaatgttcatccagctgtcctgtgaagaatttgtgtcatacttcatgcctgctatgtctagtaaagtatgtttttgtaaataaataaattttagaagaatatgaactttttaacattgcacaaagcttccagtcactgttggtaattgttcaaatgccatgctaaattatgactactttcacaactacaaattggatctgcaactgaagcaagaaaaggggcacttggcagtcctgggaaacaatactttgttatccaagactccactgcaagtatgcaaactgagaataaaggtgtggcaagttaatttgtcttatcctttaccaaagcccatcttgtgttcaaatatccctgagctctaaagcagtgttcctatyaaacactgacagtgccacagctcaagtcttttatggtactcactcatagtcaaatgc

SEQ ID NO: 731084 - DNA, 600 bp, Homo sapiens
taataaaatttaaaaaaaaataaagtgctggctagtggctcgagtatctaaacctccctggtgctttgcctgcaatcagagattgcatccatccatcatgctttgtgattcaaatagctggaatttctataagcttatttaactgagasttgatatttttatactcaattgtgctttgaagattagaaatctgttgaaacagttctaacatcattataaacattataaatattatttattcaacaaatgtttatttggtacctattgttccaagtgctagaaatgttacagtaaagaagacaaaaatcgctgcccttacagaatttaacttctggacaatgacacattttttaaaagttagattatctactggtttccttcattttcttcttacattatgagttaatgcataagtgaaactctagtttcgcctaaagtgttctgtggcacttgtcttcataattcactataaatcttttaaaatttgaagtcatttgatcttaagcctttatacttggcagtgagatagaccttaatacttccagtttcgtcagaaaaatataaggatatgccttgttctgattcagtctgttatctgtt

SEQ ID NO: 731085 - DNA, 600 bp, Homo sapiens
taataaaatttaaaaaaaaataaagtgctggctagtggctcgagtatctaaacctccctggtgctttgcctgcaatcagagattgcatccatccatcatgctttgtgattcaaatagctggaatttctataagcttatttaactgagagttgatatttttatactcaattgtgctttgaagattagaaatctgttgaaacagttctaacatcattataaacattataaatattatttattcaacaaatgtttatttggtacctattgttccaagtgctagaaatgttacagtaaagaaracaaaaatcgctgcccttacagaatttaacttctggacaatgacacattttttaaaagttagattatctactggtttccttcattttcttcttacattatgagttaatgcataagtgaaactctagtttcgcctaaagtgttctgtggcacttgtcttcataattcactataaatcttttaaaatttgaagtcatttgatcttaagcctttatacttggcagtgagatagaccttaatacttccagtttcgtcagaaaaatataaggatatgccttgttctgattcagtctgttatctgtt

SEQ ID NO: 731086 - DNA, 636 bp, Homo sapiens
acagaaggcttcaattgtaaaaaactaaatgtctaagtttatgaattattttctccttgtaaaatcatgcaaattaaaaataaataagatatcttttattctgagcatcttttcaatgttaaacctgctgaaagtgggaggaaatgggaagtcaagatgcatcacattttaaaaatccaactaacactgagcatagttgtctagaagtaaatgatactctaattctcaggttgtgtcatattggtgagtccctatktttttttaaactttcttgaaatcaagggagaaaatgactataccccctataccaagagtaagtggagaagaaacctaacttaaacacaacttaagtttaaatcccagctctgtgtctcagtggttaatttgcctatggccttgagtatgccactcgacctgttaagacctcaatttttttaatctacactatgagtggcaatctccgtcctgcctattttacaaggttactgtgaggctcaaatgagataataagtgcacaagtgctcttattaaagactctgatgtgctataagtatgtaaggtatattatcatcatataattttatcaaagtagactatcacatgtatacatgtatatggcttgctatttatatcaaa

SEQ ID NO: 731087 - DNA, 636 bp, Homo sapiens
acagaaggcttcaattgtaaaaaactaaatgtctaagtttatgaattattttctccttgtaaaatcatgcaaattaaaaataaataagatatcttttattctgagcatcttttcaatgttaaacctgctgaaagtgggaggaaatgggaagtcaagatgcatcacattttaaaaatccaactaacactgagcatagttgtctagaagtaaatgatactctaattctcaggttgtgtcatattggtgagtccctatttttttttaaactttcttgaaatcaagggagaaaatgactataccccctataccaagagtaagtggagaagaaacctaacttaaacacaactkaagtttaaatcccagctctgtgtctcagtggttaatttgcctatggccttgagtatgccactcgacctgttaagacctcaatttttttaatctacactatgagtggcaatctccgtcctgcctattttacaaggttactgtgaggctcaaatgagataataagtgcacaagtgctcttattaaagactctgatgtgctataagtatgtaaggtatattatcatcatataattttatcaaagtagactatcacatgtatacatgtatatggcttgctatttatatcaaa

SEQ ID NO: 731088 - DNA, 640 bp, Homo sapiens
tctgctatggtcacctcagtcctggcagatagttctacagatttctttaagctgactctcttgcccttgtagtctacatcccatcctcagggcaagactcatatcctctatcctgacaaactgagagtgaaggttgttccccacaggtgcacctctcacctcttggccattagaaccagccagccccagtacctgagttttaaggcatgggtcccaaagcagcccaccctgttccctacctacctccctcttccaagatgcacrgatcaagctctctgtgtggaacagcacctgcccttcacccccagatatctcataggggattaggagtgagactcacagaaaatgaatttctccgaagaaatcacttccagactcttctgttcttttatatctcagaaaggattgggttttcaggttgcaaaatcttttccagctctgcataggtaggtagcatctcactgaggaatggagtatttaccacctattgttctgttccagtctagtagagctttagcaaaaactacaggcaacaaattctatttttaacatcctgttacacaaacaaatatgctgagtatgcacacaaataaatggtgaaagaggcacaaagaagtgaaaacaatcgtgcatggtagga

SEQ ID NO: 731089 - DNA, 640 bp, Homo sapiens
tctgctatggtcacctcagtcctggcagatagttctacagatttctttaagctgactctcttgcccttgtagtctacatcccatcctcagggcaagactcatatcctctatcctgacaaactgagagtgaaggttgttccccacaggtgcacctctcacctcttggccattagaaccagccagccccagtacctgagttttaaggcatgggtcccaaagcagcccaccctgttccctacctacctccctcttccaagatgcacggatcaagctctctgtgtggaacagcacctgcccttcacccccagatatctcataggggattaggagtgagactcacagaaaatgaatttctccgaagaaatcacttccagactcttctgttcttttatatctcagaaaggattgggttttcagkttgcaaaatcttttccagctctgcataggtaggtagcatctcactgaggaatggagtatttaccacctattgttctgttccagtctagtagagctttagcaaaaactacaggcaacaaattctatttttaacatcctgttacacaaacaaatatgctgagtatgcacacaaataaatggtgaaagaggcacaaagaagtgaaaacaatcgtgcatggtagga

SEQ ID NO: 731090 - DNA, 496 bp, Homo sapiens
tatgccatctaggtttgtgtaagtacactgtgatgttcatacaacaacgaaattgcgtaatgacacatttctcagaatgtatccctactgttaatcaactcatgactggattgttctctattctgttccatgacatgatttctataaaataaaaactctttgagaaattagaatattattattaagctgtaaggaaccatttgaaaaataaattgctgatttttgctcacctgttttaaaattgtattawcactaaataccagctttaaatccaaaatttataggagagatatgaaaatacacaccttataatacatctcagcctctacctgaaattaaatgactgcattctgccctgacaatttaaatttgttattcagaatgaatgttttaatttttttaataagtgttttgttaacttttatcattaatcgttaaaagttttcacattatagtccttaaaaatccactttcataagctaaaagtgattttgtc

SEQ ID NO: 731091 - DNA, 568 bp, Homo sapiens
aaaatgttttatttttttcttgagacaaggtctcactgtgtcacccagactggagtgcagtggtgccaacatggctcactgcagcctggatctcctgggctcaggcagtcctcccacctcagcctcccgagtagctgagactataggygcacattgtcatgctcggctacttttagtatttttattttcttggagagattggggtcttgctgtgttgcccgagctgggttcgaactcctggtctcaagcagtcttcccccttcagactcccaaaatgttgtaaaaattgtggagacttccccaacttatggccaagatggattaaccctcttgccttaaatacctagaaaaccgtacaacacatacgcaaaggcagtttttagacaccggtcaataggtggcactaaagaccatgatctccgttaggggagaaaccaatgaggcaaagtgtttccagctgccgcgggaggagggcagccgggcagagcccagtgttctccctgagtgcaggagacagagctgaaagtgtgagcaggcctggccaggtgcggtggttcacgcctataat

SEQ ID NO: 731092 - DNA, 568 bp, Homo sapiens
aaaatgttttatttttttcttgagacaaggtctcactgtgtcacccagactggagtgcagtggtgccaacatggctcactgcagcctggatctcctgggctcaggcagtcctcccacctcagcctcccgagtagctgagactataggcgcacattgtcatgctcggctacttttagtatttttattttcttgkagagattggggtcttgctgtgttgcccgagctgggttcgaactcctggtctcaagcagtcttcccccttcagactcccaaaatgttgtaaaaattgtggagacttccccaacttatggccaagatggattaaccctcttgccttaaatacctagaaaaccgtacaacacatacgcaaaggcagtttttagacaccggtcaataggtggcactaaagaccatgatctccgttaggggagaaaccaatgaggcaaagtgtttccagctgccgcgggaggagggcagccgggcagagcccagtgttctccctgagtgcaggagacagagctgaaagtgtgagcaggcctggccaggtgcggtggttcacgcctataat

SEQ ID NO: 731093 - DNA, 568 bp, Homo sapiens
aaaatgttttatttttttcttgagacaaggtctcactgtgtcacccagactggagtgcagtggtgccaacatggctcactgcagcctggatctcctgggctcaggcagtcctcccacctcagcctcccgagtagctgagactataggcgcacattgtcatgctcggctacttttagtatttttattttcttggagagattggggtcttgctgtgttgcccgagctgggttcgaactcctggtctcaagcagtcttcccccttcagactcccaaaatgttgtaaaaattgtggagacttccccaacttatggccaagatggattaaccctcttgccttaaatacctagaaaaccgtacaacacatacgcaaaggcagtttttagacaccggtcaataggtggcactaaagaccatgatctcygttaggggagaaaccaatgaggcaaagtgtttccagctgccgcgggaggagggcagccgggcagagcccagtgttctccctgagtgcaggagacagagctgaaagtgtgagcaggcctggccaggtgcggtggttcacgcctataat

SEQ ID NO: 731094 - DNA, 473 bp, Homo sapiens
ctccccttcctgtctgaaattgaccagacaaaaagttaaatgttcacagatggtcacaggtaattccactgaattcatgcattatcagggagaaatgataggcttgacaagttctaattcaaagacctctattgcaaagctgaagatgtttgttaaataagattattcagagaaatggaaccctgtgaacttcctcgagatatagtcattgatacccagggwttttttttctttctttctttcctttttttttttttttgagttggagtctggctctctcgcccaggctagagtgcaatggcgtgatttcggctcactgcaacctccgcctcccaggttcaagtgattctcctgcctcagcctcccaagtagctgggactacaggcacgtgccacaacgctgagctaagttttgtatttttagtagagacagggtttcaccattttggccaggatggtttcgatctcatgatg

SEQ ID NO: 731095 - DNA, 647 bp, Homo sapiens
gcctgggatggagaggttcaagcaattctccttgcctcggcctcccaagtacctgggattacaggtgcctgccaccacgcccagctaatttttttgtatttttagtagagacaggtttcactatgttggccaggctggtctcgaactcctgaccttgtgatctgcccaccttggcctcccaaagtgctrggattacaggcgtgagccaccgcccccagtccacaagcatgtttttaagaggagtgagtcattgagtagaggaaaattggattttactttacttttaatttatgtattttattttatttatttatttatttatttatttatttatttatttatttattgggacagagttttgttcttttcgcccaggctggagtgcagtagtgcaatctcagctcactgcaacttccgcttcctggattcaaacaattctccggcctcaggctcccgagtagctgagattataggcacctgccaccatgcccggctaatttttatatttttagtagagacggagtttcaccatgttggccaggctggtctcgaactcctgacctcaggtgattgacccgccacagccttccaaagtgctgggattacaggcgtgagctactgctcctggccaaaaaattggattttag

SEQ ID NO: 731096 - DNA, 647 bp, Homo sapiens
gcctgggatggagaggttcaagcaattctccttgcctcggcctcccaagtacctgggattacaggtgcctgccaccacgcccagctaatttttttgtatttttagtagagacaggtttcactatgttggccaggctggtctcgaactcctgaccttgtgatctgcccaccttggcctcccaaagtgctgggattacaggcgtgagccacygcccccagtccacaagcatgtttttaagaggagtgagtcattgagtagaggaaaattggattttactttacttttaatttatgtattttattttatttatttatttatttatttatttatttatttatttatttattgggacagagttttgttcttttcgcccaggctggagtgcagtagtgcaatctcagctcactgcaacttccgcttcctggattcaaacaattctccggcctcaggctcccgagtagctgagattataggcacctgccaccatgcccggctaatttttatatttttagtagagacggagtttcaccatgttggccaggctggtctcgaactcctgacctcaggtgattgacccgccacagccttccaaagtgctgggattacaggcgtgagctactgctcctggccaaaaaattggattttag

SEQ ID NO: 731097 - DNA, 561 bp, Homo sapiens
taatgttcatacgttgttttttgggttttttttttttttttttttaagacagagtctcagttgcccaggctggagtgtgcaatggtctgttctcagctcactgcaacctccgcctcccaggttcaagcgattctcctgcctcagcctcctgagtagctgggtgccatcatgcctggctaatttttgtagagactgggttttaccatgttggtcagactggtctcgaactcctgacctcgtgatccacccacttcggcctcccaaagtgctgggatgacaggcgtgagccaccgcgccyggcccatatgttatttctgcatggtcttgtataaccgtgggcctctaagagcgcagaagcgagcaaaggtgaaagcacctctaggttttgtacaacagtgtgtggattactgctgtcaacagcttacatctttgttgctttttgtttttattttttgagacagagtttcactctttcacccaggctggagtgcagtggcatgatctcagctcactgcaacctccagcccctgagttcattcaagcaattctcctgcctcagcc

SEQ ID NO: 731098 - DNA, 612 bp, Homo sapiens
cctgaggaaagcagaggcatgaggttggaagttcacacggacacggctgaggaatcagaccagagggaggaagcgcagtcagcagacagagaggcctcaagagcgatcttcccaggataaaggaaaacataataaaacaggaggatgaggaagtgaataagggttgtgtgttgtttttaatttgagcacctttaaaaatcygagagaatgagacccttgagagagaaaagttgcctgtaagaaaacaatgtagtcaacggcatcagactctgagatgggcgtgcagggcccaggggaggcccagctgtcccatactggcatctgccctaacagactgagtcagcacagcaaggtcacgccttgaacttgaactccaaaccagggaggagaaacagaagcagctgtaccagcctcattatttaaaaagatggttgtgctgggtgtggtgatgcctgcttgtaatcccagttactcgggaggccgaggtgggaggatcgcttgagcccaggagttcaagaccagcctggacaacatagcgagactctgcctctaagaaactaaaaattaaaaaaagatggttgtaaaacagtatagacattatataattcataa

SEQ ID NO: 731099 - DNA, 636 bp, Homo sapiens
cccatgggaaccccagagaaaccctggaagacagaattaatggccacaatgggaagggagatcagaaatacctcattataccccctcccttactaatagctattaggttttattctgtaaggactaaacagaaaccatctctttcaaatactactagcttatcttcccaggtacataacaaagacaagataaaagtaattcttcattcctccccgagcccccctgcttcatctgttccctttagcttcaaatgttcaccttatcttatgtaaaatgtagatttattgggtattaacaaaagcctcacaaacatgtaattatttgtctcactgctgcctccccagccttttttttttttttttctgaggcaaggtctcastctgttacccaggttgtagtgcagtggctcactgaaacctctgcccctccaggctcaagctattctcccacctcagcctcccaagtagctggtgaccacaggtgtccactaccacgcccagctaagtttctttctttttttttttttgtagagatggagttctgctacgttgcctaggctggtcttgaactcttgggctcaagtgatcagtccatctcagcctccgtaagtgctgggattacaggcatgagccacca

SEQ ID NO: 731100 - DNA, 601 bp, Homo sapiens
cacgcccggctaattttgtatttttagtagagacgggggtttctccatgttggtcaggctggtctcgaactcccgacctcaggtgatccgctcgcctcagcctcccaaagtgctgggattacaggcgtgagccaccgcgcccggccagctttgtattttaaatttaagtcaatggactattttgaatgaatttttgtgaaacttgtaaagtttggatctacatttatttcgttccgattaataatttctttaacatttttgagaaagacacaggatagtgggccccattttattttgaacgtccgtaatcatggcattgaacratctgaatttaattaattcaaccagacagccaggagggggcacgcggccaccgctaaacagtgagcgagcgccgagggccccgcgctgccccagatgaccagcagggggcgtgcgagccgccttgtcggacccctgagaagcccccaccgcctccgtgctcctactgcggccgccagcgccgggcccgcagtgaggaggagaacctcattttcctcaacacagatctaaggggacaccgcctcactttgagacaacttgaggctgcgtcagtggtgag

SEQ ID NO: 731101 - DNA, 717 bp, Homo sapiens
aagtacaactattacggctgcgagggaagtaagaattgaggctattattgttttccatttaccgaaccacctttctagccatcctgtaaaggagtcatttacccctgagttgttggctaactcactggacagagcagtcagaccttgcaatggctttgttatagttccatcaggggtggtgttgtttgggatgaaggtacaacattgagttttaatcatgacacaaactcctcctctttctgttaatatcatgtctaaggctattctgttttcccaagccatctggctggtagcccgtaattgctcagctattcctttaacagcatctctaccatagttaataaatcattgttggttgtagtagatgtaggytatccaatctacatttttatggtcacccaccaaaatattgactcaaatcctgtagctgtttgattttgggctttaaattgatctgatattccccaagggactccaattgcatttaaatggatgtgagagttgaaagacccataagggttttctctcactttaccatgtcttatttttcctccctctggttgatgaaatgccagggtgaaagggatagccaattggactaaagcacaagtgacactccaattatttggcagagtgcccagtaaaggtccaccacaataccaccacacctccactcagggatgaacaagggctgactgataagctcttgaaaattct

SEQ ID NO: 731102 - DNA, 550 bp, Homo sapiens
taccaccacacctccactcagggatgaacaagggctgactgataagctcttgaaaattcttaaactcactgcatcccttcaggtctccaaggaatgctgagtttcctccctgtcgtgagaaacatgaagtaaacttagtgttgggagatggaagctggttggcacttgggggccgacatacagggtgccggacttcgggatatagcagagagagagcttggcacgacttactactccaggctgtagaatcctggaaaagacctacsgtgcagccctcgcccagtcgactggaggaccaccctagtggaaaggggacaatctgggcctctggcctgccatgtgcacaagcataacaattgcttttgtttaacgtgtggatggaatatttgatccattccaaccaggcatttgcatcttggtattctgtcttaattgccaaagtttaagtctttaacttctacaatagctatcttggtcttgtcattagatggaggaggaacagttgttccattgcgagacgttttggaaaaaggcttagaggaaggtgcag

SEQ ID NO: 731103 - DNA, 485 bp, Homo sapiens
caagatggacattaactcgacccaagtatacaactgaggttctaagaattggtcaatatggtctgccactctgtaagggtcatctagtagcggtttaagctccttttaaaaattccggacttctgaactggtcaagggagcatttacaaagcaagtgcccccctcccccacccctccttgtggkacctctttcaaagggaagagggtcggggctgaacccttagatacggagggaaatgggaaattctgaatatccttttttacactgttctacctcacgctggagtccttttagagaggggtatttaggttgggagggaacaggcgggtgggatggtaattcctaagagtcagggttttaaggaggagggataacgagagtagaggtggggatttggaacaggatctgaggcagcagtggctgtctgaggggaaagattggggacactgaacggggaaagatagtctaggggatcccatgtgct

SEQ ID NO: 731104 - DNA, 579 bp, Homo sapiens
aggaggctgaggcacaagaatcgctttagagggtgatgccatgggcagggcagagcatctggggtcttttgggagcctccaatccccaacagtttcgcagaacactgatatctatggactctaaaatgggcttcatttaaagaaacccacagaccattaatggacaaaaacatgaatctatatgtattgtgacattccagtcctggcactgtgggagagcatcaagtaccacgtttttgaagaccatggcctatcatcattatgcgttcaagatctgagtttgaataacctcatcaagacttagatcttcttcaaaagcttcaagtctcatctgcattaaagctytccattgaaccctctcacaaaagtgcaaacttaaagggactaaaatccgttaacacattccattttatatcccttcttctgacttctcttcaatttccttggcctctggggccctttatattgcttatgttcctttagggccaaagtgacagtgctttccaaaaaaaaaaatatgtattctgtggccataagtttacagagaagcataaatttagcatgatgaatttagaatta

SEQ ID NO: 731105 - DNA, 621 bp, Homo sapiens
cccattccttggatcatggcccctgactccatcttcaaagccagaagtgaagcatcttcaaatctccctctcttacctctgctttcatcaccacatctcctgctccaattctgaatctcctaccctcttttttttttatataaagacccttgtgattgctgggcatggtggctcccacccagaatcccaacactttgggaggtcaaggcargaggaacacttgaggcccgaagtttgaaactagcatgaacaacatagtgagacccccacctctagaaaaaaataaaaataaatattagcccgacatggtggtatgcgcctgtagtcccagctacttgagaggctgaggtgagacaatcgatttagcccaggagtttgaaatcagcctggacaacataactaaatctcatctctacaaggacgaggtgggaggatcacttgagcccaggaatttgtggccagcctgggcaacaaaagaagaccccatctggccaacatggccaacctggccaccatggtgaaactccgactctacaaaaatgagctgggcatgggtgacatgtatgtgtagtcctagctacttgggaggttgagatgggaggattgcttgatctcagaagg

SEQ ID NO: 731106 - DNA, 659 bp, Homo sapiens
tttggtgtagaaactccatacatacattcagtcggaagtgtgtgagtagagacaaacatgggcttttctgtcacttgtctacctgcttaactgcataggagaggcaatacgtggtgctcatgaacaaagcaaacattaaagtcagaccagacccaacatttgactcagtcttaatatccaggtgagcttgggcaaatcattcattattcctaaggcttcatcactccattcataaaatggggataactgtggcacctacctgtgattctgtgagaattaatgaaatattatgcttggggttattgtgatcattatacctattccaaactatttgacaaggacagtgatggatgatgacatcaaaaaatcagaaactgcaatgaggtctcttgggcaaaattccatacaagcaacttactgtctctacaaagcattcctgccacacttaattcaccgttccstgaacaaaatatgccatcttcgttgttcaggtctgtacagtgctggtttcccttcccgggcagtttgctccatcccatcccagcccattccccatccctccacctccccctttcctccccactctcatacaactcttcctcatctttcaggacttggcttcaatgtcaccttaactggaagcttctctcactctcccg

SEQ ID NO: 731107 - DNA, 659 bp, Homo sapiens
tttggtgtagaaactccatacatacattcagtcggaagtgtgtgagtagagacaaacatgggcttttctgtcacttgtctacctgcttaactgcataggagaggcaatacgtggtgctcatgaacaaagcaaacattaaagtcagaccagacccaacatttgactcagtcttaatatccaggtgagcttgggcaaatcattcattattcctaaggcttcatcactccattcataaaatggggataactgtggcacctacctgtgattctgtgagaattaatgaaatattatgcttggggttattgtgatcattatacctattccaaactatttgacaaggacagtgatggatgatgacatcaaaaaatcagaaactgcaatgaggtctcttgggcaaaattccatacaagcaacttactgtctctacaaagcattcctgccacacttaattcaccgttccgtgaacaaaatatgccatcttcgttgttcagrtctgtacagtgctggtttcccttcccgggcagtttgctccatcccatcccagcccattccccatccctccacctccccctttcctccccactctcatacaactcttcctcatctttcaggacttggcttcaatgtcaccttaactggaagcttctctcactctcccg

SEQ ID NO: 731108 - DNA, 534 bp, Homo sapiens
ctgataaactttgcttgcaatcatactatggctacgtttatgtccccagttctgtattatttttgtgtgccacaaagttgtaaaataattagttgatatagaataaaatggctcactaaaactctctatggaagtatcacaatttgtatttctatctcactagtaaaggagttagatcaacagtcttggctaggtccagtggctcatgcctgtaatcccagcactttgggaggcccaggctggacaatcacttsaggccaggagttcaagaacatcctggacaacatagtgaggccctcatctctacaaaaaatttaaaaatgagcctggcatcgtggtatgttcctattatttccagctattcaggaggctgagacatgagggccttgagcccaggagtttgaggctgcaatgagctataattatgctactccactctagcctgggtgacagaatgagactgtgcacgcacgcacgtgtgtctgtgtgtgtgtgtgcatgtgtgtaggatcctgtgtgatgaaacaagccttg

SEQ ID NO: 731109 - DNA, 613 bp, Homo sapiens
ataaagacctgattttttttttcttccttctcttgagaagttggaatactgttccgtactggacttgacaaacaaggagctttagaggaaggcacactcaccctttggccagtccccatctgagtccctcctctgttcagagtttcctgcctataccttggagacatgaattcatgataaggccctgttcaagccagcaggggccttgctggcttccccctagttcctgccttatccctatcctagtcctttgatctctggcttcctatcttttggtgtcttagtaatttgtatttcttattttaaaataagtagtgcaggatgaatatttatattccatttaaacaacatttttrtataggtctttttcagcttgcactggcccattctcagattacttcataaagaactacatgtgttacaaatttcataatttttgtgttccattttatacatcacctctttccttttataaaaatgatgcacgatattaaaaattttgtattggaatgaaagatggacagtttgggaactttaggcctcctactgacaggtggagaggaggatcttgattagcgttgaactgttccttccgatcgtcaactcctcgatg

SEQ ID NO: 731110 - DNA, 614 bp, Homo sapiens
agtggtctctgttctgcttttctcctgtttatattcctttttttttttttttttttttttgagacatggtctcactatgttgcccaggccagagttcagtggtgcgattatagctcactgcagcctaaaactcctgtgctcaagtgatcctctcacctcactctcctgaatagctaggagtacakgtgtgcactgctatgcctggctgattttttatttttattttttaagagactgagttttgctatgttgcccaggctggtctcgaacccctggcctcaaacagtcttcccacttcagcctcccaaagtgctgagattacaggcttgagccactgtgcctggcatatttcttatttttggatgctgtttcaaatccttttctgaacagaaatattacaggataatatttgacaaatggctgttgaagtacttttaaaagtaaaaatgccttaaaagtatagtcactgatttaagatattttttcagaaaatcaggtaatactaattagttactttgtggtagttgaggatattttgaagttgtgtgtatatatgtatgtgtaatttcaaatttcatagtttaaaagctaaaaggttggttagaaattaccta

SEQ ID NO: 731111 - DNA, 585 bp, Homo sapiens
tcactgcttcctgagtgaattttcacttgttttgggttggtaggattaagcaatcatgcttttaagcagggccttggtgttcaggcgtgaccctcttcagtttcaggttttcttaattccttgaaatcagcctgtcttaattcagccattttaccaggagttaatcagactgcatctcattagtaggccyttgttttaaaactctgggaacagaagtttcttctcccattgatcttctacccatctctaaaatgtagctcttggtggcagttatttgtcttattctaaatagtgaatcccaggattgggacgcaggacccttgactaattttcatttcatttttccgtctgtgctccagtccccaccaggtactagactctgattgccaccctgagatctggtgacaaaacctctgcctttggctctttgcgtattgtttagcttggccttctctttccaatttactctttttatcctcttcacgcgtcttataaaatcgctaggtggacatatcatttaagccagcctaactttgccactctaatggtgcataacatttatgtagcaaggttgtaagatgctca

SEQ ID NO: 731112 - DNA, 585 bp, Homo sapiens
tcactgcttcctgagtgaattttcacttgttttgggttggtaggattaagcaatcatgcttttaagcagggccttggtgttcaggcgtgaccctcttcagtttcaggttttcttaattccttgaaatcagcctgtcttaattcagccattttaccaggagttaatcagactgcatctcattagtaggcccttgttttaaaactctgggaacagaagtttcttctcccattgatcttctacccatctctaaaatgtagctcttggtggcagttatttgtcttattctaaatagtgaatcccaggattgggacgcaggacccttgactaattttcatttcatttttccgtctgtgctccagtccccaccaggtactagactctgattgccaccctgagakctggtgacaaaacctctgcctttggctctttgcgtattgtttagcttggccttctctttccaatttactctttttatcctcttcacgcgtcttataaaatcgctaggtggacatatcatttaagccagcctaactttgccactctaatggtgcataacatttatgtagcaaggttgtaagatgctca

SEQ ID NO: 731113 - DNA, 614 bp, Homo sapiens
ttttgtgtgagtcaaatccttttaaatttattgagaattgttttatgtccatgaatatggcctatcttggtaaatgatccatgtacacttagaaagaatgtataaaataatttggtgaagtataaaataaatgtcaatcaggtcaagttggttgacagtgttatttaagttttctgtatacttactaattatctgtctacttttctcatcaattgttaaggaaaggatattgaaatatccaactatatttgtggatgtgtctatttttctttttagttctataaatttttactttatttattttgagatccttattaggtacatatatgtttagtattgttatgaactcttgaggagtcgatgtctttttcattatgaaatgacccwctgtatccctgatagtattctctagtctgaaatcagctttgtctaatattaatgtagccactccagctcttttgattagtgttatcatggcatatattattccaccctttcactttcagtgaacttgtatcttcgtatttaaagtgtgatttttgtagccaggatatagtttggtcttgttttttaaattcagtctctcaatctctgccgtttaactgaaacattta

SEQ ID NO: 731114 - DNA, 643 bp, Homo sapiens
ataaatgcacttttttttattagaatagcatatttggtgaagtttgaatacactattttaactatgattttaaaaggcatttcaaaaaaattagtgaaaaattatgatgcctgatttctatatacagcaaagactacttcttttgtaattttggaaaaaattcattaaacaactaaaataaaataattcagacaaaaaattaatgaactatgaaacaaaagtgacaaaaaatggccacgtaaccaattgaaattaatgaataagctcttgggttgtttaacaatctaattatgaagagaagttaatcatacgagcataccagaaaatttaaatttctgactgacttgtgaaatactgacatcaatgaagctaatgcaaaactsttggtatcctaatgaatgaggacagtgataacaaactgtgtcatgggggtcattaattcagagtatttaagatcattcactgtcccctcaaaacttgaaatgccataaaatcttagactgcactatgacagaggttttcccaaatttgactaaaatccacaaaatttgcattactaataacagggtgaaaagctgaaataaatttttctgaactatcaataattgaaaataaatttgaaacaaccatgctaactggaaag

SEQ ID NO: 731115 - DNA, 563 bp, Homo sapiens
aatgaagctaatgcaaaactgttggtatcctaatgaatgaggacagtgataacaaactgtgtcatgggggtcattaattcagagtatttaagatcattcactgtcccctcaaaacttgaaatgccataaaatcttagactgcactatgacagaggttttcccaaatttgactaaaatccacaaaatttgcattactaataacagggtgaaaagctgaaataaatttttctgaactatcaataattgaaaatamatttgaaacaaccatgctaactggaaagtttggatctctatattctcagtatagacagtgatatttctttttttttcttttttttctttttattattattattattattatactttaagttttagggtacatgtgcacaatgtgcaggttagttacatatgtatacatgtgccatgctggtgtgctgcacccattaactcgtcatttagcattaggtatatctcctaatgctataccccctacccccaccccacaacagtccccagagtgtgatgttccccttcctgtgtccatgtgttctcattgttca

SEQ ID NO: 731116 - DNA, 612 bp, Homo sapiens
agcattttggaaagacattcaaagacaggtttactagatgaatatcaaggtagataacctgaaaccactgaacatgcaggtggccctcattcaagccatttagacaggtaagttcatttaactcctaagcaccagttgtattcagaattcagtcaaagcttaaaacaagtttgaccttatttctgtwtgggaaaagttaagagtgaaaggtgatattccattgagtcaaactgtctaggacaaagactttgcacaatattcagaaaggcaccctgcaacacagaaatcatgccaactccatttactgtgtgaaacaaaaggaagctaaacttcagcagcaaagaagggagaaagaaataggttatttgcgtacttgaaatttgacctttccatgaacagatagtcgtttgctgttatgacactattctgagtaaacagtttgatatataatgcaaaagttgaagaaaaaggaagtacagcacagcattaagtattctaaatctttctgatagacacatcctacgtaaggatctataaaggttatctgtttttaacaaatttaacactatatgagagttttttcttctctctaaaaaaagtcattagccatct

SEQ ID NO: 731117 - DNA, 627 bp, Homo sapiens
acctctacccacccactcccaccacttcctacttctgtttctgtttttatttctcatactggttatctcttctactcaaaagaatatacctacagcataatttcttaagtattcaaggtgttatctattcactctgctctaagaaatagaattatcatttttggttgtgttttagttaattacactcctatatgttaatagtatatttaaatattttgttattgcatttactttaaacgwtgttaatatttatgctttgtactaaggctactatttatgtcttccatattttgcctataggtccattctaaaaattgaaaacaaatttactattatctttaataggggattttgcttataggtactccacatatatccttaatctgttctaaactctgcccactcttgtaggagcgggacgcctcaaaccacatttcctcatcaaagcataagggccttttccttcagccatttactaaggctgtttttaccagcaaccagatgttcaccaatcagttgtacccaattccctaattcacttctggattgtgattccacttctggaatcacttcttggagccatccaaaatggtgctcctattactacattttgcttggccatgttat

SEQ ID NO: 731118 - DNA, 566 bp, Homo sapiens
atgctcaaccattttaaatactcagtaaatgcttgttgaacacactctgtaaatttagagttattcaactgctgtgtattctttaacttgattatttcattgtctacagatgagtaattcttcatatcttgtctacatctctctaaatagagcactttcttcctgctccctgcctctcaagagactaagcataggtaaagtgtagcctaaatatgtccttacctgctggcatgaccttggcacctgggagaggcagaatcttggcacagttaacatttacatcatcacagcccttacaaggctgaactctataaggaagttacaaaaatcagagctagcctgagactgctcctaattctgatcatgttgtgagtatgtgcattattyacatggtgtcgtttggaattgttgtaacttagcatataaattcattacttgatttttataatcttttatatacacaggaggtctccgtattatatttccattttaaatatatgtccttattgctttgcttactctttagtccctgggaaatatgatggattttttatttttaatttttt

SEQ ID NO: 731119 - DNA, 444 bp, Homo sapiens
tttacacaacataaaaataaacagtaaaggaagccaagctgtcaaatatgtctttgtcctatacctgtctttgttccatacctgtgaagataagctgttaatttaccttgtcaggctgaggaaggccacctgggaagataygtgatcttctatcttgcaggttcaggaacaaaaggaaaggcagtttttttggagactcagtttctaagcttaacttttccttttggcatagtgagtatggcatcccaatattttattttattttcacacctttaagaatattcatgattcatgggagaaggtcaaaatatcagcattaacaagagtgtgaaagaagttgattctaactttgatggatgacctttgaggggttcaagacttcagtggaggaagtcatagtatactacaatatagtgtatacaatatgcactgggaagccaaaac

SEQ ID NO: 731120 - DNA, 572 bp, Homo sapiens
ataaaatgagttagggaggattccctccttttctattgattggaatagtttcagaaggaatggtaccagctcctctttgtatctctggtagaattcggctgtgaatccgtctggtcctggactttttttggttggtaagctattaattattgcctcaatttcagagcctgttattggtctattcagggattcaacttcttcctgttttagtcttgggaggttgtatgtgtcaaggaatttatccatttcttctagattttctagtttatttgcatagaggtgtttatactactctctgatggtagtttgtatttctgtgggatcggtggtgatatcccctttatcagtttttattgcgtctatttgattcttttctattttcttctttattagtcttgctagtggtctatcaattttgttgatcctttcaaaaagccagctcctggattcattgattttytgaagggtttttttgtgtctctatctccttcggttctgctctgatcttagttatttcttgccttctgctagcttttgaatttgtttgctcttgcttctctagttcttttaat

SEQ ID NO: 731121 - DNA, 561 bp, Homo sapiens
caacctcggttatgaatgacccacatggagcccaaccccggacccaggctgaccagaccagcttcctgtgccccaggactctctgggggcctggatgggactaggaggtagctctgtgagtctccaccttaacctgagagatctcaaggtcagcctgtctgacctgacacacagcatcagctgcgtgtgagattccgggtcacgttcctggaagatgccccccactttctcatctgtgtgtccctggggcacttcccaagttctgtgcccctgagcccagcttggtctcatgatctccccagcactcctaggaaggtggccctatctgtagcctgctggaggcgaagagctggcccagtgacccctaaggaccctattatctaggagctaaaaatcctccacacagacacacrggtatgtggcagagacacacacaggcacactgacctcaggcctgtgtgagtcagagcagcccgcagtggtgcacctgtggcccctcacccaggccagcctcgtggacaaccccaagaactagcggaggccaggttgggacttggtatg

SEQ ID NO: 731122 - DNA, 503 bp, Homo sapiens
cagcattgcctatctccctgtgatagcttgattctaaagataacagcctgcctttactcagaaaccaggactgtgacgtgttttgcacacattctcttttcactttcacagtgtgtgactatggcatgcaacttatgttctctgtgcctcagtttactcaagtgttaaacaggaatactcacatgaggattacatgagttaaaatggataaaatggataaaagtagagagtaaattatttaaactttatcaaatccttggkacatgaccttaatacaattaagtatttgttaaatacatacattttaaagaaacgtcatcatatccacacacctatgaggcacctgcccaggaccacagagccaatcaatcaggtgatgagtgattccaggccagcaggaaaccaccgcccactgacacagggactgcaccatccatccttggtttgcatggtgcctgccatgcttcctgtattactgttaaatacatggggcaggcctttgg

SEQ ID NO: 731123 - DNA, 568 bp, Homo sapiens
atgtgcttcttatatctctgatggaagagagtgtaactgacctgcggcccaattgtagcacttagaaatccatcacagtacttgtgctgtgcacagaccactcttcctaagggttgcttctagccaataaacaattgagcacagcagagattctaagacaggtccatttctaagacatgcagggctgctctgataggggattttggctcaaggactctccaacgacctttcagaagtctcttaaaccacaatgaagtctagaatgctttctctcccaacctttatttaattcttccttctttacccttccctttcatccagagccagttctgcattgtrgtttggcagttctcccagattctttcagctccttccccattttctatcacaggtagttctctcaataaatttctttctttctttctttttttttttttttaagacggagtcccactctgtcacccacgctggagtgcaatggtgcgatctcggctcactgcaacccccacctccacaggttcaagcgattctcctgcctcagcctcctgagtagctgggatcacaggtg

SEQ ID NO: 731124 - DNA, 591 bp, Homo sapiens
accgtgatatgaaaagactcaagtaaaatgtctaacatacactcattattaagaaatcatataaaattagtgcaagccaacaaaatagtaaactaaagtaaatataacatccaagaaaaagtgtttccaaaccaggagattaataaagtaaattccaggttgacaattgtgcagatgttcttgtttggattagcaagaaagaaacctcccaaagagaggcatgtagtgaaaagatktgatgtctgacctcagaagtgggatgaatctaaggatttatttattcataaataaaaccactaacagacaaagatgttacggaaaaaaaatctatatgcaaaataaaactgcagcaattacataggaaatacaaattatttggtaataaaacaaaaaggcttacattgttctaattagtgtaaaaagagtattagttgttctctttttttaatgttttagcatcaactgatagacaaaacttagaaacttatttatcagtaggtgttctcagagaaaaagaacaaattggatgttgatatagctatagatgtagatgtagatatagttatagatatagagatagagagatctctc

SEQ ID NO: 731125 - DNA, 541 bp, Homo sapiens
ttctgactaaaatacaatagaacatgtccgtaggagactaacgtataaagtgacaagtttgaagccatactccccaaggttcaatgtggtacacattaccccagatctttgtgcattaaaaaaatttcatttctcttggaaggccgaggcgggtggatcacggggtcaggagattgagaccatcctggctaacacagtgaaaccctgtctttacaaaaaaatacaaaaaattagacaggcgtggtggcaggcamctgtagtcccagctacctctgaggctgaggcaggagaatggcgtgaatccaggaggcagagcttgctgtgagccaagatcacgccattgcactccagcctgggcaacagagcaagactccgtctcaaaaaaaaaaaaaaaaaaaaagaatttcatttttcatttatgaaaaattatcccatcttttccattccctacaatcaatttcaaatcagagattaaaacattatttagaaaaagtataatttcaattcaaaagtgtataatcaaaataatctaacaatagca

SEQ ID NO: 731126 - DNA, 541 bp, Homo sapiens
ttctgactaaaatacaatagaacatgtccgtaggagactaacgtataaagtgacaagtttgaagccatactccccaaggttcaatgtggtacacattaccccagatctttgtgcattaaaaaaatttcatttctcttggaaggccgaggcgggtggatcacggggtcaggagattgagaccatcctggctaacacagtgaaaccctgtctttacaaaaaaatacaaaaaattagacaggcgtggtggcaggcaactgtagtcccagctacctctgaggctgaggcaggagaatggcgtgaatccagraggcagagcttgctgtgagccaagatcacgccattgcactccagcctgggcaacagagcaagactccgtctcaaaaaaaaaaaaaaaaaaaaagaatttcatttttcatttatgaaaaattatcccatcttttccattccctacaatcaatttcaaatcagagattaaaacattatttagaaaaagtataatttcaattcaaaagtgtataatcaaaataatctaacaatagca

SEQ ID NO: 731127 - DNA, 607 bp, Homo sapiens
aattcattgagtgtccactgatatttctataaaaccagtaacttaactgataacatcagttactttgagggatgcagattcgaggaaatattggagaaagatttgagaaggagactataaaaagttcataaacctctaaattgcttaactggttagaataaggttgtattctttaattttaaaataaattcaaattttaaaaataagcctgtacctagagagaatgtatgtacttagaagaatgcttggaaactcgtattatcgaaaaattctagatctgaatagagagataaaataatctaatatgtgtattggcactatatgcacatacataaagtgtttaatgaatcagtaaattttgtgaatattcttaacaggagaaactcgtgaagaaagaaccttccgtaactggatgaactctcttggtgtcaatccycacgtaaaccatctctatgcgtaagccttcctactgctattgtaaacagttacgaatgtcatgaatggatgttaaataatgacagctctaaagattttctagatattaatttgtagctattatttatattggaaaatgtcaagtggtgatttccatcatcattttccaaat

SEQ ID NO: 731128 - DNA, 597 bp, Homo sapiens
aggtggggaaatggccattcctccctaaagtgaaggagaaaaaacaaggaggaatccagacaggggtagttaaaattcatagcccaggtctttgtcatatgctcatgttgtgctgaacccctgtacactccaatggggatgaatactgggttcagtaggctgaagaagagacccagagccagtgaatgagacatgaggttttattgagggcttacaattggggaacaagacccaacgacagtgggctggacaacagaaccacaaccacttgcaaaataaagtcacacaatttatagagggttttattttgagatggagtctcgatcagtcgccaggctggagtgcagtggcgcggtctcggctcactgcaacctccacctcctgggttcaagcgattctcctgcctcagcctcccgagtagctgggactacacgcacgygctaacatgcccagctaacttttttgtatttttagtagagacggggtttcaccatgttggccaggatggtctcgatctcttgaccccatgatccgcccacctcggcctcccaaagtgctgggattacaggtgtgagccaccgcgcccggccttatata

SEQ ID NO: 731129 - DNA, 597 bp, Homo sapiens
aggtggggaaatggccattcctccctaaagtgaaggagaaaaaacaaggaggaatccagacaggggtagttaaaattcatagcccaggtctttgtcatatgctcatgttgtgctgaacccctgtacactccaatggggatgaatactgggttcagtaggctgaagaagagacccagagccagtgaatgagacatgaggttttattgagggcttacaattggggaacaagacccaacgacagtgggctggacaacagaaccacaaccacttgcaaaataaagtcacacaatttatagagggttttattttgagatggagtctcgatcagtcgccaggctggagtgcagtggcgcggtctcggctcactgcaacctccacctcctgggttcaagcgattctcctgcctcagcctcccgagtagctgggactacacgcacgtrctaacatgcccagctaacttttttgtatttttagtagagacggggtttcaccatgttggccaggatggtctcgatctcttgaccccatgatccgcccacctcggcctcccaaagtgctgggattacaggtgtgagccaccgcgcccggccttatata

SEQ ID NO: 731130 - DNA, 632 bp, Homo sapiens
gctcgctctctagctggattcaggtggaacggaggaccatgaaccctctggaccttttctgccttggtcctatgcttgtaaggtttccggcctaagaggcccatcgactccttctgccttctttcagttgattacaaaataaataaataaataaataaataaataaataaaaaagcaggacattaaacctgccacctccagagggtcctctagcttccttctccactcctgaattgagcgaagcggtgccgacctccaccctttgggcacgagcccctgygcacttgggagactcctgaacaccctcggagaagccagaaagccccgggagatggctccgtctgctgctgtaccagaccgggtcctgcaaaggatgcatcctccgagcctcctccctgcacgtccagtggggcctgcccgtattctacctgagggacccactggaggagaggcacggggatgctgcctgagcagcggacccttctggcgcggagcaggctgtccccaggcagagtccgacgggtccttccttctgggtgcccccggcttcccggactccagcaggcctgggaaggccccgggcccccttagccgatgcccagagagtctccatttctcaagctttgccaccg

SEQ ID NO: 731131 - DNA, 607 bp, Homo sapiens
attccaaagtaataatcatagacaacaaaataaaacacttggagggaaacaagcggtttggttaatatacttctagctccttagtgtctgtccatgacaaataacttgacaaaaattctctactatcatcttaataatgaayattataaaacaaatactgggcatcatcattatgcttaccatttatggcctttctactgtggtgaaacctctaccttgactcttcaatatataaatgaagttagactcttcatttctaactgtggaatggtgttaggagacaataaaatttccgcaaagaatgacccacatagatacttgaatgcagcctcaagaccaacaggattgaaagtaaaaaagattttaaaaggggcttacagaattttgttttcctcaattgttatttctcattctattatccaaaagaaaatattaaaagtttacttgttattaacagtgataatatattactctccttcgaactatgccatcagtgtccctcattaccactttcttgatattctgaaggttgacctgtcatttttaaaaatctcaatcattaagttctctttatgtcagctgctatagtgatgtctcaggctaagca

SEQ ID NO: 731132 - DNA, 478 bp, Homo sapiens
acattgtttgactctttcatgaaaggttcctctgtagtatgagatgctatctgatagtattttacccacagaattacatctttcaaaattggagtaaatcttcccaaaatctgctgccttaccaactatgtttatggaatcttctaaattatttgctgtcatttcaataatttcacagcatttttgccaggagtaaattccatctcaaaaaaatagctcacctctttttctcatccattaaaagygacccattcatttgttaaatttatgtcatgagattgtggcaattttgtcacatcttcaggctccacttctaattctgattatcttgttaacttcaccacatgttcaaatacttcctccactgatatcttgaatcctcaaagtcatccacgaggactggaatcaacttcttcaaaactcctgttaagttgatattttgatcacttctcataaaccataaatgttcttaatggaa

SEQ ID NO: 731133 - DNA, 769 bp, Homo sapiens
agttttttaatttttttttatttttaatttttgcaggcacaaattaggtttgtatacttatggggcggatgagatgttttgttaaaggtatgcaatgtgaaataagcacatcatggagaatggggtattctaacccctcaagcattaattctttgagttacaaacaatccaattacactctattagttattgtaaaatgtccagttcaattattatgtactgtagtcacctggtgtgctatcaaatamaaggacttattcattctaactgttttttttttttttcagtactcactaaccatccacaccttcattaagcaccctactacccttcccagcttctggtaaccatccttcactctctatgtctgagttcaattgctttgattttttagatactacaaataagtgagaaagtgaagtcagccagttacagtctttctgtaacttcacttaacataattatctccagttccatccatgttattacaaatgacaggatctcattttttatggctgaatagtagtccattgtagataactaccacattttctttatacattcatctgttgatgcacacttaggttgctgccaaatcttagctattgtaaggattgctgcaaccaatatatagggtgcagatatatcttcagtatactgatttcctttatttggggtaaatacccagcagtagaattgccagatcacgtggtaactcaatttttagttttttgaggaatcttcaaactgtttttcatagtggttgtac

SEQ ID NO: 731134 - DNA, 636 bp, Homo sapiens
tcactcttgccttatctgtgcagtaactgggctacataaagcagtggaggcgtatggatgtccatataataaaatgtgtaaaagtataaaatgttagattgttggctggccacagtggctcacgcctgtaatcctagcactttgggaggccaaggtgggcggatcacgagktcaggagatcaggaccatactggctaacacggtgaaaccccgtctctactaaaaatacaaaaaattagctgggcgtggtggcgggcgcctgtagtcgcagctacttgggagactgaggcaggagaatggcgtgaacccgggaggcggagcttgcagtgagccgagatcacgccactgccctccagcctggacgacagagcaaaactccgtctcaaaaaaaaaaaaaaaaaagttagattgttgtagctcaaacaaaccacaaaatgcactatagtagtttgaggcttattaatggaaaaagttgatgaagccccctggcattctgtaaaaaaggaagtagaaaaaaaaaaggagatagagactcgtaattttacaactggaaaaaccctagatgcacgtattgaatcatactttctcattttacaaattaggaaacaggtttagaaacataaaatgactggcaca

SEQ ID NO: 731135 - DNA, 636 bp, Homo sapiens
tcactcttgccttatctgtgcagtaactgggctacataaagcagtggaggcgtatggatgtccatataataaaatgtgtaaaagtataaaatgttagattgttggctggccacagtggctcacgcctgtaatcctagcactttgggaggccaaggtgggcggatcacgaggtcaggagatcaggaccatactggctaacacggtgaaaccccgtctctactaaaaatacaaaaaattagctgggcgtggtggcgggcgcctgtagtcgcagctacttgggagactgaggcaggagaatggcgtgaacccgggaggcggagcttgcagtgagccgagatcacgccactgccctccagcctggacgacagagcaaaactccgtctcaaaaaaaaaaaaaaaaaagttagattgttgtagctcaaacaaaccacaaaatgcactatagtagtttgaggcttattaatrgaaaaagttgatgaagccccctggcattctgtaaaaaaggaagtagaaaaaaaaaaggagatagagactcgtaattttacaactggaaaaaccctagatgcacgtattgaatcatactttctcattttacaaattaggaaacaggtttagaaacataaaatgactggcaca

SEQ ID NO: 731136 - DNA, 513 bp, Homo sapiens
ctaaaatttatgtggaattgcaagggatcctgaatagctaaaacaatcttgtaaaaggggaacgaagttggaggactctcacttcctaatttcaaaacttactaaaaccctcagtcatcagaatagtgtgatattggcataaggatagatatatagatcaatggaattgaattgaaaccaacccgtacatctatggtcagttgattttagacaagggcatcaagttcatttaatgagagaaagaatattctcttcaacaaattattctggaacaactgaatgtccatatggaaaagaacgaatttggaccctcacctcaaatcatatatgaaatgtaaccaaartgaatcaaagacttaaatataagagctaaagtcatctgggtgcggtggctcatacctgtaatctcagcactttgggaggccgaggtgggcggatcaggagtttgagaccagtctggccaacgtcatgaaaccctgtctctactaaaaatacaaaaattagccaggcgtg

SEQ ID NO: 731137 - DNA, 525 bp, Homo sapiens
ccttggcatagtgggatgggaaatcaggttattttgaaccctgagcccatggctacccgtcagccccctgggctgacatttgacctcttccagaatcatatgccctcctgaaaccacaaccagtcctcagtggagacctaaggtatgctcgcccatcctagtgtggggacttgggggtgggggtgggggcgggggcttcctgaatgggattgtaaccccccaccaaattcaccttgcctgctgcctagacagagccgwtttatcaagacaggggaattggaatggggaaagagtaattaatgtagagccggctgtgggggagacccgagttttattgttactcaaatcagtcttccagagcatttggagatcagagtttttaaagataatttgtaggggcttaggaagtggggagtgctgattggtcaggttggagatggaattatagggggtcgaagggagtttttcttgctgtcttctgttcctgggtgggatggcagagctggttgagccacattacttgtc

SEQ ID NO: 731138 - DNA, 636 bp, Homo sapiens
ttcttctgctcagttgctttgaccatcaaataacacctaattataggatgcaaatgtccctaagctgggaaaccccccacacgacccctcccagccctcctgccagaaggcagtgcagtgctcaccccatcggtgggaaaytcatccacctcggcctcctcctctgtggcaggcaccaccacgcgggccaggctggcactgagggctgccagtttctacaggagagaagggggctgcttgcagtgggggacctcatgcgggcatgtggccagggtggggaggggcagcagtgacagtcctgggcatcagcaggtgtgggttccaagggcaggctgagaccacccacctagccataaccacccccactctgaaccagacccccagaggtgttggggacagagaccactcccttgggagatgccggatgatgctcctggagcctctcacctccatacaactctcggagtccaacgcgtaggtgccctcaccggcctttgcctctgcttgggcctgaccctcgagctagtaggcaaagggaaggtcaggaggcagaggacagccacagcccctcgcctctgtgtggacagagaagggctgtggcccctgcacggcgagcagaaggcactgggctggggt

SEQ ID NO: 731139 - DNA, 620 bp, Homo sapiens
catagcctaacagtacattttcattcataaaaagtagtgtacaaaaaagaatatttattctatcaaaaacaacttgtaaagatgtagtacaaaaaagtaatttacaatgtaattgctaacaaaacaacaggctgttcattctttatgtctgtcccaaaaaggaacagtaaacataagctattagtttttctctaagttatgtcaaaagtgtctctaagtagagttttacaacccaaagagaaatgacaacactaccgaggagagacatataagaacagaaagaaaaaaaaatctaatgtgtccttaatattaaaaaaaaagcatatgaggcaattctgtagtgtgatatctatagatgtcacagtacagcaatgtgtatcacagaatttgaagacataaaaaccyggatacaaatcttggctctatcatttacaggctatgggacttcaaaaaattgcttaacatctctgggcctcagttaccacattagtaaaacagggtttacttacaattacttcatatagctttaaaaattaaatacaaaaattaattaggagactacattaacacatacaaacagctgctttctcatgacatgctctaaatcttggtgacagaga

SEQ ID NO: 731140 - DNA, 595 bp, Homo sapiens
ttctaccattttaatatcaattttatggatagaaaactgaaagccagagaggttaagttgctgaaccaagacctatgtccagtatgtaagatccatcttccttaaccattacctgactgtcatcagattcatttaaggagatttctaaatagaggtaactagagcccaactctgcaaattctgacttagcagagctgaggcaagggccttaaatacaaatgccttgagaagcagtaatagtcaacataaatgggtgaaggagacytaaaagatgccagaaaaatataagacaaaaatgaatgatgagaagcagttagtaaatgctggggcctgtgagaacttagagcctgtggcaaactggaatgccccatctaaagtcatttaaattcaaggttttcttttttaactctactcctaacaaacaaaatccatctatggattaagtttagcttgtggtcctctagatgccatgatttggtctagaatcttaaaatcttttttttttttttaaacaaagctccctgggtaaaactgacatagcagatcaaagttatataaactgaaagaagacacaacttcggtcttgtacattgag

SEQ ID NO: 731141 - DNA, 614 bp, Homo sapiens
ggatatgaggacaattagaaatgtttttttcttctctctgttctatattttccacattttatttaatattcatgtattatgataggcaaatagttttctctaaataaagtattcatgaagttcatatttaaccatgttttttaaaaattgcatggctgaattacaatatggaagtctgtcactgtaagcaaccatatttaaaaacaaaagactctagcaatactagctacttattacacttttaaaaatgtccctttctttggattgagttttagataaaaattcaytttgaaacttaaaaactagtcccaaaagagttaagggggaaaaaaaatctacaggtgttaactgtacagaaaattgtaaacaataaaaaatcacaaagttaaaggatacagaacaggatggaaaacataaaaaacatttgcaaggatggaaaatatttgcaacacatataacagacaaagaccattaaaaaaagaattccaataagtcaatgagaaaaaaagagaacctaataactaagcttttcttttctttcttttttttttgtgagacggagtttcgctcttgttacccgggctggagtgcaatggcgcgatctcggctcactg

SEQ ID NO: 731142 - DNA, 649 bp, Homo sapiens
ttgatttagctagggaacaattacaacctgagctgcttaaatcaccttgctcgtaatctgtccgtgatcaacttacttgaaaagaggtgattaaaaaatccatagaagagattggcatggtattagagacaatgtatttaaactgaaaaggtgtaaaattatcttatctagcaggcaacttttaaatagtttattcaggccgggaacagtggctcaggcctgtgatcttagtactttgggaggccgaggcgggtagatcacctgaggtaacgagtttgaaaccagcctggccaacatggcgaaatctcatctctactaaaatacaaaactcagccggacgtggtggtgcacacctgtaatcccagctacccaggaggctgaggcatgagaatcgctcgatcctgggaggcggaggttgcagtgagccaaggtcacaccactgcactccagcctgggcgacagagcaagactcygtctcaaaaaaataaaaataaaaataagtaaataaatagtttattcatctaaaacaaataattaaacatttctctaacttttctatcatttggactaaaaaacatgtaatgtattttaattaattctttagagctgaggttattttaatttgcaatcaagtcaaatgcatgattca

SEQ ID NO: 731143 - DNA, 517 bp, Homo sapiens
cctgaaaggaaggacgcaagtctggctggatttgccacttgctgattgtagagctcttgggatgcaaggaaacataggtggtaggcaggcagtggtcactgcaggccttgggagaaaccagtgctgtgttggcttcaagtctgagccagtgaagttccagtggtgatggccatgggcatgattgtgtcacccatcccccagttccaggctgctcagcacatggagagagactgtttgggggaaaataagggaagagaacaagagtctctgcctsgtaattcagggaattctcctggatcttagccaagaccaccaaagcagtacttctgtgcgtctgcaagaaccacagtgttactgggcttgggttaccccctaaagcagataatggctgcagttaccaaagacttagatcacaacatgcaagtcttttaaaatacttacaaagccttcccaaaaaggacaggtacacacgagcccagaccatgaagactaaaataaatatctaactgttcagtgt

SEQ ID NO: 731144 - DNA, 597 bp, Homo sapiens
ccaaactcacaattagtagaagaaaagaaataataaaagtcatagcgaaatacacgaaattgaagtgaaaataacaaaaaatcaacaatcaaaaattggtgttttgaaaagatcaacaaaatcaacaaaactttgttacccacactaactgggtaatccmagctacgggagactgaggcaggagaatcacttgaacctgggaggtggaggttgcagtgagccaagattgcaccactgtgctccagcctgggtgacagagtgagactccgtttcaaaaaaaaagtatcactagaggctactatgagcaactgtatgccaataaattggaaaatctgggagaaatagataaattcctaggcacatacaacctatcaagattgaaccaagaagaaatgcaaaacctgaacagaccgataacaagtaatgagatctaagccatagtaaaaattctcccagcaaagaaaagccaaggaactgatggcttctctgctaaattttatcaaacatttaaagaagaactaccgatcctactcaaactatcctgaaaaatagagaaaaaaggaatactatcaaacccattctacgaggccagtatta

SEQ ID NO: 731145 - DNA, 604 bp, Homo sapiens
ttggttatcgtaggttaacattagttgagggtcaactctttgtcagtcactgaaccatttacatatattattgctggtattcttcataacaaaaatataaattatgcactagtatcatttccgtaatacagagaaggaaaatgagacaggagaggttatttaacttgcttaaatmtatgcaatcagttagtggtacagccaggtttaagagaaacaagaattggtcctccagcatcacatatgtcctcgtttagttactgtgagattactttatagattgagctttcagtaaataatccttatggaaaaagaatcattaaatcaatgcgatagtaaattcttttcatggaaaaaagaatcatgaaatctacaattctagaaaaattgctcttcaggtgcagctaaatggctatgtttgtgtcatagtatgtgactattgtaaccttactataaacttatttgtggttgttaaaaacatagtctataatatagcatgtgtaattgctcattaataacgtggctaatgtatgaattaaaaaataccttaaataactttaaaattagagcaatatattttcatgactttaattaacaaggaactata

SEQ ID NO: 731146 - DNA, 520 bp, Homo sapiens
tatattattgctggtattcttcataacaaaaatataaattatgcactagtatcatttccgtaatacagagaaggaaaatgagacaggagaggttatttaacttgcttaaatctatgcaatcagttagtggtacagccaggtttaagagaaacaagaattggtcctccagcrtcacatatgtcctcgtttagttactgtgagattactttatagattgagctttcagtaaataatccttatggaaaaagaatcattaaatcaatgcgatagtaaattcttttcatggaaaaaagaatcatgaaatctacaattctagaaaaattgctcttcaggtgcagctaaatggctatgtttgtgtcatagtatgtgactattgtaaccttactataaacttatttgtggttgttaaaaacatagtctataatatagcatgtgtaattgctcattaataacgtggctaatgtatgaattaaaaaataccttaaataactttaaaattagagcaatatattttcatgac

SEQ ID NO: 731147 - DNA, 623 bp, Homo sapiens
tggactccccactgccacctcacacagagcagtttccttgccctaaaaatcctgcgtgctccccctattcatccctccctgcccccaacccctggcaaacactgactctttcgctacctttgtagttctgccttttccagaatgacccatggattcaaagagtgtgaaggctttttcatggcttgggagctcatttcattttagcactgaataatattccactgcctgatgtaacggtttactcacctcctgaaggacatcttccaagtttgggcaattgtgaataatgttgctatacacatctgtgtgcgggttgatgtgtggatgtaagttttgagcttctttgggtgaatacctgggggcgtgattgctggactgcatggtgagtgcctagttttgtaagaaaccacgaaactgtcttccaaagtggctgcaccgctttgcactcccacgggtaatgaaagagttcctgaggctccrcgtcctggccggcgtgtggtactgttggggtctggattctggccgttctattcggggtgtggtggtgtcttgttgttgttttaatttggaatactcgggcgggaggtgatatggggcgtctggtttgcacacttgttttaatt

SEQ ID NO: 731148 - DNA, 679 bp, Homo sapiens
gctgtttaatggggcagagcttcagtttgggaagatcgagaagttctggagatattggcagtgatggctgcacaacaatgagaaagtgcttaatgccactgaaatagacaaaaatgcccatgatggtgaatcttatgtgtagctgatctcaatttaaacatttaaaaaattttttgcacttagtttttagtaaacttgtataktattttgccaactaaggtagtttttaaaattatatttcagcactgggtgatataaggatttttaaatttataaattatgcctaactccatagcctcagtcatgataacattatgaattcaatcttttaactcgtttcaatgatagtgaaaatatctgtctgtattttaaagaatataaaagacttagccatgcccatggtaaatggggggttcataaaagcatgtgcttgatctgtcagaaggggacctggtgttaacatctagcatcttccccgggaggccagccaggtacaacattagctttgctactcgacagcatcgcccatggtaccagggacccatcaggaacctggtacctgtttaagaaagaaagaagtgtctgatgggaacactgtgcttgggtcttccctgaggacagacatggacagctgagtgcatccctgcaggggccccagaaggcgttcctctggatccct

SEQ ID NO: 731149 - DNA, 679 bp, Homo sapiens
gctgtttaatggggcagagcttcagtttgggaagatcgagaagttctggagatattggcagtgatggctgcacaacaatgagaaagtgcttaatgccactgaaatagacaaaaatgcccatgatggtgaatcttatgtgtagctgatctcaatttaaacatttaaaaaattttttgcacttagtttttagtaaacttgtatagtaytttgccaactaaggtagtttttaaaattatatttcagcactgggtgatataaggatttttaaatttataaattatgcctaactccatagcctcagtcatgataacattatgaattcaatcttttaactcgtttcaatgatagtgaaaatatctgtctgtattttaaagaatataaaagacttagccatgcccatggtaaatggggggttcataaaagcatgtgcttgatctgtcagaaggggacctggtgttaacatctagcatcttccccgggaggccagccaggtacaacattagctttgctactcgacagcatcgcccatggtaccagggacccatcaggaacctggtacctgtttaagaaagaaagaagtgtctgatgggaacactgtgcttgggtcttccctgaggacagacatggacagctgagtgcatccctgcaggggccccagaaggcgttcctctggatccct

SEQ ID NO: 731150 - DNA, 615 bp, Homo sapiens
aatgattatatcggctttattcataatcaccaaaaacctgtaaccacccaatgcccttcaggggctgagtagatgaacagaagaaggttcctccgcccagcagactgccactcagggatgagaggaacggagaacggagcctgcagtgagggagaatctcagatccactgcggggctggaggcgaaggtgttcagttggtccacgttgtaaaacaaccagaaaatggctgcttgcagtttgattctacacatatcacattctcaaaaaggcagaactraagggaaaaagctgcatctgtggtttccaggggctggagactggggaggggtttagctgcagcagggctcaagcgagctttggggtgatgggatgcgctgtcttgaatacggtgtaggctatggtatggtttggctgtgtccccacccaaatctcattgtgaatggcagctcccataatctccactgttgtgggagggacccagtgggagatcactgaatcatggggtgggtccctccatactgttctcatggtagtgaatacatctcatgagacctgatgattttctgaggggtttcccattttgcttggcttccattgtctcttgtctgccacca

SEQ ID NO: 731151 - DNA, 615 bp, Homo sapiens
aatgattatatcggctttattcataatcaccaaaaacctgtaaccacccaatgcccttcaggggctgagtagatgaacagaagaaggttcctccgcccagcagactgccactcagggatgagaggaacggagaacggagcctgcagtgagggagaatctcagatccactgcggggctggaggcgaaggtgttcagttggtccacgttgtaaaacaaccagaaaatggctgcttgcagtttgattctacacatatcacattctcaaaaaggcagaactgaagggaaaaagctgcatctgtggtttccaggggctggagactggggaggggtttagctgcagcagggctcaagcgagctttggggtgatgggatgygctgtcttgaatacggtgtaggctatggtatggtttggctgtgtccccacccaaatctcattgtgaatggcagctcccataatctccactgttgtgggagggacccagtgggagatcactgaatcatggggtgggtccctccatactgttctcatggtagtgaatacatctcatgagacctgatgattttctgaggggtttcccattttgcttggcttccattgtctcttgtctgccacca

SEQ ID NO: 731152 - DNA, 615 bp, Homo sapiens
aatgattatatcggctttattcataatcaccaaaaacctgtaaccacccaatgcccttcaggggctgagtagatgaacagaagaaggttcctccgcccagcagactgccactcagggatgagaggaacggagaacggagcctgcagtgagggagaatctcagatccactgcggggctggaggcgaaggtgttcagttggtccacgttgtaaaacaaccagaaaatggctgcttgcagtttgattctacacatatcacattctcaaaaaggcagaactgaagggaaaaagctgcatctgtggtttccaggggctggagactggggaggggtttagctgcagcagggctcaagcgagctttggggtgatgggatgcgctgtcttgaatacggtgtaggctatggtatggtttggctgtgtccccacccaaatctcattgtgaatggcagctcccataatcyccactgttgtgggagggacccagtgggagatcactgaatcatggggtgggtccctccatactgttctcatggtagtgaatacatctcatgagacctgatgattttctgaggggtttcccattttgcttggcttccattgtctcttgtctgccacca

SEQ ID NO: 731153 - DNA, 614 bp, Homo sapiens
aaaatgagaataaaaatagtatattggctatgaaatattctggtatatagatttatgtaataaattctacctgtaattgattgagttgattccattctgtaggacaactgaatgcaggtttaaaacagtgctactgaagtgaaggatgtgctttgtaagctggtttgccctgtgaggttgtccgtctaacccagataacacragtcactctccctgtacatgtgtctgtgactgaactgatttcatggtgtaggaatcgtctgttcatatgtgattctcctgcctggctatgagcccgcaggccaggtcccacctgtgcactgctgcgtcccaagcatgcaccacacagcaccgattctcaggtcctcatcctcaagggctggtcgagtacgagtagtcggtgaagcttcacgtcctcactacctgccagcaggtacgtggtggcccctttacccgtaactgggaggacagcggtcaccacagttgctggagctgctctgccacgtcctcagattatccctctaaacatctttcccgggacattcactgtgaggtgaaatcatacctgtggaaatcattgttgaaatgatcgctttgaaaggagtttccatcat

SEQ ID NO: 731154 - DNA, 614 bp, Homo sapiens
aaaatgagaataaaaatagtatattggctatgaaatattctggtatatagatttatgtaataaattctacctgtaattgattgagttgattccattctgtaggacaactgaatgcaggtttaaaacagtgctactgaagtgaaggatgtgctttgtaagctggtttgccctgtgaggttgtccgtctaacccagataacacgagtcactctccctgtacatgtgtctgtgactgaactgatttcatggtgtaggaatcgtctgttcatatgtgattctcctgcctggctatgagcccgcaggccaggtcccacctgtgcactgctgcgtcccaagcatgcaccacacagcaccgattctcaggtcctcatcctcaagggctggtcgagtacgagtagtcggtgaagcttcacgtcctcactacctgccagcaggtacgtggtggcccctttacccrtaactgggaggacagcggtcaccacagttgctggagctgctctgccacgtcctcagattatccctctaaacatctttcccgggacattcactgtgaggtgaaatcatacctgtggaaatcattgttgaaatgatcgctttgaaaggagtttccatcat

SEQ ID NO: 731155 - DNA, 665 bp, Homo sapiens
ttttttccatagcaaaatccttcacacaccctgcagatagaatgctctcactgctgtacatcagtccttaaatgaggaacaaatgtccaggcctgacatgatcaattgcgaaaagtgagcgtgggtgcattgtcctcagctatccctcggaaagttctcatttgcaaatctgaaaccaattccagattaggcgaagggagctttaagaaggtcactggattgggcccggatactagaccagcaacaaacagggacaagctgaaaatgcacytaagtgtctccagtatcctttctctgtaatacgcacactaacacgatctcaaacctgttgagaacagccatcagcttcccctgggctagtaaaagagtggtttgctgatcttagcaggcgtctttcccattccaggtacctctgcccagttctctgacctatcagagcatacagggtgcgtggtgccttcctgcctggagtctgtgtggaaacccacccctcctagcacaccttgttcagcaggcacttcctcattcttgtgctgacagctttccttttctgtcaaataccccagggcacagtacactagggactgtcttatcctgcttctaccctctacaccccacattcacaattaacaaccagcttgttcattccacagacattagttgaa

SEQ ID NO: 731156 - DNA, 626 bp, Homo sapiens
gacaaaggtaatactacagtacaatacggaaagtatatatttttcaataaatggtgctaggttaatttgtatagccataagggaaggtggagagaagctcccataatcccctcatccctcatctcaccattcacaaaaataattacagataactgaggaatataagtatgagagacaataaagctactacttgaagaaaaaaagtgttcggagagtatcttcatcatcttggggtaggcaaagatttctgttttttttttttttttttttttttgagacggagtcttgctctgttgcccaggctggagtgcagtgacacgatctcggctcactgcaagctcygcctcccgggttcacgccattctcctgccttggcctcccaagtagctcagactacaggtacccgccaccacgcccagctaatttttttgtatttttagtagcgacggggtttcaccgtgttaaccaggatggtctcgatctcctgacctcgtgatccgcccgcctcggcctccgaaagtgctgtgattacaggcgtgagtcgcctcgcccagccgcaaagatttcttaaacaggttgcaaaaaagcactaatcataaaggtgaaaaaataatcgtatgttaaaa

SEQ ID NO: 731157 - DNA, 626 bp, Homo sapiens
gacaaaggtaatactacagtacaatacggaaagtatatatttttcaataaatggtgctaggttaatttgtatagccataagggaaggtggagagaagctcccataatcccctcatccctcatctcaccattcacaaaaataattacagataactgaggaatataagtatgagagacaataaagctactacttgaagaaaaaaagtgttcggagagtatcttcatcatcttggggtaggcaaagatttctgttttttttttttttttttttttttgagacggagtcttgctctgttgcccaggctggagtgcagtgacacgatctcggctcactgcaagctccgcctcccgggttcacgccattctcctgccttggcctcccaagtagctcaractacaggtacccgccaccacgcccagctaatttttttgtatttttagtagcgacggggtttcaccgtgttaaccaggatggtctcgatctcctgacctcgtgatccgcccgcctcggcctccgaaagtgctgtgattacaggcgtgagtcgcctcgcccagccgcaaagatttcttaaacaggttgcaaaaaagcactaatcataaaggtgaaaaaataatcgtatgttaaaa

SEQ ID NO: 731158 - DNA, 643 bp, Homo sapiens
tccccaaagtgctttggtcttggttgcttgattaacttcaggataaatgagtggccctagccaagaagacttttacaatttttcattcttattttctgttaaatatatgttgccttatatacctctctctccccctccgcatacaataaaatgcatttcatgaaatacacacattatatagactctttcatcagagaatggagggagatattctggaaaaatgcattttttagttaccaccatcgcmaagatagacttttggacaatattaagcttgttgtcactcacaaaccttattcaagcatgtccatgccaatgatgaatggatactttctctaataagtgctcacaaatacagctatgggaggattccaccaaatttacctcaatttccattatttcaatatgcatttacacatattctgatgtttattgaccaatgctccgtaaaaatccaaaggcaaatgagtgaatgatggtaagcctcgagaccacacggtggcgctgtttcatcatacttgagagaggctttagcactttgcaggagaccacggccccctgaaaacagaagaccatgaatacaagaattgccttccctgtgttactccaatttgaatgagagaacccagtagagtttaacatt

SEQ ID NO: 731159 - DNA, 607 bp, Homo sapiens
gcatttgtaggacggttcctgtcccactgaggttaactaaatggtctggggatgggcaaggagaaagaaggggagcacttgcaaagtagctggctccactttggaggaaaaaaatcctggggttgtttttgaggtccggctgagaaccaagagcaacaacaaatcatctatatttttttcagcgcatcatgtctatttttcacgtagcaactcccttccgggcattcggaaaacgctcctcgtcggatatttctacccacaggatgctctttctgtttaacatggaagtagctttgaattctctctgcaaagaaraggtccggtatcccggcgggagaagcaaagtgccactgggtgctggaacgtggaggagagggctcgcaggaggaagggtggggcttgggaaggaaaaaggcgcggctcggaggagaaaccggctgctcacaatccgcgaagccagaagttacccggctcgtggaaccacgtccacttcccccagccagttccctcctgggtttcattcttaaaaagcgatttgtattggtgcctctcttccgtgtgctacaaagagaagtgaccgctagagggcaatatgctgcaaaataag

SEQ ID NO: 731160 - DNA, 657 bp, Homo sapiens
atactcaaagggaatttaattctttaaaagttctattgtttcacaacttgatctgaattgttataattaatggcttaaaactgtttgtaggaggtcacctctatctcttttgaagagtatcagcttaacagataagcaattcggccgggcgtggtggctcatgcctgtaatcycagcactttgggaggccgagggggacggatcacctgaggtcaggagtttgagaccagcctgaccaacatggcaaaaccctgtctctactaaaaatacaaaaaaattagctgggcgtggtggcgagcacctgtaatcccactactcgggaggctgaggcaggagaatcgcttgaacccaggaagtggaggttgcagtgagacgagatcacaccattgcactccagcctgggagacagagcgagactccatctcaaaaaaacaaaacaacaacaaaaacgattagcaactcatcctgtaaattttcaaatatttattatccaaacctggatggtgcatgggtccttccttccctcccctagagctgcagatgtctccttattctaatgtcactgtatagggcccaaataagggaggcagctttagacccatgctgccgaaaactggggctttatcctggcaagaaacgttctgtcagtctcagtaa

SEQ ID NO: 731161 - DNA, 588 bp, Homo sapiens
ctgctgagtttcattcactttcactgctccagtatatgctttattagaaatacaccatagtgtatgtatttcttctcttgtccataaacatttaggctgttctgtgtttgctattatgaacaattttgttctgagcaaacttctatgtgtctccaggaacacagtgaccaagagtttctctggactatgtaattcagagtggagtttctgagttataaggttttcaactatcgcttgaaattttattccatagtggttgtatctgtttataaagccactagcagaggatgagagtttttgctgaaccacagtttcatcaacactgtgtactaccaaaattctaaatgtttgccaatcaagaagatataaaacaaatcccattatagttttyatttgtatttccctgattactgataaggttgagcatcttttcacagtttaattcaccatgtatgtttcctcttcagtgaactatttatttcttttgcttattttctaatttctgttagtttctttcttatcaacttatcatagtctgctattaatactgaatattaatctcttgccaattatgcgtgatatgaatat

SEQ ID NO: 731162 - DNA, 630 bp, Homo sapiens
atctgttttcacacttgccaagaacttgacaatttttcataaatttggataggtgagacagattagcagcgaatgcaggctctatccaattatttaccatttatctagtgttctgaataattcaggaagaagtagaaatraagttgaaggccaccagatcacctaaaacttgtgtaggtgatgactgtgggtggcttttgttggaatgcactattaaaagtgggcagagggataaggaaagagagtgagagacagagaatagaacaaaaatgaagagaaggaggagaaagagagaagaagaaaaaaggaacagaaaagagggttgtaaagaagagacagagtgaagagaggaaatgagaagataagaggatgagaagagaaggcaagggaagagaaaggaagtttaatatagagaagcagttgtgagggaaaggagggagagaaataaaaagaagggtggttaggaattatgctgccttttgatcccccttgtcttttgaaaagagaatgtcctctttgggggcactgtttcatcctcaattctgtgtcccacttaggctgacaaacataatttgctatactcctggcattaagggtaggcatgcaacctttgccggtctaagcagaata

SEQ ID NO: 731163 - DNA, 648 bp, Homo sapiens
cttaactgcaaaaaatagaacccaccccagctagattaagcagaaaaagaatttgtcaaaggaaccaggtgacttataaatcctaggggtaggagggacagagagtcagacttagcaatgacataaaaaggacaatgcctaagtcatattgtagaggctgcagtgacagagacagtggagcccacacaagaactacatacactgtggggcccagtgcaaaatgaaaatatgagtccacttgttcaagtagaatacttccattgaaggtactaaaatataaagctctttcctttcttctgcagcctttctcaacttttcacgagtgttttttcttgccatttcatgttgttctaagtaaagaaaaattttaaatttatgaatttttaaattaaaaaattygagtatgaattttatcatttttctttatatcagttttaaagatgatatgtcagttttaaatggaaatataaaaacatttaattacatacagaattacagaaattaccacaattcatagattatagcttgtatgtgcgtatgcattttgttcttacaaggagagtgtaaacactgtacaaaactaacctaactgctttcatttcacttcttgatatatatgctcattctgccaacactctctgcctttgg

SEQ ID NO: 731164 - DNA, 612 bp, Homo sapiens
gtgatcctcctgtcttggcctcttagagtgcacgattacaggcagaagccactgcacccagcctcaaaatagttctctaggggtctgtcgggtaaattgggcctaagaactctgagtttgtcctgtccacatgcacaacgacattgccttctcttctaattttgcttctgcctgaggtgatatcctaaggctgagccttcagaatactaggtgcagcagatttaataactgtgcgtgaatttggtcaacctcattagcccaacccgataattaaattccaattaaaatatctcctgcttctgacacagaaaaagaaaaagtagtgaggaacagattagattattttgaccttttaatttcctttargcattgggtctgtaggtcaatgattaatattaacatgctttgtgtaattaacatcaagtcccctgataagtagggcaggaaattcttcatagttagtattttagaaggatgcctgtaatctccatttgcacaaaataaactgacatatgattttccaggaaggatgttagaataaatgactatccaatcgtaggatagagatatattgttagtaggaagtatacgtccattaaactgattgtctga

SEQ ID NO: 731165 - DNA, 624 bp, Homo sapiens
ggttctgatcccactgcattctccgtccttacccaagccatcactggccaggtgggttttgtggatgtggaattttgcactacctgtggagaaaagggagcaagtaaaagatgttcagtttgcaaaatggtaagaatggagttctttttatttcattgacctctggtttagatgcagccaagctgatgattgagttttaatattctgtaagagtggacattagttttctaataaattctagtaacgaaaatattytatttaatacttaaaaagtagttttggaaaagaattaataggatcaatatagttctttactgtgtctgtcttctgctaaactgccagtcttcctttgcctctttgctgatcacctcatggaaagaaaggatatgaatgaatgaatatgagaaaataagagaaaggttttccgtggggcacgagaccaaggctggtgcagatgtgaaacctagaataggacagttcataaatatacattctttactcttctgatgttgactttaatgacagtgtcttcatcaacatatccttgtaaaactatagtttctgactgttaccagtctttaatccctatggactgtactgcccccttctgccagaattatcttt

SEQ ID NO: 731166 - DNA, 632 bp, Homo sapiens
acacttgtggacttaatcttaggtgtcaatttaactggattaaggaatgcctagcgacctggtaaagcattattttcagtgtacctgggaatttccagaggagattagtgtctgagtcttaatggattgggtggggaagatctgccttcaatgtttctagtttttcaaaggtcatcaaagaaatgaaaatgcaagcaaaaaatatgaggccgggtgcggtggctcactcctgtaatcccagcattttgggaggctgaggcggacagatcacttgaggttaggggtttgaggccagcctggccaacatggtaaaactccatctctactaaaaatacaaaaagtagccgggtgtgggaatgtgtgcctgtaatcccagcttcttggaagcctgaggcaggagaatcacttgaaccygggaggcagaggttgcagtgagctgacattgggccactacactacagcctggacaatagagcaagactccatctcaaaaaaaaaaaaaaagaaatctttcctgccagattattcagttgtgtactactcctgccccttcacacataacaccatgcttgcctttttaaaaatacgcccttcatcagagaacgaaaaaaattcaagttcagagatcttct

SEQ ID NO: 731167 - DNA, 573 bp, Homo sapiens
tgatttaggatcccatgaagcatccacttttcctccgaatgctattgattgaacgatatgagcctttttatggttaaaaatggtaatcattgatcttctttctttttctgtaacttctgataaatgcaaaaagtaatgttattgcataacattataaataggcggagtgattcaaaatagaactgaacactttcaagaatgtatttatctaaactatgatayatgagaacatcctgtcaaaactgttttgtaaaggggctatcacgcttatttccataatcttacaagcactcaatatacaccccacatgtcacaagacagagcttaatccttcaatctaatgcatcccaaacaccctttaacacatcaccaaggatgattaaaattttagcatgaaacatcctttcatttcctcaaggctattagaaaggagaggtataaccataagtttccgatgtatcctatagaaagtggttactcagtaataaactattaagaatgttcaaacctgcagagacagaaaggtaagtagatagataatatagcatttgggggcaaaataggcctcaaaaa

SEQ ID NO: 731168 - DNA, 475 bp, Homo sapiens
ggccatcacacccggccacacccctccctttctggcaaggatccccaccccaacatatacacacttagtctggtgggaggagagtcctacactgggcctcaggggacatggtcgacattcctccaatgtgtgattttgcaagtgatgctctctcctgcctcggtttccccatttgtccaaggaagggttgctttgatgacgcagcccagctcctctgggactttgagagcacaggctgccaggcatggtggctcacacctgtaatcccagcactttgggaggcttctgaagcgggaggactgcttgaggcyaggagtttgagaccaccctgcaccacatagcgagaccccatctctactaagaaattagctgggcatggccgggcatagtggctcatgcctgtaatcccagcaatttgggaggccaaggtgggcagatcacctgaggtaaggagttcgagaccagcctgctcaat

SEQ ID NO: 731169 - DNA, 643 bp, Homo sapiens
ggtctcactgtgttgcccagactgatcatgaactgctgggttcaagcaatcctcccccacctcagcatcccaaagtgctgtcattacaggcatgagccaccatgtccagccttttcttctttttttaagtttccttgttagtagacaaggatagctttctttttctttttcttttttttgagacagtctcattctgtcaccaggctggagtgcagtggtgcgatcttggctcactgcaacctcggcctcccgggtttgagccattctcctgcctcagcctccctagtagctgggactacaggcgcctgccaccacgcccagctaatttttgtacttttagtagagacggggtttcactgtgttggccaggatagtctcgatctcttgaccttgtgatccgcccgcctcggcctcccaaagtgctgggattacaggcakgagccacagcgcccagcttctttttcagaaagtatcttagtgaggtgaagggcacataacgttaatttaatcactgcatagaggccctagtacatttacaatgtcatacagctaccacctctaccatttccttcctttttgttgttttttactgtttcttggtcaggtgaattccaaaacatttccatcacgcagttcctcacca

SEQ ID NO: 731170 - DNA, 643 bp, Homo sapiens
ggtctcactgtgttgcccagactgatcatgaactgctgggttcaagcaatcctcccccacctcagcatcccaaagtgctgtcattacaggcatgagccaccatgtccagccttttcttctttttttaagtttccttgttagtagacaaggatagctttctttttctttttcttttttttgagacagtctcattctgtcaccaggctggagtgcagtggtgcgatcttggctcactgcaacctcggcctcccgggtttgagccattctcctgcctcagcctccctagtagctgggactacaggcgcctgccaccacgcccagctaatttttgtacttttagtagagacggggtttcactgtgttggccaggatagtctcgatctcttgaccttgtgatccgcccgcctcggcctcccaaagtgctgggattacaggcaggagccacagcgcscagcttctttttcagaaagtatcttagtgaggtgaagggcacataacgttaatttaatcactgcatagaggccctagtacatttacaatgtcatacagctaccacctctaccatttccttcctttttgttgttttttactgtttcttggtcaggtgaattccaaaacatttccatcacgcagttcctcacca

SEQ ID NO: 731171 - DNA, 618 bp, Homo sapiens
aaatggagatatttaaacctttgaatcaaatacttttagaaaaaatgcaaaaatttaatagtttttaaaaactattaaattttaaaactgagttattttaaaacgtaaaattataaaaagttataatttaaaaaatattttaagcaatattaaaatacaaatctttgggcacattcttttcttgaaggacacaactgttattatattatttacataaatgtatatttatatgcaaaaagtcttattaataatttctttagtgttatagcatttatacattttctcacatattaaaatcgttaatctcttaaagatgtttgytttttgcaatatctctgaacagatttgtagacaccaccacaaaatatttcatacaatgcaacaaaagtttcttttatatgctcagttatggtcaagagaaagtaaggaaacttggaaggtggggttattcacagcataagtcttttcgtttttaaaggcctttgagagttaagtccagaaaattctcaggtaaacacaagtggaaattaacaacttaagaataagtgattgtgaaaagtgataggataataaaaaatatcttttagaaattaaagttatagactggtatagaagatg

SEQ ID NO: 731172 - DNA, 585 bp, Homo sapiens
aattttaaacaactattaacatttgatgtaacattgttagcaatattttatgtatgtagttattgttacatgaaaaatacaaatagaggatacattttcatttttatttcctttaagacttttaaaattcaactagtggagcaggtacagtagcttatgcgttcaatctcagtgttttgtgaggtcaaagtgtgaggattgcttaagcccagaagttcaagaccagcctgggcaacatactatgtccctgtctcaaccaaaaaacaaaaaaagtgaatttgtgggttataaattcaaatcaagtgacaaatgattgatgggaaaaaatgacgaagatatataatattaggaaaagagtaaagaaattttaaaratgtccatacaaacaaactcaatgctcttaggaggtaaatgtgagttgactttggtacaggtaaaaagcaatgctttcactgtctctagtttattgtcattttgattcagtaaaccatatttttcccaattccattccataaaaattaaagacacttctttaacatagagaaagttacatagtaaattatcataattaattttaaaataata

SEQ ID NO: 731173 - DNA, 563 bp, Homo sapiens
aggctggtaccatgagtcaaaggaaacctgccaggctgagtggacagaatgagtccagcgggcctgagcagaactcgggcaaaggtgtcactggccacagaggtttctggccagaaaagcaacaccctaaaaattctgtgacaatatgaagactaagaaacattmaatggatttagtgacatcaaggatatttgggaccttggtaagagtagtcttagaggagtcatggggatgaaaacctgatcagagtggattcaagacagaatgaggtacacccatgtttctggcagcattattcataatagtcaaaaactagaaagaacgtgaatgtctatcaatgagtgaatggctatgcaaaatgtggcatatacgtacaatgaaacactattcagccttaaaaaggaaggaaattctgacacattctacaacatagatagaacttgaggacattatcctaagtaaaataagccagtcacaaaattataaatatggtaagattccactcatatgaggtacctcgagcagtcaaattcatagagatggaaagtacaatgttggaatga

SEQ ID NO: 731174 - DNA, 612 bp, Homo sapiens
ttgttcgggctcttgaagctggtgcattccctattggagttgagaggggtctggcatgactgatctcctctctacaactgcccaaacttcgctgagcattctttatttttgcccccttcccctagttcaaatgttttattgttktagtcatcatctgaatgatatttatttgtttacttgtctgcctcctagactctgagcatgtagggataagacagccaactctcattcatctttggatcaagggcacctagaacagcatctggtacacacacacacacacacacacacacacacacacacacacacacgcacagatacacacacacacagagtaggcactcaacaaatactggataaaagaaaaactgatagattaaattgacaaaattaaaaccttttatccataccaaacaacataaacaggatacaaaggcaaatgataaactgagaaagatatttgcagtgtattaagatctcttatgagttgttatggtttgagttgggtctgtcaaaagatacgttacagtcctaacccccagtacctcagaatgggaccttatttggaaatagagtcattgcagaaataattagttaagctgcggagtaggg

SEQ ID NO: 731175 - DNA, 514 bp, Homo sapiens
gagcgtctctgttgcccattctagagtgcattggcatgatcacggctcactgcaacctcgatctccctggcttcagtaatcctcccacttcagcctcccaaatagctggactataggcatgtgccaccacactaagctaattttttttttttttagtagagactaggtcttgctatgttgcctaggctggtcttgaacccctgagctcaagtgattctcccgccttggcttcccaaaatgctgtgattacactgaacccatgratacatttttctgtatctaatgctactgttaagcccatctattgagtttttaatttgagttattgttttcattcctagacattctagacatttctaaacatttagttctttttcaactatgctagatcaccttttatattttctatatctgcagaaattttttcaagcttgtgtctaataattccaatacttcaattatttgtgggtctgtttctactttctattgttcctgttcttgctcatgatgcctc

SEQ ID NO: 731176 - DNA, 604 bp, Homo sapiens
gtgtgatttacatctggtaagattcaccttttatagttctatgagttttgacaaatgcaggtgggtaaccaccaccatcatcaagatatagaaccatttcctcacctcataaagtcccccagcctcctttgtaatcaacttcttcccctgactcaatccctggaaaccactgctctatttttgtctctatagttttaccttttctataaggtcttataaatgtcagattcatacatatatggcattttgagtcttctttcactttgtaaaatgcatttgagattcatccacattgtatgaatcagtagtctgttcattccttttttatcgctgaatagtatttcattatatggttgtagcacaatttgatccatcattcactgaaggatatttggggtgttttcagtttttggtgattcccatcggcaatataagagatttccatatctctgmattcaccagcacttggtattatcggtgttttttttttaaaaaaaacattcaaatgggtatgtgctggtatctcattgtggtttcaatttgtatctcccttaggattaatgacattgagcatcttttcatgtgtttatttgccatttgcatc

SEQ ID NO: 731177 - DNA, 632 bp, Homo sapiens
tcctgaacaggtttctgggttctcagtgagatgcagtgtgttttatagatgagcttagggaggtggtctctgatttatatagggcccaaagactggttggaccaggtgtatcatatacatagcctgcaaagaagctggacatattccaccctaattttttattacgcagatggagtctctacctggctggcggcatgttgcctgcttttttactgcacacacgtggcaacaaagaaaagggaagagggaacctccatgttgaatacacctggcccccaggtagtcttttcctattggcacagctgctggcatttacctatgcaagcttccagcttgcttatctatgtctgtagctcaattttacaagctggtctttgttagaaaagaaatgatttgggggctgctttttgttaaaagataattccactragaactctcttacccttactaaatacctaaataatttttgtttttttttagctcctgtatcactggttactggcccgtgtggttaggtttaaatggcagggttacagaaaatctccagaagggccagtagctattaagggattatgtctgctttttgagtactgtgcttacaattttagctgttaatgactaatgtttctcag

SEQ ID NO: 731178 - DNA, 578 bp, Homo sapiens
atccctgagacaaccacaaagtagagcatagacacttgcatatctaacaaccaagaacccaactattgaagagcaaatctgaaggtttatggttagtactaatagtactaattgatcattttttgtaggaaactaactttgaatccaggctttgaggctgatgtgagggttgaagtatttagctaatgggtgagttgacccatcctattcatakctctacaattcctttttttttttttttttttttttgagacacagtcttgctctgtcacccaggctggagtgcagtggtgtgatctgggctcactgcaagctccgcctcccgggttcacaccattctcctgcctcagcctcccgagtagctgggactataggcgccggccaccatgcctggctaattttttgtatttttagtaaagacggggtttcaccgtgttagccaggattgtctcgatctcctgacttcatgatccacccgctttggcctcccaaagtgctgggattacaggcatgagccaccggaccgggccctcatatctgtacagttctttagagtgtacatcagtcctcacgaagta

SEQ ID NO: 731179 - DNA, 525 bp, Homo sapiens
ctcatggttctgtggattgactaggttcagctgggtggttcttctgctcaattgcactggaacatctaaatggttcactcaaatggctgatacttgatgctgcctattcgctgggacagctggggctgtcatctaaaagtgaacatccatttagcctctgggttctggaggaaagtgtcccaagtgtgagcatttcaagagagaagcagcagtgcttttaaaggctgggcctagaactaccacaacatcacttttacatcactgtattgattaaaccatcatagggccagctaacattcaaggaggaagataaataaactccatttcttgattttttagagygacaatttatggctatctttaatctgtcacaacttgcaaatgtctataacaaaatatttctcttgagctccagactggtatactctactgcctgcttgacatatattcctggatgcttcataggcgtgagggctgacttcatggcatgtgacatgtgcagtcgcacaggacctcacgttttgg

SEQ ID NO: 731180 - DNA, 599 bp, Homo sapiens
tgtgttaaaatttgcattcatgttgcaagagcaatagtggataacattcctggtgccttaacacaaataaaggcaatggcaccaaacttactggcagtcattatttttttaccaccattcattcacagagagggggaaaagacatacaaattttttattaaatctcaatctttgagttcatgcctatttaatagtgtttgtgaagaaacaagaagtactcataaagaacatctactaaatatcaagataggatagttatttcaagaaaatgcactggtacgattgtttcagttgcaagctgaacttgccacattattattattattgtaggaaactggttttacttgaaagtggctaaaagacaaaaactatgactattcacacttaggcagtagacamattttcttgaaaatggaagaagtgagtttgtaacttcagagaaaataatgggcaggtgtttgttgtcaataataaagtttaagtgttcaagagataataatattttgtaaaacttgtatccaccactttttggtacttaaagtcttttctgataagattggaagtgatattagtagatgtgatttctaaaatgtataatg

SEQ ID NO: 731181 - DNA, 640 bp, Homo sapiens
attgatttaggaattggcaacctcagacaaagaaacttggctggatgtttctgagtgaatggagagagttccccactcctctaagacagctggctacagccagctatttctgtctttctgaataggatggtatgtgggtatgggttttgaaactgtggagccatttatgtagccttagaatgaaggtaatactatgcaaatcaatatattaatggagacaataagtatcttaaatgacacccttgagctgttgagtcaacccaatatytgaagcccgatctacctctgcatcatccacgtatataagccaatctctttttccttaagctagtttgattttcattctctgtttcttaaagaaaaaaacagttagtaaaatgaaaactagtcaccagatattaatgtggtctttttctcccattttatattcagatgagtgtagactgctttgcatacattgaacctgtgcccaaatgccccttcctgttgtttaactttggtgaagaatggtaatacttgctctctgtctttatcttaacgttataagacactgaaggtgattaggtttttaaagttaaaaaagtgaacatcatgaaatccttccatttgtgataaaagggttataaaatatgctcaaaag

SEQ ID NO: 731182 - DNA, 553 bp, Homo sapiens
agggaaaaactcctctcgggttagccctctttagtaccaagcagaagagaaatggctcttcttgaccattgggtcacaaataagtcagtttatgagtacaccttcttcaagatttggcttattaaatagggtactcccagagaaaagcaaagtgcgaaaaccacgtttccactccacaacagagattccatcagtgtctgccaccaaaactctcagtagccttaaccccaagtctgttggtctattgattgtctcccaggygttaccaaaatgaaatacctaactgtgcttttctctggagtatttaacagcaagattaatttatttgttaaacctctttaacaaggagctgtggaggatggggctggggatgtgagctccagtggccattttcccagaaccctctactccatatcctgatttcaaatttttatgaaataaatatgtattaaaggtgcctagaaatatattatctcattatcttcaggctcattatctgctttcctctgacttctgagctttcccaatgtgcaataatgagatggaaattaat

SEQ ID NO: 731183 - DNA, 634 bp, Homo sapiens
gaataaatgaatatattacatttgtgtggtggatgtacactaccttgaaaagaatgtaaaatcctaagtggtaaaaggaaagaaagtggcagtactttatcacatggaatcagctagtgtttacttgaacaattctgtggatgggagttctgctattggctaatgtcattttcatcaaggagaataatcttcatattgcagtacagtgaaaaagttatataaaaatagsttttatgattgtttaccattggggattatattttataattatattattaattattataattatattaattattattataattatattattaattattattataattaattattatattattaacatggtgtcaaagttgaaatcttgcaaatatcaaagagcagaaaaactccaagccatagaattgacatgtgactatgacaaactctggtcaagttcttaaatggattaataaacagacactttatgaatctaagaaaagaatgcagtgattatagaataaatttactagaaactaatgccagatcagactcagttcctttttaggcagtgtttatttgactagaaaatctggggagtgctctactctagatatattatagcttgattttggaaaagcatttg

SEQ ID NO: 731184 - DNA, 509 bp, Homo sapiens
acccccctgtgatattgttcttcatatccaggggaggagagaatattactcctaataccgcaggaaatgtacaacacccccccccatgatattgctcctaatatcgtgggtggagaggaggatattactccctgtaaagcaagaggtgtacatcccccttgtgatattgttaacaatattcagggggagacgatataatgtcaatatctcagggggtgtacacccctcgtgtgatattgttcctaatatccagtggaacagaggatgatattaatcccaatatcgaagggggtgtacatcctccctgtgatattgttccttatatgtaggggggragaggatgatattactcccaatatcgcagggggtgtacaccccccgtgtgatactgctcctaatatccaagagagggagtatgacattatcctcaatattgcaaggggtttacaccccctttgtgatattgttcctaatatatgcagggggagataataatattactccgaata

SEQ ID NO: 731185 - DNA, 650 bp, Homo sapiens
ctttatcttttcttatagcattattaagtatgcacatattcatcaacgtgattgttctctagatgtcttcaagatttctaggctatatttcagtctgaagaaagaggacctatagaaaaatgacataaaatataagaaatcattataattctggaatatatgatatactctggaatacctgagatggtctcagatatgtgtcacattttctcatgtaacataatttagcaaagaattatttactcccataacataggacaattacttcatattgctgactctcaacagcattttaaggtattcgatgccaaagagtcacatctttcagtttttctgacttcttcttgcatgtgacacatgtgcaatcttctcaaatcttttctagtatgaggaagagtaaaaaataaattttaacyactttataaaaatgtattgattattttatatgtcagagtttcagtggaaacaagatagttaggcagtttctgcttaggttaatgttttgtcaatttctccattcctccattctatcctacaatcaaaccattccttctggtctaggtgccattcatttgggagagacaaagagtgtcttgtgtaattcaggaatccactaatatggtactttccaaaaaaaaaaatgatacatg

SEQ ID NO: 731186 - DNA, 660 bp, Homo sapiens
ctgggatccccaaagggccgcagctcttctctcctcttagtcacccataaagtggcaagttgtggcggggtgctgtttcagccctgtttgtcttacagctcttctccccttctccttgtctctcgcaagtagcaaagagcagggaggggagcatgtctcagccctgttggtgttacagctctttttgtcctgccattcggcagatcctgagttcttgtcctgtgcccaggaagaattaggtacttggacaactggagggcgagcaagggagagtggagctttattgagcagcagaacagttcttgggagaggagacctgcggtgggtatctccttcccacaagmagatcatcccgacgagtggaggacacccgaagagaaaagctccttcccacaactggcagtcccaacttctgtgtgaatctggctgagtccggggttttcatggactcagatggaggaagtgcatgctgatcggtctatgggcgacgatgggcaggcccagaaaaagcaccgttaagttctcactcctggctgtggactccaccacccggaacttacagcctggctcccaggcttcagctgtccctggcttgaaggtgaggcttcaccagcgacctgcccctttccacccaggagcctgtcttccatcatcatgttg

SEQ ID NO: 731187 - DNA, 660 bp, Homo sapiens
ctgggatccccaaagggccgcagctcttctctcctcttagtcacccataaagtggcaagttgtggcggggtgctgtttcagccctgtttgtcttacagctcttctccccttctccttgtctctcgcaagtagcaaagagcagggaggggagcatgtctcagccctgttggtgttacagctctttttgtcctgccattcggcagatcctgagttcttgtcctgtgcccaggaagaattaggtacttggacaactggagggcgagcaagggagagtggagctttattgagcagcagaacagttcttgggagaggagacctgcggtgggtatctccttcccacaagaagatcatcccgacgagtggaggacacccgaagagaaaagctccttcccacaactggcagtcccaacttctgtgtgaatctggctgagtccggggttttcatggactcagatggaggaagtgcatgctgatcggtctatggkcgacgatgggcaggcccagaaaaagcaccgttaagttctcactcctggctgtggactccaccacccggaacttacagcctggctcccaggcttcagctgtccctggcttgaaggtgaggcttcaccagcgacctgcccctttccacccaggagcctgtcttccatcatcatgttg

SEQ ID NO: 731188 - DNA, 507 bp, Homo sapiens
tgggaaaattaacagtgaaaaatatcagttctccctcaaatctatcagcctgtttatctatctgtccctatgtatgtatgtatgtatgtatgtatgtatgtatgtatgcatgtatctatctatctatctatctatctatctatctatctatctatctacctctatccatctatctatctatctatattagctaaactcaaacattgattattttagagttgaggaagagatttagagagatatttatgtataagaataagtgagacygtagccgggaaatatttcgaaaaaaattaagactgattttggagggagagcacagaataatttttttaaatggcagaacgtttataattaaaatattctagtgttgatatgggcccagtacaaaagaatcatagtatacaataaagttcagaaaaagtatgtgtgtgtgtgtgtgtgtgtgtgtgtgtgtgtgtcggtattatttcagtatttgattcgagtgtcctttcaaattacttc

SEQ ID NO: 731189 - DNA, 502 bp, Homo sapiens
ggagattttgcactagccccatgcttcctaggtctccaggagcaggagcttgggcctggatttgcaaagcttgtgggctgcgcaaatgcactatgtaaaaatgcagcacactccttgagaaagtccactattaattcttagtaatgaatccacatcaaagtgcaagggtggaaacatgcacaatgatgcttagagcatccgagattgcttttcttttctttctttctttctttcttttyttttttttttgagacagtctcgctctgtctctggaatgcagtggcactatctgggctcactacaacctccatcttctgggtacctagattcagtaacagtgtatccacttagagacctcctctcttgcctttcctcttcccactatttgctgtgggttgggcctgctgaggtgcgcatgcctcaggggcttggccttgccttgggcacgggagagcacgtgttggagtgggggcagtaggacggggtggggggagtagggcgg

SEQ ID NO: 731190 - DNA, 345 bp, Homo sapiens
acagcacgtgaagaagcctctctgttccttggagtcattcctccctcgtgggggcggcaaataggaaatcatcaatgtgttgtaatagcacataattgtcactaggtggcgcaaaagcctcaagatctgtagccaaggcctcctcaaaaatggtagmattcttaaacccttacggcagccttgtccaggtatattgcgattgccccctctgactttggggagcaagcttcaaacaaaagaaggcatcctttaagtccagacatgtgatccaagtggcatcagcaggaatctgtcccaacattgtgtatgggttgggtactgttgcatggatagcgacagtggcct

SEQ ID NO: 731191 - DNA, 541 bp, Homo sapiens
ggggccacttctgctccacagagccttgtaactacacagccttcctaccactgaccccaataagcccaattacgaagaaaaaccctgaagagcctggtgcagtggctcctgcactagtcccagctactcaggaggctgagatgggaggatcacttgaacccaggagtttgaggctgtggtgagctaraatcacatggcagcactccagcctgggcaacagacagaggccccttttctttaaaataaataataaaataagaaataaaatgaaaatgaaagaaaggaaagcgctaagagagtctgtcatgaggaagggcatggagatgtcttttgagggtggacaactcatgaatccttaatttttctagagattgtgtgtgtgctcttaagtgatgttatatactttattttgttttttaaaaatatttttaaaaattttatttttaaatgttcttttaaaaactttctgtatctatttatatctattggttatttgaggattttttggcagcatatataaatatgcagaccctttgagtct

SEQ ID NO: 731192 - DNA, 605 bp, Homo sapiens
ctttacactgggaacacacaggtgctgtgaaactggactttgatttttcccgtgagaggaaattctgatggaactatggcacttatcttagcaatcacttcatagtgcaaccttggtgctcacaattaaccactttttttttttttttgagacagagtctygctccattgcccaggctggagtgcagtgacacgatctcggctcactgcaagctccacctcctgggttcacgccattctcctgcctcagcctcctgagtaactgggactacaggtgcccgccaacacgcctggctaatttttttgtattttttttagtagagacggggtttcatcatgttagccaggatggtctcgatctcctgacctcgtgatccacccgcctcggcctcccaaagtgctgggattataggcgtgagccaccccgcccggcccacaattaagcatttttaatagcaaatgaaaagccttgcatttctagagattgctcaaaagcaaaggctgtattgagaagaacttaatgctttttaaaaagtgggcctggcctccttcagctctcccatttttctttttcttgttttctattctggcagttgcacgggaaga

SEQ ID NO: 731193 - DNA, 521 bp, Homo sapiens
gttaccacactgggcccacaattcaagtctcatgagcctgcaattcatgcccaccaactgccgcttcatccccttaagctatctttcagggcaaagagaactctaactaaaaggatacaatagcttgattgccaaacctgcagcgacsacttctgtcaaaatatttaccccttgtggcccttggaagataatgtgctaagtgaactgtagagttaagatagcaaggtgtggggcaatactgacacccacttgcagataggtcagaaaatttctgttgtgcaacattcactccaacacatagttcacttgagcattatcatgatccagttatctggcttgtttgtgcaccctggttgatgcaaaggagaactcccacatagttctctaagtataattatagcaaatgtacaacatttgattaacatggcaattgattctattcatgaccctcagtcactgctggctgctgggaaaagactgagatacagaatgattttaaagatcaataaaattcttctcct

SEQ ID NO: 731194 - DNA, 536 bp, Homo sapiens
gcggccgggtagaggcgctcctcacatcccagacggggtggcggggcagaggcgctccccacatctcagacgatgggcggccaggcagagacgctcctcacttcctagatgggatggcggccgggaagaggcgctcctcacttcctagatgggatggcagccgggcagagacgctcctctctttccagactgggcagccaggcagaggggctcctcacgtcccagacgatgggcggccaggcagagacgctcctcacttcccaaacggagtggcggcygggcagaggctgcaatctctgcactttgggaggccaaggcaggcggctgggaggtggaggttgtagcgagccgagatcacgccactgcattccagcctgggcaccattgagcactgagtgaaccagactccatctgcaatcccggcacctcgggaggccgaggctggtggatcactcgtggttaggagctggagaccagcctggccaacacctgaattgatttttgtataaggtgtaaggaagggatccagtttcagc

SEQ ID NO: 731195 - DNA, 536 bp, Homo sapiens
gcggccgggtagaggcgctcctcacatcccagacggggtggcggggcagaggcgctccccacatctcagacgatgggcggccaggcagagacgctcctcacttcctagatgggatggcggccgggaagaggcgctcctcacttcctagatgggatggcagccgggcagagacgctcctctctttccagactgggcagccaggcagaggggctcctcacgtcccagacgatgggcggccaggcagagacgctcctcacttcccaaacggagtggcggccgggcagaggctgcaatctctgcactttgggaggccaaggcaggcggctgggaggtggaggttgtagcgagccgagatcaygccactgcattccagcctgggcaccattgagcactgagtgaaccagactccatctgcaatcccggcacctcgggaggccgaggctggtggatcactcgtggttaggagctggagaccagcctggccaacacctgaattgatttttgtataaggtgtaaggaagggatccagtttcagc

SEQ ID NO: 731196 - DNA, 662 bp, Homo sapiens
gaaaaaaaagtatttttaaactgaattttgatgagaaatacttgaaaaaagtagtcatgtataacaatataatttcataaatgttatgctttacaaaaggttcaatgattcaactcaaggaaattgccatctttatggatagaagcacatctatgtagcaagagagttgtaaatatgaatttcctatttggaaagagtttgatacaccaaagagtgttatcaaagttaacagtaaggggaaaagaaaatatgcattattcagaatacatactcctcagtctcctaaaggcctattggttacaaaagtgttgtttaggatctcagaaagagaaagtttgttttagataaaacacgttctcttgtaggcatctaaagagtgaccaggagtgacagacagtcaaaaawgttttctactttctcaaacaagaatttaaactgtcaatggttcactgagtgattattttcatgtcttgtccatttttcctttgcaatcttgttttcatgcaatgaaagctttaaaaattctatagaattctttttattttgaggacacaaaagaaagcttaggcatttacccttctgaaataacttcaaaatacatcttcttcctccatggtcaccctaatttttttttattttgaaatttggacagtttcttagaa

SEQ ID NO: 731197 - DNA, 669 bp, Homo sapiens
tgccttctcctgcacgggtggtgtggataatcctccagggtccttggccgcagggcagataatctcttcggggttatctgttaattaccagtgaatgtgtgaagtatttgtgcaaaggcttttgaagtgagctccacgcactgttgcctgggccgccactggccctgcttcccaggcagagggtttcgaggcccagcttggttcccctcaagtgctggtggtattctcttgctaaattgtttgcctttctaatgaagtgaactgtttgtttgactctgcggtagaaggtatttaactggggactaaagtaaacgttgaagacattcaaataagccatgcatatctgctttgtggagggaaggaaaacagtttggcctcactcacctccgggaagaatcgttaaggaactgtttaaataataaactgagccgagcgagcggatattgctgcagcccagtctggggcttttgtgctagtcctggckggcctgggaattcctctgtagcagccacgaggggagaagagagcggctggattcttgcagttagtaattgtgatttatatatgtgtagagggacttctgctgtgttcggtctaaacaagcccaattagccctcaggacagcaggccggtggatggcgactgtgttagcacagtgtgcgcaggccc

SEQ ID NO: 731198 - DNA, 619 bp, Homo sapiens
ttggtggctggggcctcaaactcatggtgaagagcttgggctggagtggggaggctatcttgggctactatacattttgggagaagggagggatatggttcagacttggttttagggatgctggtgtggggagtatagtttagataagctatgataaaaagccttaactctgacattgttgtgtcaggaagtggaatgtctaagagccctggttctgaagtaagaaagacacacagctctactactgtctccccctgtaacactggagaaggtcrgtttccccatccataagaatgggcgtatgaatagtacctgcttctcagggtcaggccccaggaagaaataaatgaggtgaatctaaaaggcattgcacattgcttgacctgcattaaagtattcagtgacttgcacttgtgctcatcaagattgttttattattttttattaattactatttatggggcaaaccttggaagacctttagttgttgattgacaggaactgcagatggagtggatggtccagataaaagaagcagagtcaataatccttcagagcttcttgcctggttttgagcaaaatgaatgtgcctcattcatttcttaattgctacaaagtt

SEQ ID NO: 731199 - DNA, 603 bp, Homo sapiens
ggccaaaagccacctttgctcacatctgggtatttcctctgctcagatagtcttttccaggttcatggataagaagtatgagcacatagtataataactgcagaagtagaagtaaaagattatttactttgatctaattaaagatgcatagggttttaaatggtatgtttagggcttagtgatatmtttccacctctgttttttctttagatataagataaagacaattttattaattgtataactttatctttgagaaatgtgaacttagttttatatgcctggttaatatgaagcattaacattactagaaattgtgtacacatgaagaagtaggagatgtgttgcgtcctggattgagtactaaatgtatttcttccaggctgtctttttactcaataatgtgaccttgaactagatgctttgattctagattttttcttctgtagggcagagccaattatacgtatttttcttatgtccctgtggtgcttagagtgagctcatgtcaaaccgctttagtaatttaagaatcagaatagtgatgagtatactccttttatttctttaatccataaacacaattttccaggccattgattt

SEQ ID NO: 731200 - DNA, 603 bp, Homo sapiens
ggccaaaagccacctttgctcacatctgggtatttcctctgctcagatagtcttttccaggttcatggataagaagtatgagcacatagtataataactgcagaagtagaagtaaaagattatttactttgatctaattaaagatgcatagggttttaaatggtatgtttagggcttagtgatatatttccacctctgttttttctttagatataagataaagacaattttattaattgtataactttatctttgagaaatgtgaacttagttttatatgcctggttaatatgaagcattaacattactagaaattgtgtacacatgaagaagtaggagatgtgttgcgtcctggattgagtactaaatgtatttcttccaggctgtctttttactcaataatgtgaccttgaactagatgctttgattctagattttttcttctgtagggcagagccaattatacstatttttcttatgtccctgtggtgcttagagtgagctcatgtcaaaccgctttagtaatttaagaatcagaatagtgatgagtatactccttttatttctttaatccataaacacaattttccaggccattgattt

SEQ ID NO: 731201 - DNA, 625 bp, Homo sapiens
taatcaggaaggaaagctttgagaccaaacactctgtctatgcaacaacatacagttacaatagaaaattcatgtttatttttcacatgacttcttttgctaatgaaagcacacattttcctaaagccctcttacccaaagaatgttgtggctgcagttttcttgtaaaatataatatgattttttaattaaaaagttttaaattttgcatacacatatacacacacacaccttggtttatctctccaaaatcacatcctagaagtggatttgtgaatcaagacatatgcacacttaagaaagcacatctttaatcaaatggccctccaggaaaattgtaccaatctatgcaaacaataggaaatgaactccaatatttgaaatgagagaaatagttacatggataaattatattcaaaacaamcaatatttaacacatatctaccatgtacaactccaacttgtaagacaatagggtctagttatcttggtttaactttagagcttaatggcatggggtggtttgtattctcttgcttcccagaaaaaagcactaagtgtgataggatcaatggttgcgattgcaggtgtaagctgggactaaaactttcatcctctgtgatac

SEQ ID NO: 731202 - DNA, 613 bp, Homo sapiens
tgaatcaggtcagggtaacagggttagagaggaggagcagatctaaaatggatattagggtggtaaaactgatggtcagctgagactttggtgctattgatcaaagtgtggaataaaaaaatagctttagatgtactaaacttgagtttctatggacattgagagagacatctaggctagaaacagaccaaagaccctcacagcaggtgatggggaggactatgatagcatttactgagcacttaatttatgtcagcctctctgctaattgctttgcatttatcaggtcattcattcttgccctgctttattcttcatagctcccatcactgttatgtattaaataattcattggctcattagttcagtgtctgccccacaccattaatagaagtgcaacaatgatgaggatttttaatatgtcttgtttattcctgcatrgcatatatgaggtattcaatacttttgttgaataaataagggaagctttgtgataactgtatcaggtagggatgattattttgcctatttgatggatgtgaaaactgaggcttaagagattacatctattgtcccacatcacatggctagccagaacaaatatagatcttca

SEQ ID NO: 731203 - DNA, 685 bp, Homo sapiens
atataaggcaaatgttatgtataattaaaatatcttgaaaaatctcacaatccatccataggttcagaaagtattgttttgtgggcataaccccagaagaacatcaggttcgcatctatttctctattcttgggcatacgcattgagtgacaggtggtatcacctacggcattgtyatgttctctctttttctcaagtgcatagagttggagtcacgtgagttgcatgtgtatatgacgtggctacattgtatgcgggaaggggaagcatgtccatgtggcatcttgaaaaaactaatcacacaagggaaaggcagtatctgtcagaaaatacaaaagaaaagcatacctctaaaatagttttggtattgaaacacagaaaaactttttttttttttttgctgttgccaataatctgtctatctgagataaagccaaaaaattacaagagctaaagaagagattgacacaattcttgaaacacattttagaatatttctcaactttctaaacactttctaaagtgtttctaaatctggctcccagggcactacactagttctgctccgattgtactggtcattccctgtcagtctccgttactccttcgccctccaaacttctcaacctccaaagattgacgtctcactaggcttagcctttggatcccttcttttccatgtatt

SEQ ID NO: 731204 - DNA, 633 bp, Homo sapiens
gaaagcggaaaggaaattctcttgtctaagaagcaagttgggctttcgaaacaccaagtctgccacagacacctgatcctcaagttctattttcattcctatctggtcttcattgataagtgttttcaataaactggaaaataatcctgtgggctactggacaaatatccttcaatggagaacatctaagagttaataagacagaaatgacattggaactagaggagccaccctctgaaacatgtacaaccaatgaatgagatggttaatactgaggttgctgccactgcacagtccacaagaagttctcargaaagtttcaagaagaccttatgttttagagagttaagaaaatgcaagtattattactgcttgagggaagactatcttccaagcacaagattaattctgtgtggctttggttgccatgtggcagaatgacagtggaagatttcaacagtggtgacgttgctgtcctcctagaggaactaggccctggggtcaaatgattctactgctgacgtctttgccatgatggggctgctatgatccaaacatggcagcttttccagacacagaggacgtttcagtttggatttatttttttatgttggagtaatgattctttgcggg

SEQ ID NO: 731205 - DNA, 633 bp, Homo sapiens
gaaagcggaaaggaaattctcttgtctaagaagcaagttgggctttcgaaacaccaagtctgccacagacacctgatcctcaagttctattttcattcctatctggtcttcattgataagtgttttcaataaactggaaaataatcctgtgggctactggacaaatatccttcaatggagaacatctaagagttaataagacagaaatgacattggaactagaggagccaccctctgaaacatgtacaaccaatgaatgagatggttaatactgaggttgctgccactgcacagtccacaagaagttctcaggaaagtttcaagaagaccttatgttttagagagttaagaaaatgcaagtattattactgcttgagggaagactatcttccaagcacaagattaattctgtgtggctttggttgccatgtggcagaatgacagtggaagatttsaacagtggtgacgttgctgtcctcctagaggaactaggccctggggtcaaatgattctactgctgacgtctttgccatgatggggctgctatgatccaaacatggcagcttttccagacacagaggacgtttcagtttggatttatttttttatgttggagtaatgattctttgcggg

SEQ ID NO: 731206 - DNA, 592 bp, Homo sapiens
aaagcattcttcttaaagttatttactaatagaaggacattgtagaaatctgataccctgaagcagtccaagaaaaagtggcctgaaaaagagagaatgataagattaaaagcagtggaataatttagaaagaaatccaggataaaaaagggccaagtgagataaaaaggataaaaaattggcaattgcagaattaaaatctgtactagagattataaaggacaggatgggtattgaataaaattccacacagatgagagtgatacacttcagtagctcttccagtaaaaagaggaaatataccaacagtcgaatactcacagaggaaagatatagggttcacaaaatggaaagccaaactaggaattggagaggaaaccagactaattgtaagaaaactttcttgagctaaaagaaaccaccaaagtrtgcagactgaaaagggctaaacatgtttcaggaagtgttaatagaaaatatcccatatcattccaccatggtgagtttttgaattatgaagagaaataaaaacaaaataaaatagagctgagaagtatccacgaagaaaatttaaaaagacagtaacaagcta

SEQ ID NO: 731207 - DNA, 591 bp, Homo sapiens
ggcatagagttcaagataaagagaaataaaccaaacaacatcacctactcatgtttcctatcaagaattagatgacaggaaacaaaccacttagacaacagcaaaaggcactcactctagctctggtaattaacatgcccattataataattarcatattccatcttgaatacaaagggacaagctagaatcactaggcatgaggaaaaccaaagttatgaaaggtgaacaaacaaaaaaatagatgatatggaaaacagaaattattcagagcacaaaacagaaagtgtcttttctaagggcacgttgaaaaaatgttcttagaaatattttaaaagaacttaaacccaaagacaggaaggaaacagcaattgaaatgcttttacaaattaaaaatattagttaaaacaaaagtaaaaggaaggatagaagtttaagttgaagaagtctcattaaacacagagcaaagatatggaaatatgaaagaaaaaaagaaaaaaaaaaggacacaatagggacattaattaaaaagatccagcgtctaattaacagccgtggtctgcagtggcacagtcagtgtgtctctgttgt

SEQ ID NO: 731208 - DNA, 591 bp, Homo sapiens
ggcatagagttcaagataaagagaaataaaccaaacaacatcacctactcatgtttcctatcaagaattagatgacaggaaacaaaccacttagacaacagcaaaaggcactcactctagctctggtaattaacatgcccattataataattagcatattccatcttgaatacaaagggacaagctagaatcactaggcatgaggaaaaccaaagttatgaaaggtgaacaaacaaaaaaatagatgatatggaaaacagaaattattcagagcacaaaacagaaagtgtcttttctaagggcacgttgaaaaaatgttcttagaaatattttaaaagaacttaaacccaaagacaggaaggaaacagcaattgaaatgyttttacaaattaaaaatattagttaaaacaaaagtaaaaggaaggatagaagtttaagttgaagaagtctcattaaacacagagcaaagatatggaaatatgaaagaaaaaaagaaaaaaaaaaggacacaatagggacattaattaaaaagatccagcgtctaattaacagccgtggtctgcagtggcacagtcagtgtgtctctgttgt

SEQ ID NO: 731209 - DNA, 599 bp, Homo sapiens
tttgccactctgtccacatctgtaaatgaccatgaatgcacagagtattgacttgggagttagaaatacatttcacagagtagatggatttgaaaatatggaattcattaaaaatgagaatcaatggtacaaacacacacatatagtctgttgcctttcacttgtctttgtcaaattacttttacatatattttgaggagattttaggaaactataatacatcccatttagatagaaactagttgttagcagacatacttccaagagatgtagactttmagtttagttgagatgtgctgatttttgctgtgccaaaacaatttaagaaatttagaaaaacagacccagcaggcccacctacatgtgtttttagttgttatcaaggcagggacacacacagggcttttgaagactactggcaaaaaggcccttccccctacataaacagagatgaggaataaagtatattccactctaaagagttaacatgtttcctggttgaaaggtggaagataaatttctatatgacagagaaagaggcaaagcaaacctttgggcagcctgagttggtgctgaagcagcatccaggcccttgggtc

SEQ ID NO: 731210 - DNA, 618 bp, Homo sapiens
ctctggctgcagagagcttgacgtcatagttaggacattttttggtggcaaggaacagaggccaattcaaggtagccaggtgagtgatggtgctgtagggagatctcctttggggagagcagaactgagagcttacattgytactgggagccctgggagcaacctcttcacatctttacattctgatttctccatcctctcttcacgcatcccacccagcacacttattctgcctggctggtgggaaatggtggcccacagtgcccaggttcttcgttcagatttacagtcacctacagagactggttcttcctcactcccacctccaaagtcctggggtctaggaatgactctgtcagggttagatgtgaccagcatcccagccagaagtgtggggttgaatcgtgcaattgagggttgcaggtaagtcctgtgcataaggtggggtggcgggtgtcagattgggggtcactgtgaaccagtacacaccctgaaatcaggctgcaagctcggaaggaaaatggggtctgcagaaggagagtgttctctggaaatgagagttggggcttcttgggcccccttgtgggtcacagctatgggatttaacctcatgtggga

SEQ ID NO: 731211 - DNA, 629 bp, Homo sapiens
atttgactcagcatttctcctccggttagtgtgcctaagcttccaaggtctgacctagcagcatgtcaggaaccttgccacagtgttaaatcttgggtcagggggcagggctttcacaaagactaactcttccttattctccttgatctagcacccccaggatccaggcccatagatactctcctggcytctcttagtacaggttgattatgtcttatagctcttctaaggttgttctagtcacctattgttgcataacaaaccattccaaattcagtggagtataacaatggtctttcattattactatctttccacagctctaggggttgactgggcttggctaagcagtccttgttctgggtctcatgcggttaggagtcagacactggctggggctgggttcatcagatcactgcactattcttttatttatcaaatatttattgactctctattttgtgtgaagcgccgctaagcggtgaagatacaatagttattacagcataattctagtctccttgggacaggatgccatctttaagaatctcagtaggtggtaagtgctaaaaaatagtatgaaagagcattatggactcatggagtcaaacatggaaggcttcctggag

SEQ ID NO: 731212 - DNA, 646 bp, Homo sapiens
aaggggaagaaaggaccctggagaagattcccctcttagggtagagctggattgagagcgtttctgtctcttgaagtgaaagaacccctgataaagacctggatttggccacaggaagggcaggggaaggagtctactatcccgctgttatgacagcattttccaggttgcttagtggcagggatgggttgaggggtgaaataggagctgtggcagcacctcagagaccacaggtggcctacagagtcagtgaacccaagcagagragccatcagataattaacaagctgcctagttctccaagctggagacagacagctggccagggctgcaggagaatctcagtgcccctggagaggttattcccggcagggcccggcaggggctagtctagcttgcagccccatgtgggagccttccgggctctgctctcagaaactgccccatcctggagggcccagagccaaggggctgcctgctctgcaatacacattcctgggtagttacttgttcatggagacacgttgcatgagaggaggccttgccaaggagccggagccagggaaaatgggggccccacccagaagctaaggcaaacaaatcaggagcaatttaggacctacacctgcaaaatatgaactgttaa

SEQ ID NO: 731213 - DNA, 614 bp, Homo sapiens
gacaacaccacttctacgtatctaatttttgtctggggattttccccttcccctctttcagtccctaatgtctggaaagggttccaggcttgtcctaagagtgacacacatcactcaaagtccaattacatttcctttgtcacagtgctcaatgcattttatttatttatttttttctttttyttttttttttttattatactttaagttttagggtacatgtgcacattgtgcaggttagttacatatgtatacatgtgccatgctggtgcgctgcacccactaactcgtcatctagcattaggttaggacaaggctgatgagaccttcttttcagccctctacaaagccaggtcttctcctgggcttttcagttttgtcacccaattaatggctatgcttgatacctcagatttaaaaactttaccacggataagatctttacacagaaatcattgtcaggagtagagtatagtagagtatagtaaatattagatcttaaaatatgaaaacgctaggctgaggaagtagagtggaaggcactgagaacccctattcacagcttagaagttggcgttttatgttgtttggtagtgtagccatatcttacactg

SEQ ID NO: 731214 - DNA, 640 bp, Homo sapiens
agatgccactgggaatgcactggtgggaaaattcctgctgttccaaccccgaatcagcttgtttttttctttacactgtggctttagagctactgtcttttccctcaatcacgcccagttcccttcatcggtggtgttttacgttctttctctgtttcacttcatattccacacttgcatctttctcgagtgcagccccagctaaaccaataactgtggaagccaaatggagacrgtttgaactggaatcatttgccattcagctggaaaaataatgattccccagtttctcaagtgtggaaatttcccggaaccagccttttcccagggcctgtagaccctccctcattagttccggtgaactctccctccccctgtgtctttgcttatacccctcaatagtctccaggcttgattagctcacgctcgcctgtgcttcttttccatcacagctcaagctcactgcctttctttgcagcatttaacctctgtgaagagccgtgaactataatggctaaacgcagtggttcagtgtctggtgggtctgagtttcaacccagcctgctctgtgatcctggtcaagctactcagtctctaggaactgaagtttcttaacctgtaaaataggaacaataatagc

SEQ ID NO: 731215 - DNA, 586 bp, Homo sapiens
attttcccctataaacaacatttatatgatgactaatatattctttttttttttttttgagacggagtctcactctgttgtccaggctagagttcaatggtgcgatcttggctcactgcaacctctgcctcccgggttcaagcgattctcctgcctcagcctcccgagtagctgggattacaggcgcctgccaccatrcccagctaatttttgtatttttagtagaggcgaggtttcaccatgttagccaggctggtcttgaactcctgacctcaggtgatccacctgcctcggcctcccaaagtgctgggattacagccaacatacccagccactaatacattgttaagtatttctttaggacaactgtgaagttgttggatccaggtgtatattaataattaaaatgttagctatgaattgccagatgcacaccgatttacatgtcatccacataagtacttgtcataaatatgttaagaccttcagttctccttcctttaagtgacttggctctcctgaccctgatccttgtggattgatttataatgtaactcttaaaggacaacattatttgccagttctt

SEQ ID NO: 731216 - DNA, 641 bp, Homo sapiens
gttatgcctaggacaggttgtttacaagatacacagttaaatatcttttttgaaattttaatgtcttaggaaaaataaatactgcatcaaaactgcaattttgtggattttaaagtttgaagctaaactatcttaaaatggttgatttaagtaaaaacatcaaataatgcaggtggtgtgctgatatatcaaatatcaggaggagggcagcttgttgacctgtgggagctcactctggccacgcagcttcctcgtgtctccacacagcctgcactgccgacacctcacckcacaggaacccccagccttgcattttctcccatctgcctcacatgatgcagctcataggaccaggatcaggctcccttgtctttgaagcttctctgactcctcagggggagcagccccatgcctttggaaccccctgtggttttgtctcacatcctgttcaacagacagatgagcgtctttgttcaagtgacagtttcctctgaggctgcaagatccttcagggaggactcaggtcccctcactgtgggaagtcttgcttacttgactggtgccaggcttattatagaggctcaaacaaatttgtggaatgcatgagtgaatcaatgggtgcaataatgagtggatgagcg

SEQ ID NO: 731217 - DNA, 641 bp, Homo sapiens
gttatgcctaggacaggttgtttacaagatacacagttaaatatcttttttgaaattttaatgtcttaggaaaaataaatactgcatcaaaactgcaattttgtggattttaaagtttgaagctaaactatcttaaaatggttgatttaagtaaaaacatcaaataatgcaggtggtgtgctgatatatcaaatatcaggaggagggcagcttgttgacctgtgggagctcactctggccacgcagcttcctcgtgtctccacacagcctgcactgccgacacctcacctcacaggamcccccagccttgcattttctcccatctgcctcacatgatgcagctcataggaccaggatcaggctcccttgtctttgaagcttctctgactcctcagggggagcagccccatgcctttggaaccccctgtggttttgtctcacatcctgttcaacagacagatgagcgtctttgttcaagtgacagtttcctctgaggctgcaagatccttcagggaggactcaggtcccctcactgtgggaagtcttgcttacttgactggtgccaggcttattatagaggctcaaacaaatttgtggaatgcatgagtgaatcaatgggtgcaataatgagtggatgagcg

SEQ ID NO: 731218 - DNA, 663 bp, Homo sapiens
cttgattatttctggatacaaaaaaattattggttgtagttacctgcagttgaagaataaaagttgggttctggaatatggggcacttacagttatttaatagctaactttctgggcttgattttcttaaaaaaccatatacaggtttttactttttttttattattaaacaaacttaaaaaaagagagagagagagaaaaaaaaaaggaagggatctcaagcatcctcaggaactccagggaaaaatgactccagctggcataaacacctcttcatggcacagagcgatgaaactggacttcgctgaacctgagagcagtgtgccctttgcctctgcactccctttcctgagctggtgtatggaactgacttgctggagcagaacctgggygccactgtgttgcatttcctatcagcaaagagatcagagaaggatgctgtcctctttatcatgtctctcctatcgatcgatcaggttctctccttttctgtgtgcccgacaccatgatacccaggaactcggactgccgctagactcaggacaaacaacaaagctggggatgctcacttatcatcccctgggaagggaggcctgagagctggtactggttggccaagttcctggcagagggccttggtttctctggcagggaagaagtcac

SEQ ID NO: 731219 - DNA, 634 bp, Homo sapiens
caggttaaaacaaactataaatggattgcttactgatcattaaaaaaaggcatgtaaattgtttaaacccgaagcactaatagaagatctaaattttctatcttttgtccatgatctgtaagcttaaagctaactatgagtgggtgaattttattcaattatattaaaaatcaagcaaacaaatacatcctggatgcggagacagaaaaaaagccactgtttatatgtttattaatttgattagytgttttcaaacttataatgcaaccatttattcagcgggaagaaaaaattttttaaaaacccttgactgatttattaatatataattaaaatatgtggggggaaacagcatcaggatgtttagggtgagaagtttgttacaccaactcatgtcaatgttcctcactactacttccaagactttctggatttctgaaagactcccctgtttcgtaggcttcctacataaaatgaaccctaactgagacacactagatataaaggactagtcattgttttcaatgaaaaggttaaatccatcagtttatgtaaaaacttatagctgcacaacaaaataatggttttattctcagtttccttccctccacacagtagagaagccaattttctg

SEQ ID NO: 731220 - DNA, 634 bp, Homo sapiens
caggttaaaacaaactataaatggattgcttactgatcattaaaaaaaggcatgtaaattgtttaaacccgaagcactaatagaagatctaaattttctatcttttgtccatgatctgtaagcttaaagctaactatgagtgggtgaattttattcaattatattaaaaatcaagcaaacaaatacatcctggatgcggagacagaaaaaaagccactgtttatatgtttattaatttgattagctgttttcaaacttataatgcaacmatttattcagcgggaagaaaaaattttttaaaaacccttgactgatttattaatatataattaaaatatgtggggggaaacagcatcaggatgtttagggtgagaagtttgttacaccaactcatgtcaatgttcctcactactacttccaagactttctggatttctgaaagactcccctgtttcgtaggcttcctacataaaatgaaccctaactgagacacactagatataaaggactagtcattgttttcaatgaaaaggttaaatccatcagtttatgtaaaaacttatagctgcacaacaaaataatggttttattctcagtttccttccctccacacagtagagaagccaattttctg

SEQ ID NO: 731221 - DNA, 613 bp, Homo sapiens
ccatcatgcctgccagactcttaggttcctcctcataggttctgactgagttaacttgggatggaatgcaggaaccctggcctttccaaagctccttcttgagtatttcagcgcagttcatgcctatctttcaaacagctacatacagccgacacttactaagcataatttatgtggtttgaaacaatgaatgatagagaaaaacctgtgtgctgmtcttcaaggcatgtcagatctaaataatttagccagtcattagacatgacagaatctgtcacacagagtaagtaataaaccaggagtgagggtagatgctctccctgagagttgtcagagggtcaggggagactctcagatgaagagctttgaggaaagccttgaaagtagactctgagtttgcctcacagacaagaggcagagggcttttaggatatagcaatgaaaataatgtgtgtggatctcaaataatcctatgtggcaggaatagggggctggataacggcaggaggaggtggtcaattttgaaggccattatagagggagaatatgttactcgaggtcatgtcatctgtgagtaactgagatgggaataaagttaatttatttgagaagg

SEQ ID NO: 731222 - DNA, 597 bp, Homo sapiens
ttattttgtttttggttaggctggtcttacattgcaacttacagatctggcagctcagcaggaaggaaatctgctaatccgtagtcattggaagtatttccctgtttctcaccagcctatcctaatagttcatggaaaatggtgcagccatctttcttaaatacatcatttagctaaatgacttaggcaccatcattccttaacttagtaaacactgaacactaaagattgaagaaatatacaactctatggaattgacataaagacttgcatgcaaaagcttcattgttggccaggcacagtgactcacacctgtaatcttagcactttgggtggccgaggcgggaggatcgcctgagagcaggagttcagcaccaggctgggcaatatagcaagacatcgtctctactaaaaaaataaaaaattagccaagtatgatggtgtgcacctatagtcccyagctactcaggaggctggtaggatcacttgagtccagaagttcaagcttgcaataagctatgatcatgccactgcactccagcctaggtgatagagcaagaccctgtctcaaaaaaaaaaaaaatatatatatatata

SEQ ID NO: 731223 - DNA, 617 bp, Homo sapiens
tgcactccagcttgggtgagagttagactgtatcaaaaacaaaaagaaattaactctgtagtttatttctgttaatggcaaccctgcagaaaagttaaacttagaatatgtctcaaagtaatctctgtctgatcccttaatgaaggatctcttcaaacacagcaacttttgtctgtcttctgaaygtaggtacagctgtggctgtagaacagaccatgtaattttcatctagattccttacaaccacaaggacaattattacaatgaaagccagagaactagctcagttttgattttattactaggataaatccagccaggtagtgtggtggctttgatgttttctgtctatatctaagggggaagctgcttcattattcgatattaagataaatagggcctaaaaatagtcctaggtcaaacaccattatgattaactcaactttcaaaaccatttacctaatgtaggatttgttaataagtcttcttcaaaattagcaagaaatacaactaatgcctaacccgtcatgatgaattaaagactgatccaaaaataactgacagttctcttccagttgccctcttctttgacaatcccaccagtctatgctctaagc

SEQ ID NO: 731224 - DNA, 550 bp, Homo sapiens
ttctgactaaaatacaatagaacatgtccgtaggagactaacgtataaagtgacaagtttgaagccatactccccaaggttcaatgtggtacacattaccccagatctttgtgcattaaaaaaatttcatttctcttggaaggccgaggcgggtggatcacggggtcaggagattgagaccatcctggctaacacagtgaaaccctgtctttacaaaaaaatacaaaaaattagacaggcgtggtggcaggcacctgtagtcccagctacctctgaggctgaggcaggagaatggcgtgaatccagraggcagagcttgctgtgagccaagatcacgccattgcactccagcctgggcaacagagcaagactccgtctcaaaaaaaaaaaaaaaaaaaaagaatttcatttttcatttatgaaaaattatcccatcttttccattccctacaatcaatttcaaatcagagattaaaacattatttagaaaaagtataatttcaattcaaaagtgtataatcaaaataatctaacaatagcatgaaagctt

SEQ ID NO: 731225 - DNA, 612 bp, Homo sapiens
cttggtaggttgattgccgatgtgcagggttagtgtcgatcgtttctttaaattttcacaggcatatgatagatttgtcccacataaatgtggccctgatcgtggagtgagtcctaacaagagagcctgaccttaggctgtacacacactgtggaatttcttcaagggagctgccggccggcgcagaacccccaggagcacaggtctctccgggccgctgtcctgcgtaactgttctccagagcgccagccagccacgggcctgattccagaggagccgaactgacaggacacagcaggctggagttggtgttagattgcttcacattctsttgtcaccaccaagaactccaagtttttcgttttgttttgttttcaaagtgcttacaatgcatgtagacattgttctttgtggtctgactctatgatcgatcacagtgacttagattcaggaaagaacattaacgtcacaagttctaagtagttttcacagcaaagaatatttgataatggttgcacttatcttcagtgcaggttagaagagtcttctcaaccaagcttaactcgagttgtcttctcagccctcaaaaggctcttgtacaaaatgtagatt

SEQ ID NO: 731226 - DNA, 605 bp, Homo sapiens
caaaaataagtaatggggagaggactccctattcaaaaaaaccatgctggaataactggctagtgatatgagggagaatgaaactggatccctatttttcaccatatacaaaaattaactcaagatggagtaaagatttaagtgtaagacctcaaactacaagaatcttagaagaaaacctaggaaacatcaccctggacgtcagacttggaaaagaatttttgactaagcccttaaaagtaattgcatcgagactatcctggctaacatggtgaaatcccatctctactaaaaatacaaaaaaatttgctgggcgtggtggcaggtacctgtagtcccagctacttgggaggctgaggcaggaaaatggcgtgaacccgggaggcggagctttcagtgagccgagatsgtgccactgcactccagcctgggcaacagagcgagactccatctcaaaaaaaaaaaaaaaaaaaaaatgtaattgcaacagaaacagaaattgacaagtggaacctaattaaactacagcgcttctgcactcaaaaggatctatcaacagaataaacagacaacctacagaatgagagaaaatattttccaagtat

SEQ ID NO: 731227 - DNA, 644 bp, Homo sapiens
aaaatgtctagacacaaaatatttggtcaatacaactctaaaatacatacattcactattattttataaagaaattggatggcctagcatatgatctatatggagttaaggaaccaaatgggtgattctaagatacaaagaatgaaagataaattaattatgtttttaatcttctatcagtgtaatacattgccttaattgtaaagcagcagaatgaatcaatgtaggtgcattcaatttttcttttggaaatggaaattacattttatyattgtcatcctaagagtaatacaagattttgagaaaagttttggtaaaaacagaaaaatgttagaaaaaatttaaaaagtaaaaaaaaaaaaaacttcctcatagcagaaacaagggtaaagaagggagggaaaaggggagaaaggaaaaaaacttgatattgttcccggagagaacaaagtatggctgcctgctcttgaggtccgaaaacgagatgcagacaattgggaaagaagggaggtcagagtaactcaccagaccaactcaaagttctaagcttttttctagtgcttgtatatatttaaagctccgtgctacgtgtgggattgtaactgcaagtgggagtgttgcattcaatctctatctcatcttta

SEQ ID NO: 731228 - DNA, 625 bp, Homo sapiens
cgagagcaagaatttaaactaccaaccataaaaaccactacattcagaataggccctcaatttggaggtagctgggggcactaagaggaatcattaaaaaattaagaaagtccttaatatcttaataggtaatgtgaaaagctggcctcttgcattagaacttcaaaagaaaatatcaaaaactgaaacatacacaccatcaacaaaataacatcagtctgtactgttaaccttatrcctatgattgcaaataacaaagcccagggaattttaatgaacatgcttcttcaggcttacccaactaagaatgataaacatgatacaatcttttgaagcttttacaaactgatgtaatttattttcttaaattatcctttctttaaaaataaaatcaaacagacagaaaaactgtgtgatgtcctaacgtgatcatcaaatctctcaaactacagagattttattacttaaattttcccaagcgtgcctaagtaaatatgtacttgtccaactaagctttaattatctaagttcctattctagtttggtatttaaaagcaaagctttcatctcacaattctaaaaacttttctaaataaaattacactagtaatagtgagatctagtt

SEQ ID NO: 731229 - DNA, 625 bp, Homo sapiens
cgagagcaagaatttaaactaccaaccataaaaaccactacattcagaataggccctcaatttggaggtagctgggggcactaagaggaatcattaaaaaattaagaaagtccttaatatcttaataggtaatgtgaaaagctggcctcttgcattagaacttcaaaagaaaatatcaaaaactgaaacatacacaccatcaacaaaataacatcagtctgtactgttaaccttatgcctatgattgcaaataacaaagcccagggaattttaatgaacatgcttcttcaggcttacccaactaagaatrataaacatgatacaatcttttgaagcttttacaaactgatgtaatttattttcttaaattatcctttctttaaaaataaaatcaaacagacagaaaaactgtgtgatgtcctaacgtgatcatcaaatctctcaaactacagagattttattacttaaattttcccaagcgtgcctaagtaaatatgtacttgtccaactaagctttaattatctaagttcctattctagtttggtatttaaaagcaaagctttcatctcacaattctaaaaacttttctaaataaaattacactagtaatagtgagatctagtt

SEQ ID NO: 731230 - DNA, 623 bp, Homo sapiens
tttaaagtacccagaaaataaactgaattgaactattctaaaattttaactatgatctgacttgggcaatagtaacagtaaattttttgccttctacttaattttgcaaatgttttctgtaatagccttttaaaaatactgatacaaaaagtattaacctatcttcctgctttataagtttaaataatgtgatagccacagatctgatggtatctccaagtcattatcttgaatataaatgtgttcaaaaagaggtaaggttgaatgtgtcaattccaraaatttccctggaatttgttttaactattatcattaatattattaataagctactgacagaagtttgtttcttgagatctgtctctcatttccaagtggtaagctcaatttactgagctttcaaattaattttgttcccataaataaagtttttattgtattgctttcaagctcctaatttccttgctatttggttacattccttctagatgctgccattttattcccgaaacacaaagttaacttttttccacgcaatgtgaaatcgacatcaaaataaacaaccagcatatagtcaacccacagatacaagccaaggaagcctttagaacctgccagctact

SEQ ID NO: 731231 - DNA, 543 bp, Homo sapiens
taatcatctatagtaccccaaatgccatctgcctgcaggatcctccccactgggttcaccattccagaataaagctgcatccgtttgacagccagcttaggcagcctaatctctcctcttcctcctggaagtcgcaagtactctcccctacttgccttaaactcacttgcatttctgaagaacagtaataaccttcatgagcctaatacatcccttcattctattaggtctattcgtccttaccccamtttttgtaacagggctttacccaggcaccaccactacttggactgtgcccccaaaaacttgtcatccctactatcttctgtctagtcatatgcctattcaccattctcaactactcataaatgccctgctcttgtttacactgccgatttacactgtttctccaagccatcacagctgatatctcctggtgctatccccaaaccgccactcttaactccctcttaaaataaataaataatctttactggcagggcaccctccaatactttcaccctgatgaagtcctattattta

SEQ ID NO: 731232 - DNA, 543 bp, Homo sapiens
taatcatctatagtaccccaaatgccatctgcctgcaggatcctccccactgggttcaccattccagaataaagctgcatccgtttgacagccagcttaggcagcctaatctctcctcttcctcctggaagtcgcaagtactctcccctacttgccttaaactcacttgcatttctgaagaacagtaataaccttcatgagcctaatacatcccttcattctattaggtctattcgtccttaccccactttttgtaacagggctttacccaggcaccaccactacttggactgtgcccccaaaaacttgtcatccctactatcttctgtctagtcatatgcctattcaccattctcaactactcataaatgccctgctcttgtttacactgcygatttacactgtttctccaagccatcacagctgatatctcctggtgctatccccaaaccgccactcttaactccctcttaaaataaataaataatctttactggcagggcaccctccaatactttcaccctgatgaagtcctattattta

SEQ ID NO: 731233 - DNA, 473 bp, Homo sapiens
attcacagcaaccaatcaaaaaggcccctgcctacctaaactggcatggtaagaaagtctccccacaagaaaagtaacctgaaataacctaacattaaccaatctgctttctgcactacgctatctcctttcccctgctcaagctgtcttaacaaaaactgrctgttcagtcactcctgacagagcttctatttagtatactggatgctgcctggttcatgaatccctaatagaagtcaattagatctttaaaactcaatttgttgaaactttgttctttgacagttcccagcacacatattagatacatcatactagttctgtgaaactaaaaccctgattaaaagctaagatcttttgtcagtaagaaaatatttgaatgtaaggatcttgtatgaattgcttgaagtagcatcatcaaagactattcctatatctgttacaagcatatttagatatgtgcatggattctg

SEQ ID NO: 731234 - DNA, 529 bp, Homo sapiens
caccacaacttgaacacatttgtgtaaacataactgtcttagtctgctggggctgctatagcaaaatgccacagactgggtggcttaaacaacagacatttatttctcacaattctggagcctgggaagtccaagatcaaggtgctggcggggttgggttctggtgagggctctcttcctggcttgtagatgactgccttctcactgtgtcttcacagtgtagagagagcatgagcaagctctctggtctcttcttataagggcactaatcccatcatsaggaccctaccctcatcaccgcatctaaacctaatttcttcccaacgaccccgtctcctaatcccaccacatttgggattagggactcagtgcatgaatttggggggcacacaacatttagttcataataataaccatccagtaaagatgcctctcttgtgctacctcccaatcccagccctctgccctccccaaggtgaccactagcttaacttctaaccacatagagttttgcctgtttttgaatttc

SEQ ID NO: 731235 - DNA, 616 bp, Homo sapiens
cgaggaaaggggtatgaaggttcttttttccctgtcttgggaagggaggaggatgagctgtggcactcctagagcagggtcatcattaccgtgtagacacaactgattaccagtatctgccttcaggtttccacagtcacggagtattggagagtggtgacgaagaaggcaccgagccctggaaggggcagtaaaggtttgagcaaaggcccaactgatcayttcatctctcctttcagtcctggacgcacaatatccagcgagagaaagagtttctgcggaagctggtgaaagctcgcgtcatcactgatctaagcagtggcatctgagtgggcccagcacatggccatagaggcccaggcaccaccaggagcagcagccagcaccacctacacaggagtcttcagacccagagaaggacggtgccaagggccccaggggcagcaaggccttggtggagcagccagagctgtgcctgctcagcagccagtctcagagaccagcactcagcctcattcagcatgggtccttgatgccagagggccagcaggctcctggctgtgcccagcaggcccagcatgcaggtggtgggacactgggcagcaaggctgctgcc

SEQ ID NO: 731236 - DNA, 625 bp, Homo sapiens
tcatcagcttgtctaccaaccctgaaccccggtggccactgcaatgccttccgacactccccaggtggctattcataatgctgtcagttctacctcctaagcaactttcactctcatgcacctggtcacagcttactttaactccctatcatctctcatcagcattatttcaatgcttctctaattgatcaccctgctgtttcttacctcattgcctttgaatccatctgcaatggtctgaatgtttgtgtctgcccaaaattcatatattgaaattctaacccctaggtgatgttactaggagtgagacctttgggagttgattaagttatgagggtgstgccatcataattgggattaatgcctgtataaaaagggaccacacaaggatccctcaagccttccatcctgtaaggttacagtgaaaagacagctatctaggaaacaggccctcaccagacgctgctagtgccttgatgttggatttccagcctccagaactgtgagaaatacattgttgtttatatgcgatccagtttatggtatttttgtgtagcagcctaaatgaatgaagaaaccatcttccacaactccctaaatgtcctttataaaatgtgatctaact

SEQ ID NO: 731237 - DNA, 510 bp, Homo sapiens
atttttcttatttctactttcttttcccctcctctggctgggctatttcaaaagatctgtcttcaagttcataaattctttcttctccttcatcttgtctgttgttgaagctgtcagttatgtatttttttcatttcattcattgaatatttctgctccaattcygcttggttctttttttattttatatacatctttgttgaatttctcattcggatcatgaattgttttcctgattttattgaattgtttctctgtgttctcttatatcttgctcagtttccttaaaatcataattttgaatttatttttcagatattatatgaatgtcctttttgggagtctgttactggagacattttgtgggtgccatgttaatttgcttttttatgtttcttgtgtccctacatttatatctgtgaatctaattgtgtagtcaattttttccaacattatggagtagcttttgtagggataaatgttttcctgtaaacaagtcctagtgttaaa

SEQ ID NO: 731238 - DNA, 626 bp, Homo sapiens
cccaaaaaaaagacactaaggagggtggtgtgaccaaagcttctagaattaggggagaatggtaagagtttaagtagaaaaggtagacagagaacaaatcatgtagaaaaaaaattgacggtaaagagctaaattttgattctaagtacaataggaaactactgaaaactttaagcatcatctgatttacatttttttaagttcacattggctgctctgtggaggattgattgtattgagcagcaactgagagattggtctatcctagtactctgggcttgggcaaagatggcagcagggaagtaaaatsaaagtggatgaatgtaagctatattccagaggtagaacaggaaaaatttattaatgagttcctgggggtgcaggaggtggaggagagaaagggctgaattgaagtcaactcttacctaagaatgatagtgtgatttactgagtagttaaaatttggagagaaactgattagagggcaacaggggaaggtcttaatcttgcacaagcattgtgctgaatgcttatgttatatgtgagtatgtattaaatattcacacaaattctaaataatggaaccaccattttttagatggagaaaatacaagttctgggaggtt

SEQ ID NO: 731239 - DNA, 626 bp, Homo sapiens
cccaaaaaaaagacactaaggagggtggtgtgaccaaagcttctagaattaggggagaatggtaagagtttaagtagaaaaggtagacagagaacaaatcatgtagaaaaaaaattgacggtaaagagctaaattttgattctaagtacaataggaaactactgaaaactttaagcatcatctgatttacatttttttaagttcacattggctgctctgtggaggattgattgtattgagcagcaactgagagattggtctatcctagtactctgggcttgggcaaagatggcagcagggaagtaaaatcaaagtggatgaatgtaagctatattccagaggtagaacaggaaaaatttattaatgagttcctgggggtgcaggaggtggaggagagaaagggctgaattgaagtcaactcttasctaagaatgatagtgtgatttactgagtagttaaaatttggagagaaactgattagagggcaacaggggaaggtcttaatcttgcacaagcattgtgctgaatgcttatgttatatgtgagtatgtattaaatattcacacaaattctaaataatggaaccaccattttttagatggagaaaatacaagttctgggaggtt

SEQ ID NO: 731240 - DNA, 624 bp, Homo sapiens
tttattaattttccctttttaccttttatgctttcaacaggtatggcttatattttcttaaataaaattttaattttagaatagttttaggtttacagaaaagtttcaaaaacaatacagaaagttcccatatagccctcattcagtttctcccattttaacatcttacattactatggtagattcatcacaactaaaaagccaatattggtacattactaggaattaaactccacacctatttggtttcagtagktttttcgtaattttctttttctgttgcaggacctaaatcaggattccacattgggtttagtcacatcaggtcttcttagccttgcctggtatgtggcagtttctcagactttcctggtttctgatgacctcgacggttttgaggagttggtcagatattttgtagactctcctgcaatttgcattcatttcatgtttttcctctgattagactggggttgtgggtgtttaagaaaatgaccacagagattaagtgccattctcatcaccctgtaactaaggtacatgctgtcaatatcccttaccaccaatgatgctaatcgtgaccatctggccaaaatagtgtttgccagttttctgcattgtaaa

SEQ ID NO: 731241 - DNA, 510 bp, Homo sapiens
aagtaaagatgacatgtttctttgtaccattttctcctcccacattccatttgacatcatgcagagatgttcatttgacatttctgggttgaagactatgaggggaatgcatcccatggaccagtggttactgactacaataccaccttcagaaagtttaggaaatcctctyatggccttctgtgattttcaagttggggatatagccaagatggcttcttgcagaccttcgatcccagaaggtggtttgggggcaatattccacctcagtcttttgtacctgaagttgatgaactctgacatgtgagattacatggagctgacaatgtcacatgaaagtaaatctggattaaaatattacatatacatgtatatacacacgatagaaggcctgcgagctccacaccttcgttgtgtgcaatgatgtcactcgcccaagcgtctgaacacatcagcacctatgagcttcttttggtaaaatttagtatctacctcccattctaccatcat

SEQ ID NO: 731242 - DNA, 702 bp, Homo sapiens
ttggctccctgacgacctctttccctgtggctctagtgcagtctggatggaataaaagctcagtctcatcagttctgccctcgaaaaccctggaaggcattcttgaggcctccttgtttctcagtccccatattgaatcaaacaatgctaccccagggatggaagggaggacttgagcacattcttaaatgtggctcctgtaatttttaacacattgacacatgctacattgacgtgacatcttgaagacatggatggtgctgtgaaaagttatactgtgagactcagttcagcatgcttgcacatctttcctctccccatcaagcacctctcccttggggatacttcccctcacttcccaggctgggtcaaacttctgcatcattgccttttagcactttgtacttccagttgataacagctatggcccttgraattttgccttcatttttatgtttatgtgattaatggttctctagacgcattagaagttccttgccagaatatatgttccaagaagccaggaattgaatttatttttgctctgtagtatccacaataaatgttgaagaaatgaatggtgataagaagtcctagcatgaccaagacaaggtagttcgagcaggtgggaggaggacacagtctgagaggcacaaacactagagtggtaatgattaattttacccatcagcttggctgggt

SEQ ID NO: 731243 - DNA, 653 bp, Homo sapiens
aagtctagattgttgtaaatatggtttcccaatagtaccatcaaggaaaacaacacaaatatttgtatgtgatggcttaaagtgaatgaagactgggtgaatttataggctttggaggatttgttctcaagacagctgttgggctgtacctcaagcagtgtcaggtcagtgaaatcagcacacacataggacaaggcataacagagcaccttgtaatttgcaatatttcattaaagactcacacaaaaatcaacgtaatgtgatacttgcaacttcaaaagcaaatctcagttgataataaatcgtcacatgctgacaatcttggtgaaggaaatsgcactgtttagggtgaagaaaacctgcctcaacgtgtagttctattttgagagtcagggttggttcaccctggggaactattggtccagttgaggggaccttcaattactacaaggatagccagtcctcctcattgccttgatggttttgaatttccaggctttaaaacctgatcctttaaaggcaaagcagggggcaacaagatgcagagataacagcaaggcagtggatgtgacggtttgccacctttgtgtttttgttgtttgcttggagtgaaatagccacaacttgcaatttgaaactaaaggtggatcatt

SEQ ID NO: 731244 - DNA, 595 bp, Homo sapiens
agttggaacctgctgggtctggagctcagcagggatgtccagattgaagataggaaaagtttggggagtgagttgggagtgtatcaatggtggttgaaggcatggtttgggtgaggttactgtctgtattcaagttactaagaaaaccgaatctgaggcaaagytagtgttagcactttattggagggtgaagtctcagagcagcgagagtgagggaaaggaggaaaagaaaatcaaaggttggtgttagtgagttggctcctgcctcacaaagacagctagtcacttgcccatgttggatgtctctggatagactacacagaaacaccatgactggctagaacattgtatttggattgatggaggggaaattcacctgttctgcttcctgcccatgctttactgctcaaagtttgccatggagccagtgttagctccccactttcttgctgggatgatatttcttggccactgcgaaagccagatcccatgccttgcggcatggcatttaatctaagtcctgcaatggcaaggggaacagaatgtggtcaccggcctgtgggagttagtcagcacagagcaagcagctggagac

SEQ ID NO: 731245 - DNA, 457 bp, Homo sapiens
gagggcatgaacaccagccccaacaatttgcgctttacctcataagtgagggggtgacattttaagagcagaagggtgtaatcccagcatttcgggaggccgagatgggtggataacttgaggtcaggagtttgtgaccagcctggccaacatggtaaaaccccatctctactaaaaawacaaaaattagccaggcatggtgacgggtgcctgtaatcccagctgctcagaggctgaggcatgagaatcggttgaacccaggaggcagaggttgcagtgatctgagattgcgcaactgcactccagcctgggcaataagagcgaaacttggtctcaaaaaaaaaaaaagaggcattgtgagttttcttcctgtttggactataagatcccagtgggtgggggagagactgtcacacactctgcaccttgtattccctcagtgttgagtacagaggct

SEQ ID NO: 731246 - DNA, 582 bp, Homo sapiens
gtatattcaaaaagtagaaatagatttttatcaaggtataaagtatacgtaaaagtcaaaaacataaaattacttttcttttatttttatttttgagatggagtctcaccctgtcacccaggctggagtgcaatggtacgatcttgactcactgtaacctccacctcccaggttcaaacaattcttctgcctcagcctcccaagtagctaggattacaggtgcccgccaccaagcccagctaatttttgtattttgtagtagagacggggtttcaccatgttggccattcaactcctggyctcatgatgcgcccacctcagcctcccaaagtgctggaattacaggcatgagccaccacccccagccaaaattacttttcatatgtttccaaaatatcattttgctttgaatatattcaagatgataaggcaaattatacattttaatgtattaatataaaattttaaatcaaataatttaaataaagctgccattaatttaacttttaaattttcaattaaatatttcacctattttgacaaatacgaaacttttcataattctagcatgtatatctacct

SEQ ID NO: 731247 - DNA, 571 bp, Homo sapiens
tgcaaatgttagatcttttgctatggtcccaacagcatctaaagctctatttgtttgtttggggtttttctttccagtttgttttctctctgttgctcagaatggataatttctatttttctatcttccagttctccaatcctttcctctgtcccctccattctcttgttgagtccatcaattaggttttaaaattttgctgattgtgttttttatttctcacaytttatttggttctgctttatattatcaatttcattgttgagagttttttttcactgacgctttctatttttctatttgtttctatcgtgttcataattgcttgttgaagcttttttaccacagctgcattaaaaaccttcatcaaatgattctatcatctgtcatttcagtgttgccatctatcaattgtctttttaagtatgatgacaattgaagagaaacctggacatcttcatattattttctggtttagctggctttctttgacaatgcaggggaagagggaacttgctgcctcattattgacacatggaggtagaataccagtttctccactcaggctcca

SEQ ID NO: 731248 - DNA, 568 bp, Homo sapiens
tgggggtgggggacaaacatgacaagtttgccagactttatattgtctgaattgttattatagttatcttccctgaggcttcacaatgtatttaataagaaatcaatataatctgtttttgcatagatttttctatgctgctgttgtgttactccacaattaaataggagaaaaacactctaaaactgaagcaggaaaaagtgtgtagactacagattttcacagctaaaaaaactcccattaaatacctacacattttaaccactgtcaaatgtttggtttgcattaatagactgcttataatccaaggaggaatktcttgagtgtgtgtgtgtgtgtgtgtgtgtgtgtgtgtgtgtgtgtgtgtgtattgtgtatttcttctagacttttttttttttttggagaaaaataatagccagttattttaggatcctatgatgtgtagtctttgcttcagtccaagtcaattaaagattgatctacttcccagatttagttacattatcaataatggggctatttcagccacagagaaaattcaagtaaaattatcaaccataataca

SEQ ID NO: 731249 - DNA, 556 bp, Homo sapiens
ccagttattttaggatcctatgatgtgtagtctttgcttcagtccaagtcaattaaagattgatctacttcccagatttagttacattatcaataatggggctatttcagccacagagaaaattcaagtaaaattatcaaccataatacaagaactaatgcttacaaagtacaaaatgcaaaagtgtatctgttttctgaacaacattagcaaatgtctttcagtaaagacatttgtaaatgacaactgaaatagtattatatcataaatgaacatgaarcaaagggagaaattatattactgaatgaagtagtttaatcagaataagtctagaagttaacttggtagaacttcgcaaccactaacaaaatagtgacaaaccaatgatcaccaatggccactaaaatcatcagctggaaaggtagtgagaagttttacaatgaatggatcaggctgacaggacatgaacccacttatctatcttatgttaatatcacagaaagggagacagccagaaatcacagtcacctgatacgatgcaatgagaagtatgtaa

SEQ ID NO: 731250 - DNA, 556 bp, Homo sapiens
ccagttattttaggatcctatgatgtgtagtctttgcttcagtccaagtcaattaaagattgatctacttcccagatttagttacattatcaataatggggctatttcagccacagagaaaattcaagtaaaattatcaaccataatacaagaactaatgcttacaaagtacaaaatgcaaaagtgtatctgttttctgaacaacattagcaaatgtctttcagtaaagacatttgtaaatgacaactgaaatagtattatatcataaatgaacatgaaacaaagggagaaattatattactgaatgaagtagtttaatcagaataagtctagaagttaacttggtagaacttcgcaaccactaacaaaatagtgacaaaccaatgatcaccaatggcyactaaaatcatcagctggaaaggtagtgagaagttttacaatgaatggatcaggctgacaggacatgaacccacttatctatcttatgttaatatcacagaaagggagacagccagaaatcacagtcacctgatacgatgcaatgagaagtatgtaa

SEQ ID NO: 731251 - DNA, 594 bp, Homo sapiens
ggatggaagctataactttctgatgtgccttgttttatagttttgataaaaatatatacaaaattaaaaataaattttacaaaaaagtaatcactataaaaaactgaataaaaacccattggtctatcaagctgtgtcataaccacacagagaattctttcacataattttgcaacagtataattgtgtacagtgtatagtgggacagtgtatacaggctgtacaatatatagtgagatatatctgaagaaaacaaatataaagaaatsttaagcagtattcagtagacttattgctggtaataatactggtattggtatttcaaaactattatatttatgtaatgggataaaaactattatatttatgtaatgggataaaataggaaccaagatcttcggtgtgttttagtccatttgtgttgctataatttataagaaaaagaaatgtgtgtgatctgtgacactcatcctctcccattcccccttcctccccactcccggttctctgacatttacactgagactgaattaccacccaccagtgttcctggttctccagcttgcagatgacatattgtgggactttttgtcc

SEQ ID NO: 731252 - DNA, 652 bp, Homo sapiens
ctcctgggtgaagggatcctcccaccttggccttccaacatgctgggatgacaggcctgacccactgtgcctggcctgttctaatctttatcattttcttccttctgcaaactttaagtttagttctttttctagttccgtaaattgtaaagttaggttactgatttgagmtatttcttgtttttttaaatgtaagtgtttatagcttctattctagcattgcttttactacatcccataaattttggtctattgtgtttttgtgttcattataacttctcttgtgatttcttctttgatccattgtttgcttaagagtatattctttcatttccacaaatttgtgaactttccagttttacttcttttttttttttttgagatggcatctcactcggtcgcccaggctggagtccacctcccaggttcaagcgattctcctgcctcagcctcccgagtagctgggattacaggtgctcaccaccaagcccagctaatttttgtaattttagtagggacagggtttcccatcttggccaggctggtcttgaactcctggcctcatgatccacccacctcggcctcccaaagtgctgggattacaggtgtgagtcaccatgcgcagccttccagttttacttctattatggat

SEQ ID NO: 731253 - DNA, 547 bp, Homo sapiens
acatttaccagcctttcagtgatgggcagaataatggtcccccatagatgtctactttctaatccctgaaattgttaatatgttaggttacatggtaaagaggaattaaggttgctagtcagttgaccttgaaatggggacgttatcctagattattcacatgtgcccaaagtatataatcacaagggtcyttattcatggaagagggaggcaaaggagagaaccaaagagatggaagtatgagaaggttatgatcttcccttgatggctttgaagatggaagaaggggttcatgagcccaaggaatgtggatagcctctaaaagctggaaaaaggaaggaaaccaattttcttctagagcctctagaaggaacacagccctgatggcaccttcattttagcccagtaagacacatttcagatttctggtccttagacctgtaagataataaatttgtgttgttttaagctaccaagtcagtagtaatttgtttttgcaaccagtgaaaatatactgattcaaatatttgcccattctctaccccct

SEQ ID NO: 731254 - DNA, 611 bp, Homo sapiens
tcatgtaaacatatgttttcatttctcttgggtatattttaggggtagaattgccaggtcatatggtaattctatgtttaactattgagaaactaccagagagttttccaaaatggcgcagtatattagggttccagtttctccacatcttcaccaacacttattgtctgccttttttattgtagcgatgctagtaagggtaaagtgggatctcgttgtagtttatatttgataatgatgttaaagattttttcacatgcattttggccatttgtatatatcttccttggagagatgtctaatcagatacttggccaatttttaaattagtttgtttttttattattgaattgtaatcgttctttagatataagtctttttacagatatataatttgcaaattatatctcctaggcttggcttttcactttcttgatggcctcttttgatgcacaatatttttcrttttgacaaaatccaattttatctctttttttgttgttacatgtgcttttggaattgtatctaagaaaccattgcctaatctgaggacatgaagatttacacatatattatcttttaagatctttttaaaaaaaattgtgggaagg

SEQ ID NO: 731255 - DNA, 455 bp, Homo sapiens
ttattaccatatggcccatggaaaagattttgcatctagaggaattgaaagtaagtatacttttcatgcttaatgatattaccagactgcttgacttggctcttctgtctaaagacttaaatgtgtctaacgtacgcataatagatgtttagtgaaggaagagtaaaataaataatctaaaaaatgtggagagatttacttaaaaaagaaggcctaaatccagatttctcccagccaagtataaccaagcctaaccctgcaaatcsagatttctaccattatatcttctgttcctttgccaactttttcctgaggtttgcctttatgtgtttttgaagagtcagttttcatttcctaaaatctggaaatcactgagaaggctggattcctgagtactatggggagatagaggaaggaaggaaggcccacttaagctgttgatagtagaaaaatta

SEQ ID NO: 731256 - DNA, 657 bp, Homo sapiens
ttggctgggttaatgactgtttatttaaagagtgttgtaaaattggatgtgtggtgtttaaaatggccatgtcctgaggaaacttaagtaacaaagtactaaatgctaagtaggcttttgcatattgtaactaaatttaagaataattcagattaagtagttctgaaatttggtatagatagcatagattgtctcatgctcatgagtgacataatgaccctggattctgttacatacttctaaagaaaattgattgttgtcttaggaggcagttaacttggctgaacaccaactccacactctgtcttgtttgtaggtggcagcagctgaaatctcttctcagttgttttagctttagctatgctgctggaagtctttcccatgcaagtgtgtagttcaggggtcaaccagagtttgggcagaaggaagtctgccccttctgtgcctcctgttttttgggggtttcccctttatgttccagctgttgtggttgccccatattctgccytctgatccttaaccaataaaacttggcttttgtttccccctcaagtgagaacccgttaaaaatgagacattgagccagtgctgttcactttttaagtgccaacttccctctactttccacttgtttatagttgtttccagtgcctttag

SEQ ID NO: 731257 - DNA, 640 bp, Homo sapiens
gttatatgtttatttatatgtatttgccaataacgtcatgattattcaaaaatttgaagtttagaatattaattcctcaacctttaggattttaaaacatgtaatttccttagcgcctggggttttcaaaaccaagaccttaggatttcaaaagtaaaacttgggtgtatgcttttcaaaaaacagatcctttccaggtacttaaagtatgtttcatttttcttgtttggggaatattctcgtaatgaatcaggaagctgtttaggcaaaccatggataactttaatggtgatccgtagaccatacgttctatgatgtgttccttgaaaaaactatcccatgatgaaaarttctgtatccttatcttgaagattaaaaacaagtgtcagcatattacagactcagaagagttctgcaggaaaaactgttttatattgtttttatccagttgtatgtatgccaaagtcatttgaccatgggatctttttttagtggaagtcaatgccagtgacacccaagagaaataatgagaaaggcttgggaaaaccactacattaatcgatttctgagattaggaagaacttagataacttacaaataacttaaataacttagtaccttaagagtttatgttgtttag

SEQ ID NO: 731258 - DNA, 645 bp, Homo sapiens
attttgatatatgcatacaatgtgtaatgatcaaatcagggtaataatgatatctatcacctcaaacatttatcatttctctgttttgggaacattccaaattttctcttctagctattttgaactatacaataatttattgttaactacagccaccctactgtgttatgaaacactagaacttatcccttccatctaactgcacgtttgtatccattaatcaacagctctccatccccactccctgctacttttcccagcctgtgggtagccatctttctactttctctctctatgagatccacttttttggctcccacgtattagtgagaacatgcaacatttgttgacaactttgaagaaraaaaaatggggaaacattttgcagatataaagacttattatcaagctatagtaattatggcagttatatgtttgtgctgtgggaaataaatataccaatggaacaggacagaaagcctagaaacatgtattgaaacttgatatataatagaggttacgtggcattagagaaaagatggactattcaataaatggtgctgagacaactggctatccatgtagaacaaataaaatttagatctctatttcacagcaatcacacacacattttttcaattgacc

SEQ ID NO: 731259 - DNA, 601 bp, Homo sapiens
ctgctaaataatttttgaaaagtggttttaccgattaaaattcctacactcaacatatgagagttccagttgctcctatccttgccacaatttagctctatcagtcttttcagttttagccgttatgatgggtgttcattttacttctttaaaaaaaaaaaaagcaaaaacttttcctcaaacaccaaaatraggaatatcctttaaaagtttagcccaagtttcatggagttaaagctttggtagtatatgttactcaactatatttaaagccattgtatgattataacttagtagcacacttaataatttaatatttaaggcttaatacaacaaatgtattgacttacctctatatcctagaaaaaagttcttttttttagcttgtcgcactttatccctgtaattgacattataccttgtattaaatactcttggtttctcaccattctcccacttcttggagatggactgtgtttatttatatatctttctgtcccacgtgcctagcatagtgctgggcacacagccagtgctcaataaggttgttgagtcaataaacaaataagcaagcatattaatttaaagcataaatatgaaa

SEQ ID NO: 731260 - DNA, 601 bp, Homo sapiens
ctgctaaataatttttgaaaagtggttttaccgattaaaattcctacactcaacatatgagagttccagttgctcctatccttgccacaatttagctctatcagtcttttcagttttagccgttatgatgggtgttcattttacttctttaaaaaaaaaaaaagcaaaaacttttcctcaaacaccaaaatgaggaatatcctttaaaagtttagcccaagtttcatggagttaaagctttggtagtatatgttactcaactatatttaaagccattgtatgattataacttagtagcacacttaataatttaatatttaaggcttaatacaacaaatgtattgacttacctctatatcctagaaaamagttcttttttttagcttgtcgcactttatccctgtaattgacattataccttgtattaaatactcttggtttctcaccattctcccacttcttggagatggactgtgtttatttatatatctttctgtcccacgtgcctagcatagtgctgggcacacagccagtgctcaataaggttgttgagtcaataaacaaataagcaagcatattaatttaaagcataaatatgaaa

SEQ ID NO: 731261 - DNA, 634 bp, Homo sapiens
gggtgtctgtagagtagccagcctggaccctgggggtctctgaaacgttttttagtgttccctgaggtcaagactatgtttacaatagtactgtgatcggctgaataatgctggcctgcaaagatgtccatgttctaattcaggggaccagtggatggatatgttactttactkggcaaaagggaatttgcaaatgtgtttaagttaaggatcttgaaatgaggagatatccttggattatctgggtgggcccagtgtaatcacagtgtctttataagagagaagcaggagcatagagtcaaagaagaagctgtgatgacattacgttgctgactttgaacatggagggtggggccacaagttaaggaatgtgggcagcttctagaagctggcaaaggcaaggaaatggattctctcctagagccccctgaaggaacccttcatgctgacactttgattttagcccagtgagactgattttggacttctaacctcagaagtgtaagataataaatttgtattgttttaagccattaaatttgtgtgaatttgttacagcaacaataggaagctaatgcagatatttgaatgctatttgtctttttctctctcattttctcccaagcataaaggg

SEQ ID NO: 731262 - DNA, 662 bp, Homo sapiens
tcctaaataaagcatatacatctctcctggactattacataagttttacaactgatccacctgcctctcctctctgactctctctgccgctctccctgaggcagtataatataatgacaaagtgcatggaccctggagccaaaccaactgcctctaaatcttggctttgctccttaactaccrtacaacctcaatcaagttgcacaatcttagtgtgcctgtttcgtcatgtgtaaattggggataatattcctacctcaaagagttgttcggggatcaagtgatttactatacgtaggcacttagaacagtgcttcggtaatggcaagcgctatccatgcgtttgttcagtaaatccacctttttactgcttccagaatgaccttgctaaaatgtaaatgtgaaccttcctcatagagaagccatgtcctcctgtctaaccccttttactttttccagcagccttctccaactacctgcctcaagttggcactgggtccttatctgtgcactttgtgctaaacccttttattgcacccggctcactgtgttgtgactatttctatcagttttcttcactatctgtgaattcttggaaacatagatacgtatctgatttatctatgtatggccagcacctatctatccaaaggaagtgttta

SEQ ID NO: 731263 - DNA, 662 bp, Homo sapiens
tcctaaataaagcatatacatctctcctggactattacataagttttacaactgatccacctgcctctcctctctgactctctctgccgctctccctgaggcagtataatataatgacaaagtgcatggaccctggagccaaaccaactgcctctaaatcttggctttgctccttaactaccatacaacctcaatcaagttgcacaatcttagtgtgcctgtttcgtcatgtgtaaattggggataatattcctacctcaaagmgttgttcggggatcaagtgatttactatacgtaggcacttagaacagtgcttcggtaatggcaagcgctatccatgcgtttgttcagtaaatccacctttttactgcttccagaatgaccttgctaaaatgtaaatgtgaaccttcctcatagagaagccatgtcctcctgtctaaccccttttactttttccagcagccttctccaactacctgcctcaagttggcactgggtccttatctgtgcactttgtgctaaacccttttattgcacccggctcactgtgttgtgactatttctatcagttttcttcactatctgtgaattcttggaaacatagatacgtatctgatttatctatgtatggccagcacctatctatccaaaggaagtgttta

SEQ ID NO: 731264 - DNA, 568 bp, Homo sapiens
taatattgctgccatgttgccgccatctattggttgtgtcacatattacaggttcataaccgaaaaaatgaagctggtcatttgtgggcccctttatacttctggcaagacacctcctcaactgcatcctgaaatgacttttctttagaattcttatttattacagaatacagaaaaatcttaatagttgtgcattatggattatcaggcctacgtctaacagaatgttgttgttgttgtcagctacagaacagatagatttcctttaaatataaccctattatyctgtcagcaatccactgtaagtgaccttggtttctgtttctgcagattttcttcaccttctgaaggcattgaccagagaaaatttcttaacatctctgagccttagttccttcagctataaaatataggataataatgctaccttcttcatagcgttattgtgaagattaaattgcatagtgtttataaattatttggcacagtgcctgatgtatataaagaacgctgtcaatgttattgttaagaagaataacaagtcttaatggaaatttgaacagtgact

SEQ ID NO: 731265 - DNA, 573 bp, Homo sapiens
ttaattaaataaaataatgagagaaaattgaaatggaaaccagtttggagtgcttgtgtcagaggcatgtgaaccagagaaactccatcttgaataggagctgggtaaaataaggctgaaacatactgtgctgtatcgcagaaaattcagccagatattgggcaaaattcacccccaatatttcacgtaggttcttttctattttccctaagtgtcrgccggtttgagaaataaagggacagagtacaaaagagagaaattttaaagctgggcatccaggggagacatcacatgtcggtaggttccatgatgccccctgagctgtaaaaccagcaagttttattagtgattttcaaaggggagggagtgtatgaatagggtgtgggtcacagagatcacatgcttcacaaggtaatagaatatcacaaggcaaatggaggcagggcgagatcacaggaccacaggactggggcgaaattaaaattgctaatgaagtttcgggcaccattgtcattgataacatcttatcaggagacatggtttgagagcaaccagtctgaccaaaatttatta

SEQ ID NO: 731266 - DNA, 564 bp, Homo sapiens
ctaagtacaacaataaactatgaactaaaattttataaatttatacatttggaataaaaatgcaaatttatgtaaaactaattttctgtcatataagaggcagaggatctggaagttattttaaactgtacacaactaatatgaagaaataaaaaattagaaatagacctcttagaaggtcttagtgaattggaactagttttgcttaggatttttttttttttttgagacagagtctcatgctgtcactgaggctggagtgcagtgttgcaatctcctgggttcaagagactctcatgcctcagtctccygaggagctgggattacaggcatgcaccaccacacccggctatttttttgtatttttattagagacaggttttcaccatgttggcaggctgggtcttgaactcttggcctcaagtgatctgcctgccttggcctccgaaagtgatgagattacaggtgtgagccactgaccccagcctgcttaggatggatttttgaaggttacaacagcaaaggctggcctttgagtttgcttaatttaatgcatctacttgc

SEQ ID NO: 731267 - DNA, 564 bp, Homo sapiens
ctaagtacaacaataaactatgaactaaaattttataaatttatacatttggaataaaaatgcaaatttatgtaaaactaattttctgtcatataagaggcagaggatctggaagttattttaaactgtacacaactaatatgaagaaataaaaaattagaaatagacctcttagaaggtcttagtgaattggaactagttttgcttaggatttttttttttttttgagacagagtctcatgctgtcactgaggctggagtgcagtgttgcaatctcctgggttcaagagactctcatgcctcagtctcctgaggagctgggattacaggcatgcaccaccacacccggctatttttttgtatttttattagagacaggttttcaccatgttggcaggctgggtcttraactcttggcctcaagtgatctgcctgccttggcctccgaaagtgatgagattacaggtgtgagccactgaccccagcctgcttaggatggatttttgaaggttacaacagcaaaggctggcctttgagtttgcttaatttaatgcatctacttgc

SEQ ID NO: 731268 - DNA, 627 bp, Homo sapiens
ttgatttaaagaccaaaaagggaaaatctctttatgaaacaaacaagaagataaacgatatattaaccccttgaaaaatatgctgggtgtaaaggaaaagaaaatagtgcctccactttttctgttgcatttatttaaaatattataataaaatatttcagacatacaaaagggtctgaaaaatataacgttagcctagcgtggggtgcatgcctgtagtcccagtactcgggaggctgaggcaggaggattgcttgagcccaggaggttgaggatgcagtaagctgtgattgtgccactgcactccggcctgggtgacaaagagataacttgtctcamcaataacaaaaaaaaaaaaaaaagaaaaaaaagaaaaaggaaaagaaaaaaaaaaaaaagagcgaagagaaaaaaagaaaaaatataacgaatagccatgtatccaccagccagtttaagaataaaacattaacaatgagctaaggccctcagcgtaccactccccattatatcttctctctctcccctcaaagacaaccactatcttgaatctaacttctgtcattccatgtatctctatagcattttttctacaacctatgcagtattcctaacaatatatagtat

SEQ ID NO: 731269 - DNA, 627 bp, Homo sapiens
ttgatttaaagaccaaaaagggaaaatctctttatgaaacaaacaagaagataaacgatatattaaccccttgaaaaatatgctgggtgtaaaggaaaagaaaatagtgcctccactttttctgttgcatttatttaaaatattataataaaatatttcagacatacaaaagggtctgaaaaatataacgttagcctagcgtggggtgcatgcctgtagtcccagtactcgggaggctgaggcaggaggattgcttgagcccaggaggttgaggatgcagtaagctgtgattgtgccactgcactccggcctgggtgacaaagagataacttgtctcaacaatamcaaaaaaaaaaaaaaaagaaaaaaaagaaaaaggaaaagaaaaaaaaaaaaaagagcgaagagaaaaaaagaaaaaatataacgaatagccatgtatccaccagccagtttaagaataaaacattaacaatgagctaaggccctcagcgtaccactccccattatatcttctctctctcccctcaaagacaaccactatcttgaatctaacttctgtcattccatgtatctctatagcattttttctacaacctatgcagtattcctaacaatatatagtat

SEQ ID NO: 731270 - DNA, 590 bp, Homo sapiens
aaaataaaataaaatacccttgcaattgcagtagacactgtaggtgcccctcccagatctcctttagctgtttggtgcacccatcccccagttgctctgtgtgtggctgctgacagctcacagttgacccttgctctggaggattgctctttcacatctccctccctaaccagccaacacarcctctgggagctcacagccaatgactgactgatacaaggctgaccaggttgtctcaaggggcaggacaactttgcctccagtgtatgcccctgagctcctctgaggatcaattcaaggtttgttttacctgagaccatgtctcgctctgctctttccttttctctatcttttctccttcactctcttaagagtattcctgaagaacatttccttaataaatcacttgcagttgaatcccatcttaggctctcctagggcacctgacttgacataattaatgccagacagtttacctaaaagtagatcctaagatgcaattctggaggtagataatttactgtttggctggcagtgagggccgtggtgggtgacatgcactgatgatccctggcatgatgtaatgatac

SEQ ID NO: 731271 - DNA, 569 bp, Homo sapiens
caatgtaaagcaaagtgtgaaaatcagagggcctccttgggggcatgtttaaagagactctcgtctccttaaactagagggcaagaagagctgaatattcttcacaagcattaattgtaagagttgcagaacttcggccgggtgaggtggctcacgcctgtaatcctagcactttgggaggccgagktgggtggatcacgaggtcaggagattgagaccaccttggctaacacggtgaaaccccgtctctactaaaaatacaaaaagttagctaggcacggtggtgcgcacctgtagtcccggctacttgggaggctgaggcaggagaatggtgtgaacccggaaggcggagcttgcagtgagccaaaatagcaccactgcactccagcctgggcgaaagagcgagactccgtcttaaaaaaaaaaaaaaaaaaaaaagagtcgcagaacttcagagaagagcctgaattaccagcttaggtaaattacttctacaaagataactgtctattggggaagggggtatacccataatctttcagtattagtggatacaggatctgagctta

SEQ ID NO: 731272 - DNA, 569 bp, Homo sapiens
caatgtaaagcaaagtgtgaaaatcagagggcctccttgggggcatgtttaaagagactctcgtctccttaaactagagggcaagaagagctgaatattcttcacaagcattaattgtaagagttgcagaacttcggccgggtgaggtggctcacgcctgtaatcctagcactttgggaggccgaggtgggtggatcacgaggtcaggagattgagaccaccttggctaacacggtgaaaccccgtctctactaaaaatacaaaaagttagctaggcacggtggtgygcacctgtagtcccggctacttgggaggctgaggcaggagaatggtgtgaacccggaaggcggagcttgcagtgagccaaaatagcaccactgcactccagcctgggcgaaagagcgagactccgtcttaaaaaaaaaaaaaaaaaaaaaagagtcgcagaacttcagagaagagcctgaattaccagcttaggtaaattacttctacaaagataactgtctattggggaagggggtatacccataatctttcagtattagtggatacaggatctgagctta

SEQ ID NO: 731273 - DNA, 569 bp, Homo sapiens
caatgtaaagcaaagtgtgaaaatcagagggcctccttgggggcatgtttaaagagactctcgtctccttaaactagagggcaagaagagctgaatattcttcacaagcattaattgtaagagttgcagaacttcggccgggtgaggtggctcacgcctgtaatcctagcactttgggaggccgaggtgggtggatcacgaggtcaggagattgagaccaccttggctaacacggtgaaaccccgtctctactaaaaatacaaaaagttagctaggcacggtggtgcgcacctgtagtcccggctacttgggaggctgaggcaggagaatggtgtgaacccggraggcggagcttgcagtgagccaaaatagcaccactgcactccagcctgggcgaaagagcgagactccgtcttaaaaaaaaaaaaaaaaaaaaaagagtcgcagaacttcagagaagagcctgaattaccagcttaggtaaattacttctacaaagataactgtctattggggaagggggtatacccataatctttcagtattagtggatacaggatctgagctta

SEQ ID NO: 731274 - DNA, 607 bp, Homo sapiens
atggcaatggagccggtggggccagtgtcactggcacagaggaagaggcatgtctgcccctcaaggacccagaggaggcagtgagggtgggtgaagattcaggagtaggaggaggtgtgagggaaggggtctttggcccgtgggagggcttatttcccacctggtggcttttattttctctgggcctggagaggcgtggggctgcctggaagggaagggggatgtgggcatcaagagggaagctgggaagggcctccttgcagaatcaaaaaggagccagtgaygcaggaaagggctgctgagtaattctgaggttggaaacgcacctcggtgactttcacgtctattccatggagccggagtgaggctctctgtacgcaccgtggaacactgtgctattgatggctgtgagctatggactgtgtccacacagggtcgcccatctaggcgcctgctttatagtccaaatgccaggtggggtggggcaagtggaccttccagtgccctttgaggagctgctgccaggaggcagggccacgtgtgtgtgtgaagaggggatggaggtgcctggcccaggcagaggtgcacagtgtccatgagggtcagg

SEQ ID NO: 731275 - DNA, 498 bp, Homo sapiens
ctcttttggggtagaacctgtgtgataagcacagctgctgaagtgacgcaaatcagttaaagaaggcaatcagccagacctcaaatcatcacatctagtgcttaaaagagaggacacagaaagtacaaaatctttcttgtagaatgatcaaatagaaaattgaagaaagttattttagatttttttagacatttattattagaaataaacaccaatgtaatacttgtcacaggtaaaatctatccatggatgctaaamttaatgggtaagagtataagaaacagaacgtttagatagtttcaacgtatctttgtgcaagtatttgttaattacaaggaggaaaatatcaattttacagtggagaagcctggcagacacaaccttaagggagtaatcaaagttagcatcaccagaaataagacgtattgacttcatttgcccactggcacgatgccagcatctctgagaacaacactcagcctgtagagattcaacatc

SEQ ID NO: 731276 - DNA, 604 bp, Homo sapiens
aaaggcaactgataactaatgtgccaatataacatttacacattgaaagttttatttgttccctgaaccaaggaatggaaattcttctattgtcttcccctctactttttaatctccccatatttcctgacacattctaaggtctggatattaagagtttaaatattgattattgcttttccttccttctaatagaaagcaaatagcagtatgtattttttaaaaagaataatattttaacatttttctccactgaacttagaacagggaaggaaggttgggagagaaaagcagaacacaggaacacaacacatggcaggaaagacagagragataagaatgttcccaaatacagttaaaggcaccagcttggcattttctattctgaaggaacttttaccatagggagagagagacaggggtgagttgatcagctgtgctagggatggagcataattgtctccctaaataagagctttgcccattaaagtggcatgtaggtaagtttttaaaatcaccctggttttccaatttgtaaaactatatcttataaaaaggaaaacacatctacaatgtctatatgcttcaaacatcttgttgtaca

SEQ ID NO: 731277 - DNA, 608 bp, Homo sapiens
atgattttcctaagtttccatttccgtaattctgactacacaactgtcattaattctttaaaaaagtcaatcattttgttttctagatccaaacgtattgttcgtacatagtgttaatttagtgtcctcctttctaatagyaatacttagaatttgttatatatcttaagtaattggcaggtaaacttctttctgaacagaaaactatttcttataggatttacttggtaacagtttgttagcaacaagtctcaatgactctttcacataagaaagaaatgcaatgtctttgaaacattgtatgcttctgactttttaaaactaatttaaaatactggcttatcccagtccagattttattattattgttattgttatcatttattttattggcaatgtatcaaggaaagtgagagccagaagaaaactgaaaagtaattgagtatacccagctgctatttgagtcaactcatgtcctgaatacctagtttgattttgatccacattgatggaaaggtaaaggaaaccaactaatctatgaaggatcatgtggagagtgagtgttacacaaatcatacggaaacaaaagtgatcactcttggatactt

SEQ ID NO: 731278 - DNA, 592 bp, Homo sapiens
tgctaaaaaatattaacaatcatctcagccttgagcaagtcctaatctttttgctggtagagggtcttgcctccatgtcaatggctgctgactgatcagcattatggttgctgaaggttggggtggctatggtaatttcttaaaataggacagcaatgaagtttgctgcatcaattgaccctttcacaaaagacttttgtgtagcatgagatgctgtttgatagcaatagaacgtctttcaaaactggagtcaattctctcaaaccctgctgctgcttttatcaactaagtttaygtaatgttctaaatcctttgttgtcatttcaacaatgttgacagcattatcgccaggggtaagttctaactaaagaaactactttctttgcttatcgaactcctcatccattgatcatgagattgtggcaactcggtcaatctttagcctccagttctaattctaattctctcactactttcgccatatttgcagttaattcctccactggaaccctgccaagtcatccatgagggttgaaatcaacttccaaatttctgttaaagttgatactttgacccatgaatcacagatgtt

SEQ ID NO: 731279 - DNA, 655 bp, Homo sapiens
aacacaataaataactgtagattttaaatgccttacattttcccaacctttgtaaatttatccaactaagcattttgcagcttcatacatatttttactaccattaagtgtgacatatcgtagtagattccgtctcagattgtactggattagtattttctcaaattctttgaaaatctcttacaatttcacacatatttttactgtcatcagatttgrtatttcttagcagattctaccacaggttgtactaaattggtgttttctcaaattctttgaaaatattctcacctctagttgctccatgcagactatttatagaagctaattcttcagtcacttccaaattggcattgattccttgaatcagtaacaactgagcagtatcagtaacattgtgggctcatcgggaaccaagaaaaaccaccctaaattatttgtcttttttttttaaattgactattgatgttgcttccaatgtcctcaactctctgagcaattgttcttactggaaggctaaaggtcttaaacaagtttattttctctggacacatttctttggctgttgtaattgatctcaatttagttaactcaccatgggtaaaccgctttccttgcttggctaacaagccactcagaaacttctttggttgca

SEQ ID NO: 731280 - DNA, 609 bp, Homo sapiens
acctaatacattaatttataaagatagtttactcagattacttaagaaaactgtgatagttatcacttaaagttatttacctgttaaccatttttataacctatgaatttcaggttttcctaagtaaggaccttaagrttagataattgttttttttttgtttgtttatttgtttttgccaatacctcaggacttagctgttttcattaactgaacaaaaaacctgccttatttattaagttttacataaacaaacataattctcttttgagctgcattcatagctttataaccctcatggcaaattttgacgtttaatagaaataaataagttgacaatccttaagccattgctaattctactccaccaaaatttttaaaccaacatatttattaaagatttacttaagtgacatgaacttgaaaaagcatttggcttaacatctatttttctgataaagtatttaagtgtttctaaagtcaattaattagagcattttatacatttttagtggtgaaacatcatgtacatgacagatgaacacatagacatactagacccatagaaagatcttacagatctgttactggaaaagggtccccatccag

SEQ ID NO: 731281 - DNA, 609 bp, Homo sapiens
acctaatacattaatttataaagatagtttactcagattacttaagaaaactgtgatagttatcacttaaagttatttacctgttaaccatttttataacctatgaatttcaggttttcctaagtaaggaccttaagattagataattgttttttttttgtttgtttatttgtttttgccaatacctcaggacttagctgttttcattaactgaacaaaaaacctgccttatttattaagttttacataaacaaacataattctcttttgagctgcattcatagctttataaccctcatggcaaattttgaygtttaatagaaataaataagttgacaatccttaagccattgctaattctactccaccaaaatttttaaaccaacatatttattaaagatttacttaagtgacatgaacttgaaaaagcatttggcttaacatctatttttctgataaagtatttaagtgtttctaaagtcaattaattagagcattttatacatttttagtggtgaaacatcatgtacatgacagatgaacacatagacatactagacccatagaaagatcttacagatctgttactggaaaagggtccccatccag

SEQ ID NO: 731282 - DNA, 466 bp, Homo sapiens
ttttttttgtttgtttatttgtttttgccaatacctcaggacttagctgttttcattaactgaacaaaaaacctgccttatttattaagttttacataaacaaacataattctcttttgagctgcattcatagctttataaccctcatggcaaattttgacgtttaatagaaataaataagttgacaatccttaagccattgctaattctactccaccaaaatttttaaaccaacatatttattaaagatttacttaagtgacatgaacttgaaaaagcatttggcttaacatctatttttctgataaagtatttaagtgtttctaaartcaattaattagagcattttatacatttttagtggtgaaacatcatgtacatgacagatgaacacatagacatactagacccatagaaagatcttacagatctgttactggaaaagggtccccatccagatcctaag

SEQ ID NO: 731283 - DNA, 646 bp, Homo sapiens
gtcggcaccaaatgtctcacgtgtccgtgtgaagagaccaccaaacaggctttgtgtgagcaacaaggctgtttatttcacctgggtgcaggcgggctgagtctgaaaaagagagcaaagggtggtggaattatcattggttcttataggttttgggataggcagtggagttaagagcaatgttttgggggcagggggtggatmtcacaaagtacattctcaagggtggggagaactaccaagaaacttcttaagggtgggggagattataaagaaccttcttaaaggtgggggaggttacaaagtacactgatcagttagggtggggcagaaacaaatcacaatggtggaatgtcaatcagctaaggctattttcacttctgtggatcttcagttgcttcaggccatctggatgtatatgtgcaggtcactggggatatgatggcttagcttgggctcagaggcctgacagttgtagatgtgtggtgttatttctgaggtctctcttctgttccattggtctatatctctgttttggtaccagtaccatgctgttatcattactgtagacttgtagtatagtttgaagtcaggtagtgtgatgcctccagctttgttcttttggcttaggattgtcttggcaatg

SEQ ID NO: 731284 - DNA, 602 bp, Homo sapiens
atttgtattcattcatttattatattgcaactggcatattccagcagctcaaagcatgaagcgggaacacaccctggagaggacaccatcccacactcactcacactgggatcgtgtagacacaccaactcacataacatgtacatctttgggacgtgggaggaaactggaatacccggagaaaacccacacagacattgggagaacgtgcagactccacacagtggagtttccctggctgggaatccattttttttcatatcaacattataattaaatgatgttgaatgaaattatgttatctgaggatctgctgtgcatatatagttctctatttcactgctttgtctacctgcaagtaccacattattttttttgtctatgactttgtaaaacattttagtatctagtggtgtgaatcttccattttatgtttttatgtggtatagttgcttttyctaatgtgaacccttattctactttatatattttggaaatagtttatcaggttccctaccctctccccaccctaatcccgcagaaaaagaaaaattttacctgaattttggttggatttgctatgaaattatagattaatttgg

SEQ ID NO: 731285 - DNA, 608 bp, Homo sapiens
atggttaatcaatctaaatggtatttttacagtctataagaattttaaattcttctgctagaataaaaccccctaaagatttcaatcttatagacacttagaaatcccctggatcataggaaatagttttaacgatagcgtaaagtttaaaatgcacacacacacacacacacacacacccccacacacacatattctcagcaaacaaataacatgacaggtagtttgatcacatttcacagaataaaagtataaacatactaagtaaattccacactaaatctccatyaccacatgtgcatacattataagtaaatatatcaaggaatctgaacacttgagaaatgccatatgtaaaaattatctgacactggctttttaaattcttcggcaaattttgagtatgcacttgacgccagaatatgtaagcaaacaatgtaagcatgtatgcacccaaattagaagcataaatagtcatctaggcagtagatgaaaatgtcattccctaggatgagtacagtttcatgggtaattgatcatatatgccaaatctgggaatgtattcccagacagtgacttgaaagaccttgaaactataaaggcaagga

SEQ ID NO: 731286 - DNA, 608 bp, Homo sapiens
atggttaatcaatctaaatggtatttttacagtctataagaattttaaattcttctgctagaataaaaccccctaaagatttcaatcttatagacacttagaaatcccctggatcataggaaatagttttaacgatagcgtaaagtttaaaatgcacacacacacacacacacacacacccccacacacacatattctcagcaaacaaataacatgacaggtagtttgatcacatttcacagaataaaagtataaacatactaagtaaattccacactaaatctccattaccacatgtgcatacattataagtaaatatatcaaggaatctgaacrcttgagaaatgccatatgtaaaaattatctgacactggctttttaaattcttcggcaaattttgagtatgcacttgacgccagaatatgtaagcaaacaatgtaagcatgtatgcacccaaattagaagcataaatagtcatctaggcagtagatgaaaatgtcattccctaggatgagtacagtttcatgggtaattgatcatatatgccaaatctgggaatgtattcccagacagtgacttgaaagaccttgaaactataaaggcaagga

SEQ ID NO: 731287 - DNA, 608 bp, Homo sapiens
atggttaatcaatctaaatggtatttttacagtctataagaattttaaattcttctgctagaataaaaccccctaaagatttcaatcttatagacacttagaaatcccctggatcataggaaatagttttaacgatagcgtaaagtttaaaatgcacacacacacacacacacacacacccccacacacacatattctcagcaaacaaataacatgacaggtagtttgatcacatttcacagaataaaagtataaacatactaagtaaattccacactaaatctccattaccacatgtgcatacattataagtaaatatatcaaggaatctgaacacttgagaaatgccatatgtaaaaattatctgacactggctttttaaattcttcggcaaattttgagtatgcacttgacrccagaatatgtaagcaaacaatgtaagcatgtatgcacccaaattagaagcataaatagtcatctaggcagtagatgaaaatgtcattccctaggatgagtacagtttcatgggtaattgatcatatatgccaaatctgggaatgtattcccagacagtgacttgaaagaccttgaaactataaaggcaagga

SEQ ID NO: 731288 - DNA, 646 bp, Homo sapiens
agcctattggtgccatttttccaacagcatgtgcttacttcatacctctgtgtcatattttggtaatttccacaatatttcaaacttcttcattattagtatacatgatatggtgatttgtgatcagtgagcggttgtgaccagggaatggttacagcaggccttggatgagacccagtgctgtgcaggtctcaggtctgacccagtgcagccgtagttgtggtggccacagcagtgcctgtgttactccaccctcagcattaggtggctcagaacagaaacaaggrctccatttgtttgggggaaaaaaaagggaaaagaagaagagtctccacctggtaatccagagaattcttctgggttttgttcaagatcctcaaggtggtaccctctacaaatctgcaagaaccacagtgttacttggccttgggtacccctccaaagcaaatacaccttagatcacaatatccaagttctttcaaatatcttcaaagccttctcaagaaggatgggtataaacaagcccagatagtgaacattacaataaatactaaacacttcaatacccagatactgaggaacatcaacaagcataagcaccatccaggaaaacatgacctcaccaaatgaactaagcaaggcacca

SEQ ID NO: 731289 - DNA, 646 bp, Homo sapiens
agcctattggtgccatttttccaacagcatgtgcttacttcatacctctgtgtcatattttggtaatttccacaatatttcaaacttcttcattattagtatacatgatatggtgatttgtgatcagtgagcggttgtgaccagggaatggttacagcaggccttggatgagacccagtgctgtgcaggtctcaggtctgacccagtgcagccgtagttgtggtggccacagcagtgcctgtgttactccaccctcagcattaggtggctcagaacagaaacaagggctccatttgtttgggggaaaaaaaagggaaaagaagaagagtctccacctggtaatccagagaattcttctgggtyttgttcaagatcctcaaggtggtaccctctacaaatctgcaagaaccacagtgttacttggccttgggtacccctccaaagcaaatacaccttagatcacaatatccaagttctttcaaatatcttcaaagccttctcaagaaggatgggtataaacaagcccagatagtgaacattacaataaatactaaacacttcaatacccagatactgaggaacatcaacaagcataagcaccatccaggaaaacatgacctcaccaaatgaactaagcaaggcacca

SEQ ID NO: 731290 - DNA, 646 bp, Homo sapiens
agcctattggtgccatttttccaacagcatgtgcttacttcatacctctgtgtcatattttggtaatttccacaatatttcaaacttcttcattattagtatacatgatatggtgatttgtgatcagtgagcggttgtgaccagggaatggttacagcaggccttggatgagacccagtgctgtgcaggtctcaggtctgacccagtgcagccgtagttgtggtggccacagcagtgcctgtgttactccaccctcagcattaggtggctcagaacagaaacaagggctccatttgtttgggggaaaaaaaagggaaaagaagaagagtctccacctggtaatccagagaattcttctgggttttgttcaagatcctcaaggtggtaccctctacaaatctgcaagaaccacagtgttacttggccttgggtacccctccaaagcaaatacaccttagwtcacaatatccaagttctttcaaatatcttcaaagccttctcaagaaggatgggtataaacaagcccagatagtgaacattacaataaatactaaacacttcaatacccagatactgaggaacatcaacaagcataagcaccatccaggaaaacatgacctcaccaaatgaactaagcaaggcacca

SEQ ID NO: 731291 - DNA, 585 bp, Homo sapiens
gtgcgttgctttgggactttattttcaggagaagcttccaggggggaagcccagagtagtgggtgaaggagctgaagaaaggtgggttttggtgactgctacggagaggatgaaagggggctggagacacccacaggtctgttactcagggagcattaggaggtggattgtgtccacagaagtgcagggaagatgaggagcacgtggggcccctggagctggtgagaggaagggaccagagtctcccttgcaccccagaagaagccagcccacctggatgttggccttctttgtccagaactgggagggaacacacgtctgttgctgcgagccacctggcctgtggcctttgtgacagcagccccgggagactaatgggaggccctgctctgctctsggcacagctgctggggtcctgcttcctctctgagccctgacaggagtggcccgggaaaggcttggggcgctggcctggggaaggcttggggtgtggtatccgggagcaggtcccaggtgtgcataggacttgctcagctcttggctttctgcatctcttcaggaagctttgttatgttgcatgcaatg

SEQ ID NO: 731292 - DNA, 554 bp, Homo sapiens
acccaggcacgactcttggtgttggggatccactgtgaactaacgaagtgaactcaggaaggtaaccctggaaaccaccgcatgcaccctccctgagggattcacatcccattgctgcatccaccccactgggcctgaactgggggaccaggacccccacaactgcctgggtgaaactcagaggcgccttgcattttcagaaggccactttactagaagtgacatctccaggagctgtgctatgtgagcctcgccttttactacatctcttttaactagaagcacatcctgtaagagcctaggatggcgtscttgtggcgatgtttgtggcagtccctgttttggtcctgcatgagcctgtgctcggcaagagcaaagcccagtcatccctgggtctgcttttggaatatgttgtggtgcttaatgagaaggctcatcatacaagagcatggcggtgttgtaaatacacagaataggaattacatgtataaattaggaagttagagacaaccggttctgactgcaatttgcctgtttaaattttgtagcatgtc

SEQ ID NO: 731293 - DNA, 547 bp, Homo sapiens
ctatataatttgagttccagaaagttacatctgatcttccagagtttcaggatatcctgccaatctttgtcctgtagggagagttgagacctctgaaaatcagagctttgcaacagattataaccaaggaggccaaggaaatgaaataaccatgtgatcacaagcaaccaaagttccccctgatccatcctgagtggccgcatccccccttgctgacaagcagtgacatgcgtgagtgccttgatcagaatatgacataacaaacgtcactgtttcctcagagcctctagctagcttgggaagatactttctataagtctgatggtattataggagacgttcaagattcactagacatttcaagaagcaggtraaactgtcattcacttctcaagaagaaaatctaaaaattacactaggattaaatccgactccatttttttattcattgtccagcttttatcttattctacttcatgcttcaaaattatagcctagacatgttaaatcagtgcttgcattgtgtactcaccccttcgttcccccc

SEQ ID NO: 731294 - DNA, 629 bp, Homo sapiens
tctacacgcaacatattaggttggtcatttcagaaagataagcccctgcgttcgtgacaggccccaggaaggcatgaactcaggcaagaacttttgccattaattttaaaggcaaaaaccgcaattacttttgcaccgaccaaatatcatcatgtttcacacttgtgaaaacagcatggaaaatctttcctaagaacgagccttatttgttcaccatttacatgtttcatagtatatctgggggccagttccagatcttcttcacttcattaaattccatggtgtccagggcaggacggaagaatgaataaattctcagcaaaccctttttttttttttttttctgagatggagttttgctcttgttgcccaggctggagtgcaatggcatgatctcggcatactgcaacctccgcctcccgggttcaaacaattctcctgcctcagcctcccgagtagctgggattacaggygcccgccaccacacctgactgatttttgtatttttagtagaaagcggtttcaccatgttggccaggctggtctcgaactcctgacctcaggtgatccacctgcctcggcctcccaaagtgctgggattacaggcgtgagccactgcgcctggcctc

SEQ ID NO: 731295 - DNA, 599 bp, Homo sapiens
attccataaaagaaatatcactcaggaaacaaaaaagacaacatgagaaaaatactttttaacttaattggggaatagagatggagaaaacaacccagataatagaaaacaaaacaaagaaaaggaaggcagagatggaaagaaacaatttaaggattagtctaggaattttattatctattttcaatagaaatgtcatgcgaaacaaaagagctgagaaccagctggtgaggtggccccgtccttttgcagtggcccaagtcccctccagcccayggcctccccgtctccagcccaagggacctagtgcatgagcagcagcttccacacacaagagtctcctatgggggcagtgggaggacccagaggagttttctccaagaaggggaatttcactttgtgaccagacacaaaaggacctgccctggtaacccagtaggcaaggaaagagctggattcatccccaggggtgcgtggccctgagcccaaactctgtctcccatcacagccctggaacatcctccatcatctctgcagggctcccacaaccaccacagccctgaaacagcccccaccatctccataaccccaccctgtct

SEQ ID NO: 731296 - DNA, 514 bp, Homo sapiens
gggggaagccaccttggccctgaatcccacccctcctcctcctgggacccaggattcctggacagcagccaggagggccaggaggagagcgtggcagcctctggtgggcgtcccagctatcggctgggcagggggagggcaacgtttagtgaatatgctcaaccgacgtgtgctaattacaaaactgagggcgacattctgactgcgtgagagtcagagtcccaggaacgcaggagtttccatcctgggccagcgagagagyttggccctgtataggttttacaggggcagcaggagagtaaggtaactgatgaaccaggtgctgttggcacacccaggcgggccctgtctgcgagacaggctggctgcacaccacctctgccaacagcacagccaccctagaatgggcgaagacgtgcccgctttataacgagggccagagagggtgagaaacggccccgggtcacggagctggaggggaggctgtgtggatcccatcccctggggctgactc

SEQ ID NO: 731297 - DNA, 584 bp, Homo sapiens
ggagattctaatctggggccctcccttccctggaaataagattctggaaggggtaggggtgtggactgtcttagatagaaaatcctaatctgggtccctctctcccctggagataagattctggaaggggctggggtttggggccctctctcccctggcctggggcacctgtccctgttcccstgacccggccacactgtgatgacacgaacctcttgccacccccagccctggggcctggctgaggtcccttaagggtctgctttgccccccaccctcacctccaaagtgcagcaacagctttgccagcgacctctgacctctccctgaccctccactgcctcccacctcccaccctcattacatccccggccctgacctcatgtctgcggggccatgggcgagggtgagataaggcggccattgcaggctgtgctccctcctgggtaccgacgggaagggcgggccaggccgccagcctcagaagagagtggcccatgactcaccaggtgggcagcgcccaggccggcgtccgggaggaaacgccacttcctctgggtgaggcaggaggctggcgggggaag

SEQ ID NO: 731298 - DNA, 621 bp, Homo sapiens
accatacgagagagcatgtgaaaggtgtcagtcccttgagtcatctcaaaccgaactttctactttacagatccaaacagggcagctgtgcagcaagcccctcctccttagagtgtcttgagtgagttgctgtttyctttggcccagagtgcccaaattcatacagactaagattacagcactccatttactgccattcttacagctacatttcagactgacagttaatatttctctaatctttttgtaggtctttttgttagaaacaagtgaagcctttattttcacaacatcaatatttcaccttcttagattgggtccattatcccaacctgctaaaaacttttgacttcccaatcttgtccttacgaaatattcattatgccatcatctatgagttagacaagaacactatctagcaaaatattaatgctactaataaaaaatttaaaagccagcaacaataccaaattggacacaattttagagagcaaacagtagtataaaaatttgaaaatcaaattgttagtaaataaatttattttagtgtatgtcattacttaaaattaataattaccaatactctaagttgattgccaattatcctgaaaatataataag

SEQ ID NO: 731299 - DNA, 621 bp, Homo sapiens
accatacgagagagcatgtgaaaggtgtcagtcccttgagtcatctcaaaccgaactttctactttacagatccaaacagggcagctgtgcagcaagcccctcctccttagagtgtcttgagtgagttgctgttttctttggyccagagtgcccaaattcatacagactaagattacagcactccatttactgccattcttacagctacatttcagactgacagttaatatttctctaatctttttgtaggtctttttgttagaaacaagtgaagcctttattttcacaacatcaatatttcaccttcttagattgggtccattatcccaacctgctaaaaacttttgacttcccaatcttgtccttacgaaatattcattatgccatcatctatgagttagacaagaacactatctagcaaaatattaatgctactaataaaaaatttaaaagccagcaacaataccaaattggacacaattttagagagcaaacagtagtataaaaatttgaaaatcaaattgttagtaaataaatttattttagtgtatgtcattacttaaaattaataattaccaatactctaagttgattgccaattatcctgaaaatataataag

SEQ ID NO: 731300 - DNA, 584 bp, Homo sapiens
ttttttttttttttttttctagagacagggtttcaccatgttggctaggctagtctttaactccaaagttcaagcaatctgtctacctggtcctcccaaagtgctggggtaacaggcatgagccactgcaactggcaggatgagctaatgattgttttgattttctaaatgaagcatgtgatgagatcctcatcttgggcaagcgggaaggagaggcaggaaaggaagggaggagtgaragacagaatttgagtgtggggttatgaacttactagaaaaatacagtaacactgctgggctcatctgatttgtggtcatgaatttataatcaagtctgtccaatcgtgatttttttctattctaccggctcttctgatgtaggaagagaaaaggcaaagagatatttgaattcaaccaggaatgtaatttaggcaagtgagaacaataggcaacagagcaatgttgttcaaagttttaccggagaatgattattatggtccagaaagtcagagtaaggatggacgtgaatacagaaagggtactgtttttcagattttgaaatatctgcagtacacttaacagct

SEQ ID NO: 731301 - DNA, 613 bp, Homo sapiens
aacagtgagcactactttgctaaaaaaagtctgtgtgttctgaataaatggaaacgtcttaccaatatatgaattgctgatctttaaagtaaataaataggcgaatagattcttatccacatttcttctagccacaaattttaaggaaatcctgcagtcctttacaagsgggggagtttctcagctagatggaaagatatgacgacaatttccccattcacaaaacatttcctgtctccgtaagtacccactgcccaattactcattttacacttattctgtgtgaatttacattgtgacttggcatttttaggcatccgtggttcctactgatttcctctggtccccattggtttcctttcttaggctttactgaatctcccaagggccaaagtagaaacccaattaatgcgtgcataacctagatggctcatgcccttacttttacattctttccattgcatgacactgtcttggagctctttaaggaagcatctttcaaaatcttgtgtgtgagagagagaaaagactcacagaaggaaatgtagaatgggaagaaactattcatgaggaatatctctttaatatagtaagagcatgttggtagaaaaat

SEQ ID NO: 731302 - DNA, 670 bp, Homo sapiens
taaatgtttgaggtgatggatatacccaattaatctggtttaatcattacacagtgtatgcatgtatcaaagatcacctgtaaatatgactaatttgtatatgaaatatgtataatcattatgtatgaatttaaaaatgaacaaaaaaggtaatatcctgtgcctaaaagtgttggttttaaagtcactgatgtcttttttaactagaatttaaacacaggtggtttgattctgttccaatctttcatttcactggtaaaaccagtctagagaaataaaggctgccaaaaacaaaatctatgttaaaaattaaaaactataaaatttaaaaataacaaagccttaatcagagcctcaagtattaaaagagaatctgattgttgcatctagattgattaaccaaarcaagtgtcattggtgtgaactgatttacttaattcaattccctattttaagacatatagataactttacagctcaataaagatttagaataagagaaaaaaaagatgaggtggaaacggcagagtgagattcaggagaccaggactctggttccagctgttagtgttcagtaagttacttaattttgcctcaaattatttttcttgtgtatgaaaaagtgacagattcgtggacctttaaagttcctgaaaagatggtagtgaac

SEQ ID NO: 731303 - DNA, 542 bp, Homo sapiens
agcaaacaggggataaagaatgctgagagagaatgtcacaaagattcctgaaaaagaaaaaaagtaacacaggacaatgtaaattgttttgggttaattctatttagctgagatttcatcctactatcgtacgaaaaattgacaagggggacttactatatatcaaattccatgattaattttaaccaagcattattgtacttaatgacatcaatgtctaagaaattttaagcaacttaataggaacaggtaatgaaaataggtaacataattccaattacattgcagtgtaggacagaagtytgaattacccctaaatagcaggaaacaactgtgcacacaaatcaaaaagaaaaaaaaggcacttgatcttattctactctgatgcttcatgggaatacaccgtgctctataatcacatcaacaacaggccgtggcggggaagaatctaatacagactgaaaagaacaaacaatgaagaactaagtatttgatcaaggttgacaatgtcagagaggaactcagcaatgcaattagtattt

SEQ ID NO: 731304 - DNA, 608 bp, Homo sapiens
gccaggttggcgtcttgaaacagtctattcaccttttcaggccactaagtagtaatggtgacatttagcacttcacagtgttttcttagttcccctacttactaataacccaatttctccagtgtttcccttcatggaagggtaaagaaaatttcacacaaatcttgaagccatcatggtcctctgaatcacaaytggtcagtacagttggggtaagcaggttcttgcctgctttttagattgtcccattgactttgcttcctttcaaggcttcacattgctttctagtggcccttggcacttttgtaagaaacataagcccttggtacctagacaagaatgtgtagatggatcagttccattgagaaagctggtccaagggtatagccagaaagattaatcctgtagcagcatttcacatgtagcttgtgattcctagctgttcattttgtgttggtaatctagagaagcttgagggaattgcctttctctccacatctgactgccttcaggaagtgcattttggacagagttggtgtcacgaacctgtggtataaccttataacaaaatgtgtctacgtcatctcaaagcttacttttcaatttaa

SEQ ID NO: 731305 - DNA, 607 bp, Homo sapiens
gctaaaagaaatgtctcacatattaatatagctgctggtaagaatgcctgtttcactcaaaagattccgaaaagatttgaaatataagtagtaagagacaaacattaacacagtaaagaaaaaatagcaaattttgtggagtgggaattcaaatggaattatagggattgatatttctgcctggagtagtataccatggaattcctaaactcagaagttaatcagataattatattgtgctacggaggttaatgctatacccattayttgattattaagtgaaattctatccaccatcttttcatgtatgccaataaaattgaactcctcagccctattttagaatctaaatactatctaacaaaattctagaaccttgccttcaaaattaacaaaatgaatttcaggaagagatgaagatgcccactttcctctcgagctctttctccatcataaaattagctttgtaaaccaaaatgaatgcttgtgaatattcacaactgtaacccacttattctattttctgataatataaatccgatcttgccgatgtatattaaacaaagaggtcttgcaaaagttaaaaaaaaaaaacaacttagaacgg

SEQ ID NO: 731306 - DNA, 602 bp, Homo sapiens
aatagccatagtcaaggagaagatgaagagaattaaagaatacttaattcgttaattaaacattaaggtttattatcttatttctcttatcatctctctttcctctaatatgggaagattcaagggcagatggaaaaaggcaatcatgaaattttgccttcaattatctgtcttcttttgacatttctttaggttgtctaacacacacaggacttcagttaccatccatgtgctgatgaattccacttctttatctcctgaatttcagactattactttaagatgtttattgaacacctcaacctaaacagtctggaacaacagtccctcttaaactttcaagtgcataagaattaccggggratattcttgaaatgcggatttaggttaagtagttcaagagaggaaggttttagagtgtgcattttaaaccctcccaatttaggccaatactcctagtccatgagcaatattttgagtaataagagtctagaggcactttaaactcttcatattacaaacagattttattattttttaaaaatcaatttctcctcttgtctgtttttcttaatggtgctactatctttgaaaacatttaa

SEQ ID NO: 731307 - DNA, 556 bp, Homo sapiens
tttgtaagttttttctttttttgaagaaatgtcttccaggtcttttgtccatttttaaattgggttgttttcttgctattgagttgtttgagttccttgtgtattttttatactgaccccttatcagatgtacaatttgcaagtatttcctcatgttcagtaaattgtctcttcactctattgattgtttcctttgctatgcagactttttttgtagtttgatacaatctcatttgcctagttttgctttttgtttcctgtgtttttggtgttatagctaaaaaacaattgcccagaacaatatctggaagcttttttctatgttttcttcttgtagtttcacagtttcaggtctcacatttaagcctttaatacattttgagtttatttytgtatatggtataatatgatactccaattccatcttctgcatatggatatccagttttctcagtactaaatagaagaggctgccctttccccattgtgtgttctggatattttgtcaaagatcagttgactgtaaatgtgtgggtttacttctgggctccttatt

SEQ ID NO: 731308 - DNA, 516 bp, Homo sapiens
agtcctttcaaatatctggaaagctttcccaagaaggatggctacaaatgagcccaaacagtgaagactacaataaatacctaactcttcaacgccaaggcaaagaagaacatctacttgcatcaacaccatctaggaaaatactgtctcaccaaatgaactaaatatgacatcaagaaccaatcctggagaaacaaagatatgtggcctttcagacagagaactcaaaatagctgtgttgaagaaactaaaaaaaaaaaaaaaaaaagtcatgataacacatasaagggattcagaattctatcagataaatttaacaaagagattgaaataattaaaaagaatcaagcagaaattctggagctgataaatgcaattggcacatggaagaatgcatcagagtcctttaatagcagaattgatcaaacagaagaaagaattaatgagcttgaagacaggctatgtgaaaatacactgtcagaggagacaaaagaaaaaagaataaaaaccaatgaa

SEQ ID NO: 731309 - DNA, 564 bp, Homo sapiens
tctcaaaagaagacatacaaatggcaaagaaacatatgaaaaggtattcagcaccacggatcatcagagatatgcaaatcaaaactataatgagctatcatctcaccctagttaaaatagattatatccaaaaaacaggcagtaacaaaggctggcaaggatgtggagaaaagggaactattgtacactgttggtgggaaggtacattagtacaaccattatggagaacagtttagagcttcctcaagaaactaaaaattgagctaccatataatccagcaatctcactgctgggtatatacccaaaagaaaagaaatcagtatattgaagagatatctgcactcctatgtttgttgcagcackgtttgcaatagctaataagaggaagtaacctaagtttccataaaaagataaatggataaagaaaatgtggtacatatatacaatggagtaccattcagtcataaaaatgaatgagacctagtcatttgcaacagcatagatggaactgtggatcattatgttaagtgaaacaagccatgtacagaaagaaaaacacttca

SEQ ID NO: 731310 - DNA, 637 bp, Homo sapiens
tttaacgggatccgcaggtgattcctatgcacattaaagtgtaagaagtactgggctacagacaggtatgtgacaaaataatttcataggatggcaaaggccaagtggcaaatgaaggacaccagaaatgcacgtcccaggagcccaactcctccttagtaaattaccctattaagatttgtttagagatgttcaaaagcgtggagaaaagcaaatttggtttcctcagctagggacgcggagagtggtctggtgcccttgaagagatcgccctcgtgtggagtagggagggaatctctagcctttcctctcggatgaagaacagcaccagcgctcccagccaaaggcctggcccargttctggaggtggggtctccttggcagaagcctctggtgtctgcaggcgtgcatttacagctttaagaccaaacagctagtccgccacgtgtcactacagtgtgcacgcgcagaaatgcacaaagcaaaaaaaaaaaaaaagatgctcttaatgaaccaactataatccttgctaaggcataaagccagagggaagtatgtatctgaaatcattttctacccctcaccctcttggagcccggcactctggctgcggtgctctcttgtatcccagttgcta

SEQ ID NO: 731311 - DNA, 623 bp, Homo sapiens
agccatttcaggttattcggggggagctgctgtgcctgctcacctttttgatattcccacaatgctttgctgactttgcagcacccagtagtttttgatggactgaattaggtgtaattctgcctatccaggatgatcagctgttcctaaaggtccccagagacgataacatctctgctctgagtatccatgccagtgtttaatagcctcttgaaattttctccttgaagtgatctgtgacttgttgaggtggggaagaaggtgtcagcaggggataagcatgatcaacttgatcgtagctgaaatgtgaactttagtggccaaactgagataaaaaatgatcctcacaccttctcaagtagttgaagactattgagttaccagaactgggagaggagaaaaagagcacattgtttaccttaattatttcttgggacctaatcatgttgccattacrttgtaaattctgtagattttcacacttggaaaattcttcttaaatttagagttaggacttactaaattgtaatccatgaaaggtatttgtttaccctactcttcttttaatctcctactacctttcatttcccaaaatacctagaagacaaaaaacagtgtatata

SEQ ID NO: 731312 - DNA, 682 bp, Homo sapiens
gggtttcaactatcagtggggagcaaatctgaaggggcctgatacgtttaattggtagtttagaaaatagtacctgcctcttagggttgtatgtgaagcatgtaacaaaatcataagcctgattttgttaaatcagtccagaaactcgcctattcccctttcacttaatgctggtctcaaatctcaggattctcaggggtctctggacctaacttgcgctttcgtctcaaatgccaagggtctcctgaatttkcagacttctttcctgagacgataacagaaaatatcttaactattactcctattatcaacacttaacacttaggcttataatgtgtgttgctaaaataatagtgcctactatggaaattttagaaaatacagataagcaaaaaaaataaaattactcataattctaccatcaaacataacctctgtttaccatgttatggtaaatactttcaaaactttctccatacacctatatattttatattaaaatgtgttttataaattttagcgtacaaatgcccagtttacaaaatggtcaataataacaagtcaaatgttaaagatgacaggccaagcataagtacttgcttactctctatcctaaaactccattaaaatgaccgtaaaagatacaaagggggaagaactctgaagataatgggatatgaaa

SEQ ID NO: 731313 - DNA, 619 bp, Homo sapiens
ggaccttagttctaattggagtaatatactactcttgtagttaacactgttaaaatattaatcaaaagggggaggtatataagcaatttctaattttataattttgggcaatttgaatttcctttattactataatccatgtctctgatgccagttagtattactatactgtacttaggaatgcagaatcacatttggaacttgaaaatttgcacttttgcatagttgggattctagagagttagtcaagtcagttgtcatactataaattcaccatagaacaaccatatcaatacaaaccagtcagaatgatcgatggtagctaaaaagtatcttgaattaattaatgtatgtcctcacttttttagatgctaaaattgctgagagaagcgaggctcctcgcctctgtctgaccccaaaacataagtttgtctggggtcacagaggtcagctgtatgctkttactatagttttctggcttaggtagaaaaggataacaaatttctaaaattgtcacattaaataggatgtggggagcatgttacagtgtatcttttgtccctgtggtatttattattccacatttctggaaaagaaaccgttaaacagcagtttctag

SEQ ID NO: 731314 - DNA, 518 bp, Homo sapiens
cttttataagccatcctttactgaaactaaacaaaagaaaaccaaagaataaaaaagaagccttacatgaaactattgtacagcattgtgcaaatagagaacttataacagtaggttatttagacacagctcaggccatattatgtgtaatttgaaacattacataactgtaataggcatatctcaaatgtttataagtaaaaattactatgtgggatgatgatgaataaatagaaatgtaatcaaaccatgatctttgctttggaaatgtttttttcttgacawtgtcatggtctcagattttagattctaactcaaattgcatttttatttctggctaacatcccttacagccctgtagcaattacagagtagatcatccagagtaaaagcaaaaaggagagatgaagttaaagggcttcctgctacatttacttggcatgaaattttatatcaaccctcagaggtagatgtgggcactaatcacttcatcttagggacttttcctcagctcctca

SEQ ID NO: 731315 - DNA, 593 bp, Homo sapiens
agttaactgaatgatctctataaaatgtaatttatctcaagcaacttacttgcctaaaatggttcagtggctttctattgtgcttagaataaaatccaaactctgacacagcctataaagcatgcaggatctcctgcctacccacccctgaaacctcacctcatgccccaccccctcactcactttcgttcactttcatggcctacttttcagttcttaaaatataccaagctctatttcactttagggccattcccagagaattcttccacccaaccccactttagtttgcaaagacatttctttaaaggctcttccctcactgccaagtctatgttagcttttcccattacactctcttagaggtactttcrtagtatttgccacattttgatatgtgtttctttttataatgtcctatctcctctggtgaactgtccagtgtatgtgggcagggaccaaatctacttggtttagcatatagtgtacttttgcacataataactacccaataaatatatgctggattaattcagatgtaaacaaagaaaattgcttttctgaatgagggcagatgtatgaagaaaagagat

SEQ ID NO: 731316 - DNA, 591 bp, Homo sapiens
attaatactaatcttttctcctacagagagctgccaaaaatatgactatgactttatttcatttaatattttaatcaatataaactactttttgtttttataaataaaaatctgtatttttcaaaatttttcaggaaaaaacagctgatgagtcaatgtatattttgatttacattttgaatactttttattattccttccaaaacagacactcctagaatatgcagagaaatggaaaacttcagaagatcctttacctttattggaggtatacacagtggctatccaaagttatgttaaagcccgaccttatcttacctctgaatgtgaaaatgtagccttggttctggaacgcttggcattgtgagtagacctttgagtaaataaactagatttagctttaaaaatacatasacacacacacacacacacacacacacacacacacacacacacacaacattaaatctcaagtcttatagtttaattttaaatagattagttatggggagtctgcttatgatactagaattactggttttataatttcctttgaattttaataattattcctctccttaccaacttttt

SEQ ID NO: 731317 - DNA, 657 bp, Homo sapiens
aggtttgtgaatgcaccaatcagtaccctgtgtctagctcagggtttgcatatgcaccaattggcactctgtatctagctaatctagtgaggacttggaggacctttatgtctagctaagggattgtaagtacaccaatcaccactctgtatctagctcaaggtttgtgaatgcaccaatcagcgctctgtgtctagctaatytagtggggacttggagaacttttgtgtctagctcagggattgtaaatgcaacaatcagcaccctgtcaaaacggaccaatcagctctctgtaaaacagaccaatcggctctctgtaaaatagaccaatcagcaggatgtgggtggtgccaggtaagggaataaaagcaggctgcccccctgagcagtatcaactggctctggttctcttctacggtgtggaaagtttcttttttttgcttttgctttttgcactaagtcttgctgctgcttgctctttgggtccacactgacctttatgagctgtaacactcaccgtgaaggtttgtagcttcactctggaagccagcgagaccacgaacccataaaaaggaagaaactctgaacacatccaaacatcagaaggaacaaactccggacacgccgcctttaagaattgttaacactcaaactgca

SEQ ID NO: 731318 - DNA, 707 bp, Homo sapiens
tggccctttctgctgtattcacgcgccctcaccacctcctgtgtattcgtgtgctggagttcagccgccaaggtggagagagactccctgtcggggaaggactccggccccaatgcctcctcctccaggccaggccgccatggtgggtgggaagagaggccactcctagagaaagagacactgtcagtaggtgtcaggaggtgtcccgggagctcgccgcgtggtaaccaacagacacagcccttcttggcattcaaagttgcaccctgatgcctgtgagggagtygtgactttctgttaccactgacccagggcagagttttaaacagtgaccttaaggcgaaaagctccagatctcgttactgaccagtgcagccagccactgccttccttcctttttgattctaaaaatgacactcgggttttagagggttgcttttcaggcagccgaaatccccgcatgcaccttctcgtacatttcaggagagaagaatcaagtccatccacggtatccttgcccaggtaccggtatccatcagagcgtgattggggtttcagcagagccaggcctgcttttcctggcagaggctgggcccctttagatttttcttgtagattttgcttgagcctcccagcccttccttgctcagcacctgtgacccactgggtcacagtgacccacatcccatggctctgaccgcagctgg

SEQ ID NO: 731319 - DNA, 606 bp, Homo sapiens
tttggatggtggcataattgcacatattgaaaaactctaaatttacatcggtggatccagtgcgtctcattatactggaggtgtgaaaactccatgtgcctctttgaacaattgtcctgctctgtcacagttcaggggaaacaaaagtagctccaacttcccgagatttaaatttgactttattccatttagttgatattgtaactagaatttgaatagtcttttccctttctgattttttttttttttttttttttttttttggagatgtagtttcgttcttgttacccaggctggagtgtcgkggcatgatttcagcttgctgcaatctccacctcccaggttcaagcagttctcctgcctcagcctcccaagtagctgggattacaggtgtgtaccaccacacccggctaatttttgtatatttagtagagatggggcttcaccatgttggccaggctggtcttgaactcctgacctcaggtgatcctcccgcctcggcctcccaaagtgctaggattacaggcgtgagccactgcacccagcacccttcctgatttccatttccgcttttatctctccactcccgaagatgtatcaacccac

SEQ ID NO: 731320 - DNA, 657 bp, Homo sapiens
tgcagtttgagtgttaacaattcttaaaggcggcgtgtccggagtttgttccttctgatgtttggatgtgttcagagtttcttcctttttatgggttcgtggtctcgctggcttccagagtgaagctacaaaccttcacggtgagtgttacagctcataaaggtcagtgtggacccaaagagcaagcagcagcaagacttagtgcaaaaagcaaaagcaaaaaaaagaaactttccacaccgtagaagagaaccagagccagttgatactgctcaggggggcagcctgcttttattcccttacctggcaccacccacatcctgctgattggtctattttacagagagccgattggtctgttttacagagagctgattggtccgttttgacagggtgctgattgttgcatttacaatccctgagctagacacaaaagttctccaagtccccactarattagctagacacagagcgctgattggtgcattcacaaaccttgagctagatacagagtggtgattggtgtacttacaatcccttagctagacataaaggtcctccaagtcctcactagattagctagatacagagtgccaattggtgcatatgcaaaccctgagctagacacagggtactgattggtgcattcacaaacct

SEQ ID NO: 731321 - DNA, 562 bp, Homo sapiens
gcattaaagggtttaagaaaagctagtagtttagttgagtaagaaattggtggggtaaatctgtattctcaaggaaatctttctagagacttgctggccatctctgtaatggagttagattcaaatagtgttatgtctaaaatgtagatcattagcatcatttggggaaggatggtgtacrgtgtttaaccattctcctatcgtttggtatattgactgcttactcttttccactctacactaatgtagaaacgcagtgctgcctagaaggcccacatttttaagtttaattttaactgcaactttcccaacctaagctctttgaaatacagaattttaaaactctaattcttcactaataaatgagatccttccaccatgtttgttgttttaagagaaacagaaatacagtggccattgaaaatgaatccagaagtgtatttcagttgtcctctagtcacatatgctttagttaaacctggaaaatgctattagtttagataaagcagtaatcagtgctaaggaacactgaactttgagaattaagctggtttcttgtcta

SEQ ID NO: 731322 - DNA, 562 bp, Homo sapiens
gcattaaagggtttaagaaaagctagtagtttagttgagtaagaaattggtggggtaaatctgtattctcaaggaaatctttctagagacttgctggccatctctgtaatggagttagattcaaatagtgttatgtctaaaatgtagatcattagcatcatttggggaaggatggtgtacggtgtttaaccattctcctatcgtttgrtatattgactgcttactcttttccactctacactaatgtagaaacgcagtgctgcctagaaggcccacatttttaagtttaattttaactgcaactttcccaacctaagctctttgaaatacagaattttaaaactctaattcttcactaataaatgagatccttccaccatgtttgttgttttaagagaaacagaaatacagtggccattgaaaatgaatccagaagtgtatttcagttgtcctctagtcacatatgctttagttaaacctggaaaatgctattagtttagataaagcagtaatcagtgctaaggaacactgaactttgagaattaagctggtttcttgtcta

SEQ ID NO: 731323 - DNA, 617 bp, Homo sapiens
ccatcatttaatgatgctcatgtatccaaattcagtgaccaaaatagcacagaactgatgaatagtgttatggtcagaacagaagaagaaatctctgacaccgaccttaaacaagaggaatcaccctctgatttagccagtgcttatgttactgaggtaagttgtactttaagaacaactgaatggattcttgccttgagcctcaaacctgcagtttgggaaacttttttctgaagactcatgaaattaagctcaaacccccaacctcacacctcacaaagtgttgtcactggcagaaatgggcaggcagtgatcctgtggcagtcaggaagaataagaaaaccatgttytatcttaccacagttcctcactaaaactttttcctctttacctacaatacattgagaaatgtttgttagaacccatagaagcattttcctgagtggttagtaatctttgtggttcagcctaggaacatcatcctacactgtaacagcattgtttcttctgttatattcagctgacctataactgacctagtccttatgagttccttttgttaaaagtatgttagattgtgaggtcatcttttgtccctgtgagaccttaacttttta

SEQ ID NO: 731324 - DNA, 607 bp, Homo sapiens
cattttcagatgagaaaaaaacattgttatgggaagacatccacgggaagaaataccagggggagctcttcaaactgaacagaaaattaccctaccccaactgaaacacagagatgcagagggagcctggcccaaaatacaacttttatatccactgggtaacacaaaaatgtgtgtgactcactttactgcagtggtgcggaaccaaacctgtaatatcttcaaagcatgcctgtaatattttacagcagccctggggaaaaaatatgccatccaataagaattgttgaaaactctacaaataattagaagaaatgagttttccacaaatttacatcgaactatggcttcacagcatcactcgttctttacaaatagggcaatcatacaccccmgttagcaagcaacagtcctggcctaaaagcacccactttgattctcaaaagtgacctactttggataataaattgcatgatcatcctatgtatgaacccaattagaatacccttctgtctgttcatcttcgaatcctaccctgttcaaggatcaagtgacatctgactccatcttccccactgacaggataattttctctccagttcctgta

SEQ ID NO: 731325 - DNA, 589 bp, Homo sapiens
cttgcactttcttcaaatgagctacaaagctatgtttcctggtttgtcatttggttttcttgactttccccgaccaacttttctagcccatctcccctccttcttcaccttccttgttccctccttcttcctctccatccctgacttccacccctaaatcctccttcacgccttctttctcattctgttgtccgaatgcatttctgtgtggtttagcattccaagtttgtgtttctttcctgaactgtatgctgcagtgaagccaatttgatttctgttgtctggagtagctgcgaagcccctcctcacccttcmtccctgccagcccccgggacttcggtcaccccgctggccttcagggccctttcgggcaaaaggcagtgacagaggagccagtgcggggcctcctggccttcagatcctggaggaagttctggccaaggtcaggcacaagggaaaagccccatcccatccttgggggcctactgggccaaacggaactctgggcttcctcaagtccttccctggctgcaggatggagctttggggtgggagctgcagggctctggaggagcaacgggcaccagga

SEQ ID NO: 731326 - DNA, 572 bp, Homo sapiens
caccagggtttggatccagctcgagtcaacgtccctgtcattggtggccatgctgggaagaccatcatccccctgatctctcaggtacacgcatatgaccctgtgaggggcttcgaggtcaggattccctttaccaggccctgctttgaggtgatcccggtagactggagaaggcctggccaygtgccaggttttggaagggctcctgttgtaggcagccccgcccctctgctgcagggcggtgtcagtcctggagcgaatgtgggtggaagctgctcagggcccagctccagcacgcaaggagaaccactgttgggaacctcaccgggttactggttaggccggagcgggcgaggtgcttttttcaaaaatgagtccagggctggacacagtggctcatacctgtaatcccagcatttgggaggccaaagcgggaggattgcttgagcctgggaggttgaggctgcagcgagctatgatgcaccactgaagcctgggcgacagagccagaccctggcctcaaaaaacaaatgagtaggggactcaccacacttcccaacagagttgatttc

SEQ ID NO: 731327 - DNA, 493 bp, Homo sapiens
caatggcgcgatctcggctacctgcaaccttcgcctcccaggttcaagtgattctcctgcctcagcctccctagtagctgggatgacaggcgcccaccaccacgcccagctaattttttgtatttttagtagagacagggtttcacaatgctggcaaggctggtctcgaactcctgacctcaggcgatccacccaccttggcctcccaaagtgctgggattacaggcatgagccaccgtgcccagctcagtatcagatttttacagaaggactggctagaaaaagaacaatgaaacaagcaaaaggtgttacgttgtgmttaactgcttcctgagaaaaaagagcttatcagaatgactactaagatgtcttgttgtagaaactgaattgattgccctgaagggagtattaagggattaataaaaattaaaaaaataaaaataactgaattgagaaacccaaaaaatgggcactccagcccattttaataata

SEQ ID NO: 731328 - DNA, 493 bp, Homo sapiens
caatggcgcgatctcggctacctgcaaccttcgcctcccaggttcaagtgattctcctgcctcagcctccctagtagctgggatgacaggcgcccaccaccacgcccagctaattttttgtatttttagtagagacagggtttcacaatgctggcaaggctggtctcgaactcctgacctcaggcgatccacccaccttggcctcccaaagtgctgggattacaggcatgagccaccgtgcccagctcagtatcagatttttacagaaggactggctagaaaaagaacaatgaaacaagcaaaaggtgttacgttgtgcttaastgcttcctgagaaaaaagagcttatcagaatgactactaagatgtcttgttgtagaaactgaattgattgccctgaagggagtattaagggattaataaaaattaaaaaaataaaaataactgaattgagaaacccaaaaaatgggcactccagcccattttaataata

SEQ ID NO: 731329 - DNA, 546 bp, Homo sapiens
atgacaagaattgcttttctgccagtgtcaagtaacactgaggtctcaccagaaccatctgaggtctcaccagaagcctctttaatgtccatatttccaccaacagtctcttcaatgcaatctaggcattttcttgcctgcaccttaaaactattctatcctkttgtcttaccctgttccaaagtcacttccacttttttaggtatctgttaccatagcagcccacttcttagaatcaaaatctgtattaaccatgatgagataccacctcacacctgttagaaagtctgttatcaaaaagacgaaagataacaagtgttgtcaacaaaaatgagaaaatggaacctttgcacactgttggtgaaaatatcagttagtatagccattatggaaaacagtatggaggttcctcaaattaaaaattgagctaccatatgatctagcaatcccacttctgggtatatatcctaaggaaacaaaattagtgagtcagagagatatctgcactcgcatgtttactgcagcactagtcacaatagccaagat

SEQ ID NO: 731330 - DNA, 546 bp, Homo sapiens
atgacaagaattgcttttctgccagtgtcaagtaacactgaggtctcaccagaaccatctgaggtctcaccagaagcctctttaatgtccatatttccaccaacagtctcttcaatgcaatctaggcattttcttgcctgcaccttaaaactattctatccttttgtcttaccctgttccaaagtcacttccactttttyaggtatctgttaccatagcagcccacttcttagaatcaaaatctgtattaaccatgatgagataccacctcacacctgttagaaagtctgttatcaaaaagacgaaagataacaagtgttgtcaacaaaaatgagaaaatggaacctttgcacactgttggtgaaaatatcagttagtatagccattatggaaaacagtatggaggttcctcaaattaaaaattgagctaccatatgatctagcaatcccacttctgggtatatatcctaaggaaacaaaattagtgagtcagagagatatctgcactcgcatgtttactgcagcactagtcacaatagccaagat

SEQ ID NO: 731331 - DNA, 587 bp, Homo sapiens
tggaagattcctttccatttgttcaagtctacttttgtatctatcagaagtgttttaaaatttcgctgattaggtttgtacattgcttcttaagtttattcctaatattttatctttttgttagttctctaaatgggttttctttatcataatgtcctctaattggttattgcttatatataaagtctattgattttcatttgttaattttataatctaccactttattaaattattkttgttggtttgaatgttggttctatagggtttttctatttatgctatcatgtctgcaaacagataggttttttttacccattcttatgcctcgaattgatttattgtgtctaattgcattggctaatactctaatacaatttctagtaacagggattctaacaggcatccttgccttgttataatcttagtgaaaacaccttgaatgtatttccattaaataagatgtcagcgttaggattcagacacacacatatcacatataaagaaagtatttctcattttctgttctcctgagtatgttttgttttttaaatcatgaatggatgttgaattttgtcaaaggcttt

SEQ ID NO: 731332 - DNA, 587 bp, Homo sapiens
tggaagattcctttccatttgttcaagtctacttttgtatctatcagaagtgttttaaaatttcgctgattaggtttgtacattgcttcttaagtttattcctaatattttatctttttgttagttctctaaatgggttttctttatcataatgtcctctaattggttattgcttatatataaagtctattgattttcatttgttaattttataatctaccactttattaaattattgttgttggtttgaatgttggttctatagggtttttctatttatgctatcatgtctgcaaayagataggttttttttacccattcttatgcctcgaattgatttattgtgtctaattgcattggctaatactctaatacaatttctagtaacagggattctaacaggcatccttgccttgttataatcttagtgaaaacaccttgaatgtatttccattaaataagatgtcagcgttaggattcagacacacacatatcacatataaagaaagtatttctcattttctgttctcctgagtatgttttgttttttaaatcatgaatggatgttgaattttgtcaaaggcttt

SEQ ID NO: 731333 - DNA, 640 bp, Homo sapiens
gattttttgttttcattcatttaacaaatatctgtataggcatactgcacctccattttctttctgtctttctctctctctctctctttctttttttagagacggagtccaggctggagtgcagtggctcaatctctgctcactgcaacttccacctcctgggttcaagmgattttcctgcctcagctttccaagtagctgggactacaggcatgcgtcaccatgcctagctaatttttgtattttttagtagagatgaggtttcactatatgatggccaggctggtcccgaactcctgacctcaggtgagctgtccgccttggcctcccaaagtgctgggattacaggcatgagccatcgcacctggcctgcacctccaatttgttatgaggatcaagatgcctacatgggaagggggtgttacatgcataggtgtgtgtgtgtgataaatggaattatccatgcaaagcacccaaaataatgcctgaatcatttttttgcctcttgacaaatgctgatactagctaacttttgcatagcacttactatgagcctggtatgattctaagggctcgacatatgttagttcatttaatcctcacaacaattctgatactatttttaatcccaattaaaaat

SEQ ID NO: 731334 - DNA, 487 bp, Homo sapiens
cgcggtggctcacgcctttaatcccagcactttgggaggcctaggtgggtggatcatgaggtcagaagatcaagaccatcctggctacggcggtgaaaccccgtctctactaaaaacagaaaaaaatcagctgggcgtggctgcgggcgcctgtagtcccagctactccgggggctgaggcaggagaatagcgtgaacctgggaggcggagctcgcagtgagccgggatcscgccactgcactccagcctgggcgatagagttagactccgtctcaaaaaaaaaaaaaaaaaaaaaaaaaaattctcaaaactcaatagtaaaaagaaaatccaattagaaaatggcaaaaggcattgaatagtcaattaatccaagaagacagacagatggctaataacaaatgtaaagatcttcaatatcattagccatcagggaaatgcaagttaaaaaccacagtaatctatcactacatatttctcagaatg

SEQ ID NO: 731335 - DNA, 572 bp, Homo sapiens
cctgtattaataataataacaggccgggcgtggtggcttatgcctgtaatcccagcactttaggaggctgagactggaggatcgcttgagcacaggagtttgagaccatccagagcaacatagcgagatctcttctcttaaaaaaaaattatatayacacacacacacacacacacacacacacacacacatacatacatataagcccagtgtggtggtgctcacctgtagtcctagctactcaggaggctgaagctagaagatcccttgagtccatgagttcaaggctgcagtgagctaagatcatgctgctgaactccactgtgggtgacagagtgagaccttgcttttaaacacacacacacacacacatacacatacacacacataaagtatcactaattggatgtgaactatgtaccaggcactgtatttcgcactttatatgcactttctcattttacttttcacacaaccttgtgaggtagggagcattttatgagatgcagaaacagcagtgaagagcaaggtagaaactttcgccagttttcccagctcttgataatggaagg

SEQ ID NO: 731336 - DNA, 543 bp, Homo sapiens
tctgtcctccagagctgccctctgagtgcatgccctctttcgaaggactgctgtggttccggttaccttggcttctgggccacctatcagtcctcactccagtgatgaaggctgaaggaagacaccctccagaggcaatcagacttgaattcactctggccccaagtctgcttaatcactcttcagctccctcactattcagtcactgttcagtcagattgaaataatataatttatctcatgaaggccctgcctcaaccatcttccttaggaaaagttagaaccccacctaacaatctgtcagtgagataaatrctaacatctcagctacctgaagcaaactgcaggcaaacaaatgctgagtcgttcctcattatttctagaatgaagtaaaacttctcagccctcaaaatcctccacagtctggtcccaatctcatttctcatgaaatcttccttctcctgcctcccctcccacacccccaattcttggtattctggaaacatgaaatcgtttcagagttccaaaaaacatctaatattt

SEQ ID NO: 731337 - DNA, 636 bp, Homo sapiens
accaattctcctaggggcctgtgagagtcctcgatcacttctccactatcccccaagcccgaggacctgcaacattaaaaacacaaaattttaaaacacaacacacgcagacacatatatgaaaatatatatttatagtatttattttaataatataattttaaattcattggaccctgaaaattatgtagccagttttgctggcatgaaagcagtcatttttgtaggtcacagttgaaactacttaaaaatttttaacagtgtttctctagctcctgcctggattttgttgatagtcagtataatgggccaaataattaccctaattcctggaacccatraatatgttttgtcacatggcaaaggagattttgcagataaaatttaaggtaatagaacttaggacagggagagcatccaggactatccaggtggatgcaatgcaatcacatgggcccttaaaagtggaagagtgagaagagagttagagatgtggtagggaagggaaatccagaggaaattcaaagtcgaccattgttgctggctttgaagatggaagaagagagccatgagccaaggaatgtgggcagctgagccaaggaatgtggacagcctctagaatgagaacaatctgca

SEQ ID NO: 731338 - DNA, 566 bp, Homo sapiens
gggcccactgagcccgcaacggatcccggagaagccggcaggatccctggggagagttttctttgtgaagggcagggcgccctggaatgggtttgctgagcccgcacccacccagaactcgcgctagcctgcgagcagccctggttcctgcccacgcctctccctccacacctccccacaagcagagggagctggcttcggcctccgccagcccagagaggggttcccacagtgcagcagcgggctgaagggctcctcaagcgtggccagagtggacgccgaggccgaggaggtgctgagagcgagcgaggcctgctagcacgttgtcacctctcaaagggaacaaattaatagtgtttactaaacagaccyggacataggagtgtctagacaccctgatatctggacaataaaggcagtcctaattttgctttaaagataataatattgattcttgcaaaaaatagtaattaagaaaattaatcctttatcacaacctcttgtatagcagagcacatctccccttatatacgggtattgtacctagggtcgacatgttccttcta

SEQ ID NO: 731339 - DNA, 566 bp, Homo sapiens
gggcccactgagcccgcaacggatcccggagaagccggcaggatccctggggagagttttctttgtgaagggcagggcgccctggaatgggtttgctgagcccgcacccacccagaactcgcgctagcctgcgagcagccctggttcctgcccacgcctctccctccacacctccccacaagcagagggagctggcttcggcctccgccagcccagagaggggttcccacagtgcagcagcgggctgaagggctcctcaagcgtggccagagtggacgccgaggccgaggaggtgctgagagcgagcgaggcctgctagcacgttgtcacctctcaaagggaacaaattaatagtgtttactaaacagacccggacataggagtgtctagayaccctgatatctggacaataaaggcagtcctaattttgctttaaagataataatattgattcttgcaaaaaatagtaattaagaaaattaatcctttatcacaacctcttgtatagcagagcacatctccccttatatacgggtattgtacctagggtcgacatgttccttcta

SEQ ID NO: 731340 - DNA, 609 bp, Homo sapiens
acttttctcgctgccacatatgagtgaaaacatgcagtatttgtctttctgtgcctagcttatttcacttaacataatgtcctccaggcttatccatgatgctacaaatgacaggctttattccttttcgtggctgaataatatttcattgtgtataygtgccaaattttctttatccatttatctattgatacatacttgattccacatcttgcctattgtgaacagcgctgcaataaatatgggagtgcagatatctctttgatacactgatttccatgggattgctgaatcctatggtagttctattttgacatttttgaagaacctccatactgtttcccatagtggctgtactaatttaacattcccaccaacagtttatgagagtttccctttttccacattcttgccagcatctattattttttgtgtttttgataacagccattctagctgggatgaggagaaatctcaatgtgattttgatttgcatttccctcctgcaatctttattgatgtcctttctctacattggcctccacctctgcaaatataatgctgttcactggggagccttattcatgctgccttctgttcaatacccaa

SEQ ID NO: 731341 - DNA, 607 bp, Homo sapiens
taaaatcttatgatctctcaaaaagtacttccagatcatatatcattactggaattatctatactcctaacaaagattgttatgcagtattgaggcaaaaaaaaatcacaagcgctcaaagtcactaccaatgacttatttcctacctttccatctattgctagctacacaagttgccaattactgccacatcaayttaagagaaagtgcaagtatgaaatgaagcctatttgttatggtatcagtatttagacgctacctaaaatactcactatatgttgggatatcatgtgcttttaaaaaatagaatccaacattgcatatgaaagcaaaaatgtttgtgtctagatttctataaatatgtccatgaaagtccttttgcatagagtaagcatcctgccagggacataactatttaagttccaatgtacccaacactttatattctattcatggaaaaacctgatccactgtgtatgtcattacagaggaagacactgaggctcagaatgctcagagaataactaatgcaaagataataagtgatagcactgggattcaaacccactctgaagccacagcctgtgtcttttcctgggatctaatt

SEQ ID NO: 731342 - DNA, 637 bp, Homo sapiens
atttcagatccaaataaataaaactaattgaaaaacttgtttcactcgggtggtgaaacactgtctcataaatcaccaagtgagaaaactgaatcaaccccagcgccttgggcacaattagctgtattagagaagaaattaagaagcactcctaccctactgcttaagmtaagcacagcctttccctgtaaagccagacatcaatctttgttgctgttgtttgttgtcttcttgctagcacgtgtgagagttggtgttctcacctgaatgtagactgcaaagcaatgaaatataatgtatagcagacatagtaaggcttgctgtaagcatatagataagtattctaataaataaacaaactagtcctgcagtattgattcattccaaagcctaatttccttttgttttgtttcattcaccaaagtctatatcctctaaatctaccttcatgatccatcagaaccaattctacatgtcctcaaagcagatttggaaaacaagcaaaagcagatcagaaactcctagatttctttttggcagttatcagtggttattaccacagagccatgcaatgttgtcagagactttaaaaaataataataagggaccgggcgtggtggctcacgcctgtaatccc

SEQ ID NO: 731343 - DNA, 585 bp, Homo sapiens
ctctccctagtaagctaaatggaatgtggtttttgaattgcaaagatagctcagcatgtgcaatgtgtattgattagccttggagaaaaatagaagaggcgaagatgtggggctgctcattwacctaactggcttaagtgtcccattcaggtaagttgcataggaggtactgaaggacctagggttatctgaaatgaacctgaaggtcacgtggaaatcattgacatccagatccctacagcgctggcggccatgaccacagtctgtttaacagaaattattcttgccttacaagcttggtctttaaaaaaatgatgttggtacacttaaaatgaaaactggccaagaaattagctgtaaaaagtaataaaacaaaccttagtttaatatcccaaaacggaatcttttaatctgataggattgttgcttggggaaaaaaaaaatgatctcatttcccaaaaacccagagcgcttcgcaaatttcaggacttgcttggtagatgagttgagaatatatgttttaaccctgggcagcaatgttgcacccttgacaaggagggaaggaaagggatccatctcattcca

SEQ ID NO: 731344 - DNA, 595 bp, Homo sapiens
ttagttagtccagctctgctagtctcactggatatgagattaggagataccatccagaagatgctggcacatccttttgttgtgggtgccttttcccttctactacctccctcttggggtctgaacactcaacctacctttatacccagctgctgccacctcattgttacctgtttctgattttctgaagccscgatgccccttagcctaggtctgggagttaccagttttcttgacttctgacaccagtatgtatgcatggtgctagtttctactttgtgggcctctctgctttagtttctcaaaattttttagtagcctgtagcacttatttgtgctttttaaaaaacttcggatcctgttaaattcccacatttttgtctatatgggagcacagaaaacagacttcaacaattaaaactcccaaatcaggtattactaagtagcctaaatccagctggatagtcctgtttcccaaacttgcctgaaggaccacaaggaatacctgttgacatattcccaagcccatcccaatgggcagctcctgtaatttggatatgttatctggatatattatttaacaccccaggtgatt

SEQ ID NO: 731345 - DNA, 595 bp, Homo sapiens
ttagttagtccagctctgctagtctcactggatatgagattaggagataccatccagaagatgctggcacatccttttgttgtgggtgccttttcccttctactacctccctcttggggtctgaacactcaacctacctttatacccagctgctgccacctcattgttacctgtttctgattttctgaagccgcgatgccccttagcctaggtctgggagttaccagttttcttgacttctgacaccagtatgtatgcatggtgctagwttctactttgtgggcctctctgctttagtttctcaaaattttttagtagcctgtagcacttatttgtgctttttaaaaaacttcggatcctgttaaattcccacatttttgtctatatgggagcacagaaaacagacttcaacaattaaaactcccaaatcaggtattactaagtagcctaaatccagctggatagtcctgtttcccaaacttgcctgaaggaccacaaggaatacctgttgacatattcccaagcccatcccaatgggcagctcctgtaatttggatatgttatctggatatattatttaacaccccaggtgatt

SEQ ID NO: 731346 - DNA, 680 bp, Homo sapiens
gatcctttcagccaagtcatgacagaaatggtgtgtttacacagcttgggtaaagaaggcccttttaaagttttaagcaactgctacatttataaagacaccatccaagtcaagctaatcgacttgagtcaggtaatgtatctagtggttgctgcacaagctaaagctcttccgtcaccagctgccaccatttgggattatatccacaaaaccacctcaattggaatttatggacccaaatatatccatcccagttttactgttgttttaacagtttgwggacacaattatatgccaggacagcttacaatttctgatattaagaagggtggaaaaaacatatctccagttgtgtttcagctctgggggaagcagtcatttttacttgacaagccacaagatttaagtatttctattttttcctgtgatcctgattttgaagtaaagacagaaggagaaaggaaagaaattaaacaaaagcagttggaagcaggtgaagtagttcatcaacaatttttattttctttagttgagcacagagagatgcacttgtttgatttttgtgttcaagtggagcctcccaatggtgaaccagttgcacagttctctatcactactcctgatccaaccccaaacctaaaaagactctcgaatctgccaggctatttgcagaagaagga

SEQ ID NO: 731347 - DNA, 591 bp, Homo sapiens
tagacaactcttaagataccagagaggctccataacatgaaagcaaactaaagagaactaacttggccattgttagggatctacttttcagtgtgtgtgggatttttttctttctttcttttttttttttttttttttttgagacaaagtctcggtctgttgcccaggctggagtgcagtggcacgatcacagctcactgcagtttcaacctccagggctcagctgcccaagtaactcagactgcaggcatgtgccgccatgcctgggtattttttttttttttttaagggatgagtgtctcactatgtttcccaagatgctcttgractcctggcctcaagcaatcttcccacctttgcctcccaaagtgctgaaattacagccatgagccaccacacctggctgtttcttttttttaatgtattaccaatatcctttagcaatttaatattcttatgtatacaatgcattacagcctaaacaataatattagtaattctcatcttaatcctcatgttttaataggactcccagtgccaaattctttagtgtagtattcaacccagtggaaggctcagtgtagaattaca

SEQ ID NO: 731348 - DNA, 631 bp, Homo sapiens
ctgtgggatccaaacccttcagtcatctcttgacattgagactggctgtccttatatacttgacactctctaaagcacttcagcatccaatttgattttcacaatgattatggaagtttagacaaagtggaattaacactacattgattttaaaaatcattaaatagagatactgtgtgatgcatgtaaagtcttayactatgtggagctggattttaaactcaggttttatggctccaagtacagatcttttccctaaaacaagaaactggaatataaagtagtaaccccactccacagtttactaaaagcaccatcaggggcccgctagctcagtattgtttctcactgaggctataactcttcagtataaatgtatggatccatttatgtatcaaaaccatgggtagtccttctaattgcatactttcaggggaatgaacatgctatcaactttcatagttgctttacttgcttattcattttaacttattgtttcatattggtagataaagctccaaagtgccattaaataatgaggggctaccaaacatgtttacagtagttccccttatccacagtttcactttctgtggtttgggttacctaccatcaaccatgattgacaaat

SEQ ID NO: 731349 - DNA, 686 bp, Homo sapiens
ctactattatctaaaaccagaacagtggacaaacattactgtcctgggatccacagatgaaaactggttatgccttcctgcttagtctatattttcttccctttctgtttattttactgaccagcctgaactgcattggttcatgccttgtacacatattctgctctacttatgacccctggctaaacttgagctccgaatatcaacatgagcccacatgttggttatatctacagcagccattcatctttcctggatttttcagggcaattttaattttacattgtatgattcctggctttggtatagagtgtatgttcttttggcctaagtcctctgtttgtcctggtccactaaattctgacctcagcttaacccaggaactgatagtgactgcggacctcatttttttctatattaaatatcttcattcattsaacagacacttattgtgtcaggcactctgttctccaggcccaattctagcttacccacactttgttcattccagccgcctccatcttccaaatagaactgtctctgtccactcttagaaggagaaagtccttttccttagttcttgatatacgtgtaggaactaatttatgaatggccaatgaatgcttttttggcagtcatgggctaccatcctgatatggttcttttttcctcctgatgattgctgt

SEQ ID NO: 731350 - DNA, 646 bp, Homo sapiens
tcaccattttgcacagttctgcagcagtcagtattattaagcatactcaataactgactcaggccaaagccaaacaagtggggacgggctctgtctgggcattgagtttaatgctcagctcatagagctgcctggcttgatgttatggcttctcaaacacactttttgtcagttccaaaaaggccattaggttagtacgtgcmtaaccacagtacatctgtctattttggataacaacgagcgcttttccagctgtttatttttctaccttccttctttgtttccctagggcttgagcttttagcatccatgatttattttcaagctgttaggccaaatccagaattatcattctaaatttcatatgacttggcctcatccattttcgaacttacttaaaccctaaaatacacacacacacacaccttttgtaatttaacacctggccaaacatagttttaattaccgccacttaatacatgcatctataaatttttcttctttttacataatttatttctttgcatatgtaaaacatgcacattattccgaagccaaaactatgtaacaagacagaatcaaagaaatcttgtttcccagcccatctgaagggaaggaggagaagggtggaggggatgggctggga

SEQ ID NO: 731351 - DNA, 488 bp, Homo sapiens
tgttgtgtgtagtagaaatgttctgtcttttttattcctgttaccataatctatcatattgaacatacagtatatcataatttgtttatgacttttgctgttgatggagaaatgagtttctcatttttggcttaatcaatagtgcttcttaataccttcttgtacatgtcttytgatacacaaggtatacatttctcgtaggtatactcccagaagtagaattgctgggtcatggggtacgtgtatgttcaggctttagtagatactgccaaagagtttccaaaagtgaatgttccaatgcacacttctttcagcagtgtataagagttccatttgttcctcatatttgacaacacttgataatttatgtcttactaattttagcccttctggtaggtatctcaccgtgctttcattttgtttttcccttatactaatcatgtatactagtttttaatttattcttctactatttagttttgcccttt

SEQ ID NO: 731352 - DNA, 627 bp, Homo sapiens
tattttaagaggtagtcccccaaataaaatttgtatccaaaaatatgcttcttaaaatcactttgaaactcaaagtatatttacctagcagcagagccttcaatgaagttcttaattatggtaagtgtttgaggcatgttgtgagtgagtatcttttcaactgaccagcactctccttctccttaggaatctattacatcttttctttccacattaacacttcctaactgccccaaaacgtgagcaagcaaagttcacctgttcttagttgtgataccaattttgtaaagtgcagttttacccacaaattatctatcttttatcttacctcaaaaccaacgcttttagcttcctgtttattgatattcccaaatgttaactgttctattttatacttcagtggtagagctagacgcctcattattattatggtctattaacctcctctcctctgacctgacatattatttctgggaaaatgagaytgaatagctcaagtcaaaatttagaagtaggagatccttttgtctgatattttacagctttgaatactttcagagacatacaaccctttgcaagttggtctgtgctaggaacggttattaccattttttaaactgttgcaaa

SEQ ID NO: 731353 - DNA, 595 bp, Homo sapiens
ctatgacaaacacacaaccaacatcatactcaaagcaaaatctggaagcattccccttaagaactggaataagacaagagtgctcactttcactgttcctgttcaacatagcactggaagtcctggccaaagcaatcaagcaaaagaaagaaagaaagaaaaggcatccaaatwtgaggagaggaagtcaaactgtctttctttgcagatgatatgattctatacctagatcataagtgaattaatgcaggataaaaaaacaaatactgcatgttctctctcataagtgggagctaaacattgagtatacatgaacataaagatggaaacaatagacacgagggcctacttgagggtgaagggtgggaggagggggagaattaaaaaatctacctattggggctatgctcattacctgggtgatgaaatcatttgtataccaaactcccatgacacacaatttacctgtgtaagaaaacttgcatgtgtacctcctgagcctaaaataaaatttggaaaaaaataaacctctctaaacatagaaaaagtacagtagaaatatgatagaaacgttccattataatcttacagactg

SEQ ID NO: 731354 - DNA, 633 bp, Homo sapiens
ttaatccatgcatggattaatgggttaatgggttatcaagagagtgggactggtggctttataagaagaggaacatcagcaccataagacagtgggtggggttggttagagaagagaagaggaggagagacctgaggtagcgctacctccggattctgtagagtccccatcagcaagaagttcctcaccagaagwgtccctctaatcatggtcttctcagcctccataagaattaaattccttttccttgtaaattacccagtttccgatattctgttataagcaacagaaaatggactaagacagaaatctgtttctcatatttagcgccacatccttgacatgaatataccagaatgtacttagtcgttcccctggtgatgaacttttaggatatttgtggtttttgctactacaacttatgctgccttgcgtagctttaagagaatatacctgtgggatagattgatgggcatagaatatagcaaagttttgatggatattgccaaatgaccttcaaaggcaattcactcccttccaagttatatgagaatgcttgtttcccaaatcccttacaacacccaccctattctttttgtttttttaatcatagtagtgcttatttatttttat

SEQ ID NO: 731355 - DNA, 492 bp, Homo sapiens
ggccaatcttgtttcacactcctatatactttctaccttatataactttgaagcaaattccagaaatcctatttcaatgtatatgtctcaaagatcagcactccttttaaacaacataaccaaaatactgttagcaatagtawcaaattagcaatacctagcaaattaacagtaattccttaatgttatcaaatgtttagtcagtgttcataacgccagttgtactgaagatttttaaaaaatgtaccttctgtattgattcttgaagtgcttgtttttttttcaaattggtgtttaagtcagtagaaaagtgaaagaaattgtgaaatagatctttggttattttaaagatcttcataagttgttactgactcttaatcatatggaatttaatctagaaatggataaacttgacaacatcccttgtcctggcaaagaaatctcaaatattataatgctgtcaatcattctcaaattagtttgtatatttgg

SEQ ID NO: 731356 - DNA, 597 bp, Homo sapiens
cttacaggaaaagctcaaagcttttcagctttcaatgggatattagctgtgggtttgccatatatggccattattttgttaaggtacatttcttctctacctaatttattgagtttttatcaggaaggaatgttgaattttacaaaacgctttttctgcatctattgagatgattatgtggtttttatttttcattctgttcatgagtcacatttattgatttgtgtatattgaaccattgytgcatccctgtaatcccacttgatcatgttgtatgatctttttgatgtgttgttggatttggtttgataatattgttgaggatttttgcatttatgttcagtagggatattggtctgtagttttctttttgtgtgatgtccttgtctggttttggtatcagggttattttggccttgtagaatgagtttagaagaattccctcccctccaatttttggaatagtttgagaagataatttagtggtgaagccatccagtcctggactttcctttgttgggagtctttttttttattactgattcagtcgtatcatacattgttggtctgttcaggtcttctatctcatctggactc

SEQ ID NO: 731357 - DNA, 588 bp, Homo sapiens
cagacaaaatagccttttattagccacataggatttcatagctagtgaaaagtcaatgcttggcctcaaaccttgaaaggacagtctgactctttagttagaggcaaacacaggtggtgacttttaagctgaagccaatcctcatttaccattctgaaaaatcctgtcccataaaaattatgctaaatctactctaactgtgcactataaatggaacaaaaccttgatgacagcacttcggtttacaacaaggtttactgaatttattaagtccactgttgagacmtactgctcagaaaaaaagattcctttcaaaatattactgctcattgacaactcaccttgtcacccaagagctctgatagacatgcacagcagatgaatgttattttcatgcctgctaatacaacatctgttttgcagcccatggattaaggagtaattctgactttcaaatcttatttaagaaatacatctcataagacgatagctgccatagatagtgattcctctgatggatgtgggcaaattgaaaaccttttggaaaggattcaccatttatgtcattaagaacacttgtgattcatg

SEQ ID NO: 731358 - DNA, 476 bp, Homo sapiens
aaacatttttctgaatgaatgtagaacttgaagactgcctctcctctgaacagttgccacgtccagtgctctcagcctggaatcctcttccttcttcattcacctgttcagtttatttcaaaatttgagggattactaggtgttacactcttactgggcccagggattacctcctccagagagcctttctgacccttccattaggggctcctcttccccatggctactgtaccgaggtggacctctgagcccccagatcaagacggtcccttgagcacagaaaccagctctgattcatctctctgtgcttggcaccagcctcgttcaggaaacacccatagaaggcaccatcttcttacggaagagaccacctctggggcagacagatcctggttgggattctagatctgcacttgatagcttggccaagttcctttctctytatcaatttcctggagtaaaacagcctgccgagt

SEQ ID NO: 731359 - DNA, 613 bp, Homo sapiens
ataggctgattgcatgatgaatgcagaaatgagttcgctgataacgtgagcaccgaagcgggaagatgataaattacttttactgactgtcctacattaagtaccctttctcaacaatttcatcacaaattaagtaaagcagtatggagagattaggaggacgtgtaaaataatgtaccttaatggtttttctaataccatcgtggaagacgaaaatctcaacttggttctgcccgggtctttgtagggccaagtgagttcactcacctgggcattgagtggaagacaggaggcaccccaccacaccggcrtgttccacgggccatgatcagccatggattctctgaggaatatcccattgcagcccagacattacccgcacactgggccaacaggcagcatcatggagggaggaggacaggctgctctcggggcagacgcagcatcctccacacagatgggcacccccaagcctgctgtccaccatgtgcctgcaggaaaggagcatttctgggctgcaggcctggaagactcggaaagaaaacaacatttaagacctcctgcctgggcacagtggctcacgcctataatcccagcactttgggaggccgca

SEQ ID NO: 731360 - DNA, 613 bp, Homo sapiens
ataggctgattgcatgatgaatgcagaaatgagttcgctgataacgtgagcaccgaagcgggaagatgataaattacttttactgactgtcctacattaagtaccctttctcaacaatttcatcacaaattaagtaaagcagtatggagagattaggaggacgtgtaaaataatgtaccttaatggtttttctaataccatcgtggaagacgaaaatctcaacttggttctgcccgggtctttgtagggccaagtgagttcactcacctgggcattgagtggaagacaggaggcaccccaccacaccggcgtgttccacgggccatgatcagccatggattctctgaggaatatcccattgcagcccagacattacccgcacactgggccaacaggcagcatcatggagggaggaggacrggctgctctcggggcagacgcagcatcctccacacagatgggcacccccaagcctgctgtccaccatgtgcctgcaggaaaggagcatttctgggctgcaggcctggaagactcggaaagaaaacaacatttaagacctcctgcctgggcacagtggctcacgcctataatcccagcactttgggaggccgca

SEQ ID NO: 731361 - DNA, 627 bp, Homo sapiens
gtgcccacccttccccctaaaaggccctaagccagggatttctaatctcttttgtgcctcaggcccctgacagtctggggaagactattatagcctgcttagcataatgtttaaagtgcacagaattaaatacatagacttgcaaggaaaaccaattaccctgaaattcagtcaaaatactaaatacaattaaaaagtaatcaaaatattttttaaactggtgatgtggtaatatacatgcttctttattaacactttaaatagcaagctttaatagcagccctcataactactgtaatttcagtcaatgatgagcatgaatgatactttggggttctgtaacaaactagacgcgctgtgaaaagatcccttatttgaataagctcaatggctcacatctgtaagccagcacttcggaagactgaggtaggaggatcgcttgaggccaggagttcaagaacarcctgggcaacagaacgagacacaccctactctgcaaaaaatacagaaaacagccgggcacggtggctcacacctataatcccagcactttgggaggctgaggcgggaggattgtttgagcccaggaggtcgagaccagcctgggcaacatggcacaaccttgtc

SEQ ID NO: 731362 - DNA, 561 bp, Homo sapiens
aaatacaaaaaattagctaggcttggtggcaggcgcccgtagttccagctattcgcgaggctgaggcaggagaatggtgtgaacccgggaggcggagcttgcaggcttgcagtgagctgagattgcgccactgcacttgagcctgggcgacagagcgagactccatctaaaaaaaaaaaaaaaaattagcctggcgtggtgggcacctgtaatcccagctactcagtaggctgaggcaaaagaattgcttgaatctgggaggcggaggttgcagtgagcygagatcacgccactgtactccagcctgggcgacagatgagactctgtctcaaaaacaaataaaataaaataaacgtggtggctttacttttttttttttttttttttttgagacagggtttcatcctgtcacccagaccagagtgcagtggtgcaaacgcagctcactgcagcctcaaccttctgggctcaagtgatcctctcacttcagcccctgccaaacgctgggatcacaagcatgcaccaccaggcctggctaatttttaaatttttcgtagagac

SEQ ID NO: 731363 - DNA, 470 bp, Homo sapiens
ccataaaaaggaatgaattaatggcatttgcagcgacctggatgagattggagactattattctaagtgaagtaactcaagaactgaaaaccaaacattgtatgttctctcataagtgggagctaagctatgaagatgcaaaggcataagaatgacacaatggactttggagactcagggggaaatagtgggaagggggtgagagataaaggactacaaatagggtgcagtgtatactgttcaggtrataggtgcaccaaagtctcacaaatcaccactaaagatcttactcatgtaaccaaacaccacctgttcgccaataacctatggaaataaaaaattaaaaagcaaaacaaaaacaacagccatgggaacaacaacaacaaaaaaaatgttctcctctatagatctcatattcctgtgacaagtccacaagctttggggtcttactctttccaggaggtctgatt

SEQ ID NO: 731364 - DNA, 343 bp, Homo sapiens
tttaggtcccttccctcctctctcctaccccctctctgcttggtggaccttttaatgatttatatacatcattttgtgttattttggtaagggttaagaaggccttgtggcatcaactcagggaggccatggtttaacaaagatcaatggatagacagctgaaatacccmgtgtttgtctgagttctgctacggctaaatatgtaatttggtcaaaccaattgcttttcttttccagattccattcccttacctgtgaagtgcggatggttgtgtggttgctgaggtgctgtccagcttggacatcgaggaattgtatgagcacctttgattgccttgcatgc

SEQ ID NO: 731365 - DNA, 646 bp, Homo sapiens
taatcaaatttgagaactgtcttatcctccagtcctggagtaggggtggggggtaatttttaatccttttattatacctcctttcccaaatggctaagtcatcattccggtgggggtaagagactggcgaaggctggggaagagaggaacaacagttcactgatctacagtaagaaaatgacctaagagaaactccacactcagcagcaacaggggctaagcccaagtatcagacttcaagtcccaaactgctactctactgccttttgattaaggagagccctgggcagagaatgttccaggataaagagtcctgcagcaaatcagccactttcattggtgtgaaccactggacaaagttgtcagaaagtctaatccctctcccggctctgtcttcaactaaatatgcaacctgggaatatgcaggtcatgtctttgwgtctcagtttctccatatttaaaatgaagtcatgtgagattacaagaccttacagatccatcatgctaccgtcactccagctctcaaagagttctattttagccaatagaaagaaatacaactacaaagcagaagcacaagttaggaaccgacaagttccaaaagggaggaataaataaattctgcatgtattcaggggaagaagaa

SEQ ID NO: 731366 - DNA, 572 bp, Homo sapiens
ttccttgctggcagggccatctatattctataacagagacagaaaatacccagtactcccattcctagcttccctgtgaccccagttctggtttatgatgtgaggtgaagtctgctgagaatttctggaaagaagaaaagaataaaagtttctccccaccccccatccccaggctttctgtttttaatgtgatcaggtaaaagatgtgatgtttgaagcccagaaggccgttttgtgacaatgaggatgaagcttaagatatcgcataaaagccaacttactgtctgttacccaggctgtcacccrggtggagtacagtggcttaatcacagctcactgcaacctcaaactcctgggctcaagtgatcctcctgcctcagcctcctgagtagctaggactaaaggcatgcaccaaaagataagctatcttttaatgccacttgttaattgatttttttacttgtatccaaaagcatcttatcaataccactgaatcaatatagttttctaatataaacagactgacctgtgatgacttaagttgcctttcagactgtgcatagtatctacta

SEQ ID NO: 731367 - DNA, 529 bp, Homo sapiens
catagacaggatttggtgactgattgcatataatggagtaagtaagagcgaggagttgagacaaattcccaggttcctggcaagcaagactgggtccttggtgttgccattcattgagataggctggtttttgtccatttgccccaatagaactattctccaccctttacctcactactttctgcccaagaagctgacctcaagagaccgaatccctgggctctttttatccctggtttcaggttgggtttggccaatgagtggtattagcaagagatcagagagaggccacaccttctaacagagagcccttcctccacatccaggtctcaaatgcttccctgacccagttgggggataacagcttcctctctgtttctgctycttctgctgctagagagaaactttactggattcttaaagggtcctatcattaaactctcatcaatgacttacagagtgtgtcatccatttcctgccaggaccttgattggtatagaaaaggaatgcaggtgaaggggagtgaagt

SEQ ID NO: 731368 - DNA, 620 bp, Homo sapiens
tgttgtattcttcgaatagacaataaatagaattatagcgttgctttcttcccctccacctctttctcctcttccacctctgctatacaaattttcaaaaaatgtaacatcaatgtgaaatagaaatgttgccatccactgtgaagcaatgaagtacagtgttcattaaacccaccaatccaactagaaccctgaaatagactgtggaagtcatggattcatctgcataaagccttttcctttcacctcttctggtaaaagaagccctcgcctctatgggaaacagggaacatatcttcctatttagaaggattgcagggatgggaaagtcagccaacttcggccaatcagsctcatcctctggacttgtgctgtaccctttctctaaccaactgtaggctatggcactaacaatgtatccctggagcagtgtagggtaccatgtattttaccagaggaaagacattttcagagaataaaggcaacatagggaaaagcagagcggagacatgtagagagagaagattggatggctggggaggagaaaggagtcagagcaaaagacagagaggaaacaagacagagaaaaagacaagacagagaaaaagagaggaaacaag

SEQ ID NO: 731369 - DNA, 624 bp, Homo sapiens
ctcttccacccatcatcccttcttcctgcctccttcaatcgattacttggttagtgtttgttgggaagttagtcagttccaggcagtgggctaaacacaaacatgaaaagatggggtcctcgctgtcgtccttttctgttgttgagtaacaaatcacccacaaatctcgcaacttaaaccaacacgcatttattacctccccactcagtataccagagaacaacctggtgtggcaggaatttctgctcagggtcacccatggccagtattcaggtgtcagccgggctgggaacttaagtgtaggctctgaggagaaatccacttccaaacccattcaggttatgacagagtaccctacagttacaggactgaagtgctttccatctgagatcygggacctgcctcagctctttgaagccactcacattccttttcccatggctcctcaatctttaagcagtaatagtgccaaatgactatcgtgcttcaaacctgactgcctctattgtcatcagccagagaaaactccatttttaaagatgtatgttattacattgggcccaccaggctaatccaggctggtctccctctgtaacaaaacataatctcaagcatgatagcaca

SEQ ID NO: 731370 - DNA, 586 bp, Homo sapiens
tttttgtcactacctctatactttaaaatctataaccaaggtgaatctaaaggataattttaaatggtccttggtggaacaatactggtggtctctttttctatgccatgtaaagggagggaaatttgctcttacctgcccagtaraaatagcccaaccattcctgcaattaaaaatgagaaaatttagcctgctttcagtgtcactataggaaggaaaaagaaaaaaaaaaaaacaattactctaaaaacaataaaatgtactcatgataaattatcctggtgatatcacctgtactcaagaaagaaatatgacaaatgatagattctttttcttgtttcctaggagaaagaaaaatagcatattcaaacatcaagacaataacaagttttgtagtaatagaattttttagagatatctaaagatagcaccacatttgagtagcatgtatgtatcaggctctgctccaggcactttctgccaattatcactaatatgcaccatcaactaataataagagtggctatgttactattcccagcttacagaagaggaaactgttgctcagtgaagatcagaaatgtgt

SEQ ID NO: 731371 - DNA, 626 bp, Homo sapiens
agcggggagataaagaaggataggttaatgggtacaaaaatacaattagaaagagtaagatgtagcgtttggtagcacaatagggtgagtataactgacaataatttactctgcatttcaaaataactgaaagaatgttgctaccacaaagaaatgataaatgcttaaggtgatggataccacaatcaccctgatttgatcattacacatcgtatacttgtatcaaaatatcacatatacccaagaaatattgtatagataataaattatctatccataataattaaaaattttaaatttcarttaaaaaaaagaaactgcctggatgtggtgtctgatttgaaactcaaatagagataccttgatggaagaatggaaaccatactattcttctcataaatatgaaacaaccttaataaataataaaaataataatagtcacaaaagtttgtagttttatttttactaattcaaaactatgattaattttaaaagttatgcttaagtaaaaccatgattaccttttatataaaattatgattaattttttaataatgataatttttttagggtgctttcaaattgacaacaaaattgagcagacagtatagagagttcccacatac

SEQ ID NO: 731372 - DNA, 622 bp, Homo sapiens
tgtttctacccaagaacttttctgacaaaaaaggtgtgaggtttttcctcatcccaacaaccagttctccaactctccagatatcagctgggcgttcaacaatttatttcagttttgacactaaatacctggagttagtgcaaaccaaactgcttaagaagtcagtgcccccagactgccccacttcagatgccaatcactggtaatgtgtctccatgttccccacttcagtctgacttagatacaaatggggcattctcaggactgcctcctcaggtttataatttactataacggctcacagagatcagggaaacacttcacttactattaccagttcattataaaagacacaaatgaacagccagatraggaggttttagtggaaagtctggaaaggtcccaagcgcaggagcttttttttgccctgtgaagttggagtgagccaccctcccagcacgtgggtgcattcgccaactcggaaactctccaaacccctttgtttaggatttttatggaggttccattaaataggcatgattgattaaatcattggccattagtgattggcttaatccccagcctcctcccctccccagaggttaatcacatggttgtttcc

SEQ ID NO: 731373 - DNA, 635 bp, Homo sapiens
ttctcacatttatattttcaaaatgctatatacttggaaacatatatatatttttacagaagtgcatagcatatttatgattgtgttacacaggttttcctgctgtctttgtcttttccttattagatcggttatcccctcttttattttcccttatcctacctaaagaagtctcctttcctttccaagtaatccatgttaacagcctacaatgcagccatctatattttctccatatttattatatacttatatacaataayatgaatgcatatattgcaggaatgacattcaaaatatgtagcaaatacgtactggctgcagtatgcacagcaccaaccaaacacagtgaacgcttgctaaaatgtccaatatggttttatcagtgtacactggctgaatgccagccctgcacacacacgtacacatatacacaacagaaatttctatcattatgttgttttacaaaaatggagcaatattatgaacacttttaccctatatttttaatgattgttttccacacagtacctcattccttaaatttcaactccaatatggctctattcattccatttaattgctgtataaagccatattgaatgggctagatctatcagtgtttattcaacagt

SEQ ID NO: 731374 - DNA, 635 bp, Homo sapiens
ttctcacatttatattttcaaaatgctatatacttggaaacatatatatatttttacagaagtgcatagcatatttatgattgtgttacacaggttttcctgctgtctttgtcttttccttattagatcggttatcccctcttttattttcccttatcctacctaaagaagtctcctttcctttccaagtaatccatgttaacagcctacaatgcagccatctatattttctccatatttattatatacttatatacaataatatgaatgcatatattgcaggaatgacattcaaaatatgtagcaaatacgtactggctgcagtatgcacagcaccaaccaaacacagtgaacgcttgctaaaatgtccaatatggttttatcagtgtacactggctgaatgccagccctgcacacacacgtacacatatacacaacmgaaatttctatcattatgttgttttacaaaaatggagcaatattatgaacacttttaccctatatttttaatgattgttttccacacagtacctcattccttaaatttcaactccaatatggctctattcattccatttaattgctgtataaagccatattgaatgggctagatctatcagtgtttattcaacagt

SEQ ID NO: 731375 - DNA, 542 bp, Homo sapiens
acttgtggacgtaatcagaggacccctaccccacctgccactcttccagtgacctactcctcatggggtgggatagctgtttctgtccatatggaagattaaacactctaaattatcttccactggaaaactggaagcaaaatgctagacaaaacaacatatttaaaacatgtaatgctgagcttctttgaaagaaatctggagaggtcaaaaaacaagaaggaagcaggaattctgtgaagtaataccgagggtttccgctacagacaggagactttcagcttcctttttgatagttgcaggggagatcagagggtagacgatgaggctagggcttgcccaaggrgtgagtctttgttaggagactcttctgcctaaggatgagaacccaacaggctacaatctgatggcaggagtgagcaagaaataaacctaatacgctgaagaggatagtaaggagaattgcctgtttcaaccttgacaccggacgagagggaataaaaatatctcccatgagaatttgtaatgacaagctggctctc

SEQ ID NO: 731376 - DNA, 634 bp, Homo sapiens
tgtaaatacataaatttatttttgggttatctcttctgtttcattgatctctgtttatttttatatcactatcatgctgttttgtttattatagccttgtaatatattttggagttaggtaatgtgatgcctccaatgttattcttttccctcaggattgctttggctatttgggctcttttcgggttccatataaattttaagatttttttttctatttctgtgaaaaatgttatcagtattttgatagggattacattgaatccatagattactttgggtagtatgatcattttaacaatatgagttcttatccatgagcattggatgtctttccatttgtttgtgtcctctttaatttctttcattagtgttttatagttttccttgtggaggtctttcacctccttggttaaatttattcctaggtattttttttttttttggtagctgttgtaaatgggattgccttcttgattttmtttttcagctagctcattattggtgtatagaaatgcagctgattttgtatgttgatttttgtatcctgcaactttactgaattaatttattagatccatgagtttttttggtggagtctttaggtttttctaaatagaagatcatgctatcc

SEQ ID NO: 731377 - DNA, 433 bp, Homo sapiens
tacttttagtagagacgaggtttccccatattggtcaggctggtcttgaacccctgacctcaggtgatccacctgcctcagcctcccaaagtgctgggtttacaggcatgatctaccacgcctggccgaaaattcttttacctgatgtaaactagactagatgaggattatgttttwtttatttatttatttatttatttatttatttatttatttattttgagacggagtctcgctctgttgcccaggctggagtgcaatggcgtgatctcagctcactacaatctccacctccctggtcaagcgactatcctgcctcagcctcctgagtagttgggactacaggcgcccgccaccacgcccaactaatttttgtatttttagtagagatgggattttgccatgttggccaggctggtctcgatctcttgac

SEQ ID NO: 731378 - DNA, 571 bp, Homo sapiens
tgctcttttaaaactgtagatgtaaactccaaaaacttccaaatctcattttgtcttcccagcaatgctggaggcgtttctgtccttctagtgtaatattttactaacgaaaagcaaatacctagaacaatctccagcctacaggtcaaatccagaccgcagcctagttttgtaaattaagctttgtcagaacacagtcacattcacttgttgacatcttgtctacagctgctttcctgcaaaggaaggtttgcatgcatgtgacaaagaccccatgtycccaaagccaaaaatatttactatccttacaaacaaagtttgcccatcactgatctagaatctgtatctatcccttacaacctttcatcatttggaatgtcatccacttcctttatgaaaactctgaaatcttgaaatagaggactggtttatttttaaaaactgtttctagattttcccttccaaagattaatttttcaggttttaaagggcttagtttttttgttttggtttggttttgagacagagtctgctctgtcctccagattgaagtgcagtggtatcatcacag

SEQ ID NO: 731379 - DNA, 462 bp, Homo sapiens
ttccagtccttggtatacacctatgagaattgaaaacaaatgtccgcacaaaaacgtgtacaccaatgttcatagcagtattattcataacagccaaaaggtggaaattacccaaatagccatcaatggatggaaaatcaaaatgctgtgtattcatatcatggatttttattcagccataaagaaggaaagaagccagacacacaaaaaacttcttgggatgattctatccacacraaatgtccagaataggcaaatccacggagacaaaagtgattgccaggggctggggatagggacggggtggggaccggggaatgacggcctaatggggttggagtttcttctcctcgggtgctgaaagcgttctgcaattagtggcaaaggttgcacagctctgtgcactgaattattcactcttaaaacgtgaattttacaatggatctcaacgaagctgttatt

SEQ ID NO: 731380 - DNA, 496 bp, Homo sapiens
gacggggtggggaccggggaatgacggcctaatggggttggagtttcttctcctcgggtgctgaaagcgttctgcaattagtggcaaaggttgcacagctctgtgcactgaattattcactcttaaaacgtgaattttacaatggwtctcaacgaagctgttattaagaaacaagaaagcttgggcttgagggatggagaatacagccttgcgagcctttttccccctagaactcgaaaccagaattgcaacgggaaattcccgggcctcggcctttttccttgggagtctggattggttttccgccaacaaacagatccccggaggccgtcgcgaggaccatacccacggacaaaacccacaacctgggcctctaggcaacgcgtgacgtcagggggcggatccggggcgcagttgcctggtaacagcggcggcccccgcccccttatctaaccaatcaagcgcgtctgcacgcagcgcgagcgccccacgtacg

SEQ ID NO: 731381 - DNA, 574 bp, Homo sapiens
acctcaggcagacgtcaccgtgcccagctaatttttaatgtaattttatttttttggtaaagatgggttctcattatgttgcccaggccggtcttgaactcctggcctcaagtgatcctcctgccttggcctcctaaggtgctggtattataggattgagccaccaagcccggcccgaatataatttttaawtttttttttttaagacagagtttcactcttgttgcctaggctggagtgcagtggcacgatctcggctgaccgcaacctccacctcccgggttcaagcgattctcctgcctcagcctcctgagtagctgggattacaggcatgcaccaccacacccaaataattttctatttttagtagagacagggtttctccacattggtcaggctggtcttgaactcccgacctcaggtgatcctcccacctcggcctcataaagtgctgggattacaggcatatgccaccacgcccggcctaattttctaatttttttttttaactgaagaaggaccccaggaagtcaaaagtgcctataacccaggaaagtctaaatgaggacaacgg

SEQ ID NO: 731382 - DNA, 592 bp, Homo sapiens
ttggaagctcaaagaaattcagtgatttgcctgaggccacacaagtgataggggcagagctgggactagaagtcaggattcctgactccccacaactgcattttccatggatagagaccccagggggggaaaaggcttacagagcagcaaaaaaatgcacccagtacaggaggcaaatttacttttatgaaacttccaacatttacagtttctaattctagatttacatgcaatgaatacatcctctagctgtcttctatcttccttactcaggacccaagctttctgcaataactatttgaaaaccagttttacgattttgactctgaaggaagattactcgtcttcttgtaggttctagtctaccytttcattgcttggccagaagattctatcagaacaaaagttatggtcatttcagcagatgctgggaataaatcccttcagcattctgattagttacaatgggtaataagagaactgtgcagaccaaaaactccaagtacatgtttcatgcatgtaaacctactcgtgatgggttttggctgaaagctaagcattgataaccttgccaccaaagcttagagtcgct

SEQ ID NO: 731383 - DNA, 644 bp, Homo sapiens
gctgccagcatttacacccatgtgcccagcaaactgggagtgaaggcagtaaagagtgcatcgggctgagacatggaaagcccagggttggatttggagtgtttaggccagggtgagatgccaaaccatcaggcaaccatcttccatgttcargttttgattttcattttaagtgcacaaaatccacaagcttttttttttttcatgcagcagcaacagcttcctaaaaacgtctctcagctgagccattgcccataacagcatgctatttggcctttgtaaaaggaaaaacctctgtatttgtatctagaacacccacagctgaatgtgtcagatgctgctggctagtttgattggttgccttgcatgggtggcttcccgcaggggctggctttcctaaagttgagtgggcagtcccgagttcttcagagatttctgcctaacctgaggaatgcctggtttaagcagagatgatgcttcgtgaaggaatggattcctttgcttttctgttgggagtgactgaggttcctagagtctttctcgtgagtgaaaaggaagtagaggtgtgctccagccaactcttcagatgaggcaagtggattgataatggaacattcctagactcctagagacctggctggcag

SEQ ID NO: 731384 - DNA, 644 bp, Homo sapiens
gctgccagcatttacacccatgtgcccagcaaactgggagtgaaggcagtaaagagtgcatcgggctgagacatggaaagcccagggttggatttggagtgtttaggccagggtgagatgccaaaccatcaggcaaccatcttccatgttcaagttttgattttcattttaagtgcacaaaatccacaagcttttttttttttcatgcagcagcaacagcttcctaaaaacgtctctcagctgagccattgcccataacagcatgctatttggcctttgtaaaaggaaaaacctctgtatttgtatctagaacacccacagctgaatgtgtcagatgctgctggctagtttgattggttgccttgcatgggtggcttcccgcaggggctggcttycctaaagttgagtgggcagtcccgagttcttcagagatttctgcctaacctgaggaatgcctggtttaagcagagatgatgcttcgtgaaggaatggattcctttgcttttctgttgggagtgactgaggttcctagagtctttctcgtgagtgaaaaggaagtagaggtgtgctccagccaactcttcagatgaggcaagtggattgataatggaacattcctagactcctagagacctggctggcag

SEQ ID NO: 731385 - DNA, 513 bp, Homo sapiens
tgtgtctcaagactggtgtatttcttgtgcaaatcaaatatgctcctttggatttggttcttattcttcaaagtagaatttgtagtgagagtaaaaattcatcagacactatcacctgagaaataagttgttgagtgaaatgctcaattcaccaacaactgcctgtccagccaatccaggagcagccccaacagggtgaggtcatctcactctgagtcacttactctcagtaggcatgctttcaagctcttgagtaaaagtgtttatatagaataaaatagttacagaagaaagataatttttyttaagataataataagtacattaacccaggaagcaacattcaagtaacattaaaaacacttcctgcttaccttgagatagagaaagatctcaattcaataattaaagtttgtatttgaatattatacttgaggtagaaactttaattattgaattgagacctttctccattctaaggtaagcatttagtgttataaattttcctctcag

SEQ ID NO: 731386 - DNA, 580 bp, Homo sapiens
tattttgtaactacactgagccatacaaagtttgaatggtttgtgcatgctgagaacattgaaactgaatattaaaatctttctatgtttcttcatatacagaaatttcagtccacacaatttgcaaagcccacattgtgaggctcagatcatatccataatgatagaatggcccaagaaatggttgattcagtggtttaggctgatctgagggtgggtgtgggggctgcatagtyagtcttcttcttacattgtctttatgatggtccagaaaaagaaactgatcacatgatgtccacttagaggagaggcagagcaaggggtttattattgctgggctatgagatgagagaggaatctgctctattactgtattctctcgacgatagttattaacaactacttttttctctgcttactagaaaatggagtaaacccgcagattggttaaggaagtcatgagggggaagtctctccactaatctgagcactcatttatactaataacagctccttatagtaagcacttactccatgcagtcaggttcgattcctttccacacattgcctaaataaagca

SEQ ID NO: 731387 - DNA, 600 bp, Homo sapiens
tctgattgtgtttattttattcttctctcttttcttctttatcagtctagctagtgggctatcttattaatttttttaaaaaaacagttcctggattctttgattttttgaagagttcttcatgcctatatattcttcagttcagcactgatcttggtaatttcttgtcttgttagcttttaggtttgcttgctgttggttctttagttcctttagcagagatgttttagttgagatatttgtagctttttgatgtgggcgtttagtgctataaattttcctcttaaccctgatttagccacatcccagagattctggtatgttgtctctttgctctcattagttgcaaagaacttcttgatttctgccttaattatatgcccaagagtgcttcaggaggagattgtttgatttccaygtagttgcgtggttttgagtgaatttcttaattttgagttctaatttgattgcactgtggtctgagagactgttacgattttagttcttttacttttgctgaggagtgttttacttccaattatgtgaccaattttagagtaagtgccatgtggtgatgagaggaatgtgtattctgttgtt

SEQ ID NO: 731388 - DNA, 624 bp, Homo sapiens
ttgtagctttttgatgtgggcgtttagtgctataaattttcctcttaaccctgatttagccacatcccagagattctggtatgttgtctctttgctctcattagttgcaaagaacttcttgatttctgccttaattatatgcccaagagtgcttcaggaggagattgtttgatttccatgtagttgcgtggttttgagtgaatttcttaattttgagttctaatttgattgcactgtggtctgagagactgttacgattttagttcttttacttttgctgaggagtgttttacttccaattatgtgaccaattttagagtaagtgccatgtggtgatgagaggaatgtgtattctgttgttttggttggagagttctgtagatatctatcaggtccacttgatctgcagctgagttcaggccctgaatatcttggttgattttctgtctcaatgatctgtcractgttgtcagtggggtattaaagtctcctgctattattgtgtgggagtccaagtctccttgtatgtctctaagtactttatgaatctggatgctcctgtattgatacatatatatttaggatagttaactcttcttgtttaattgaaccctttaccattat

SEQ ID NO: 731389 - DNA, 609 bp, Homo sapiens
cttgctctagtctgccctcatggtagatttattgagatacctacccacagaattgtccccacttccagacagcatcgaatccagagcaaagctccactttcttaaaccctaccccagtcaccaaatacagcacaaatcttttttactttatttatttatttatttatttatttttagacagagtctcactctatcgcctaggctggagtgcaatggcatgatttcggctcactgctacccccacctcctgggttcaagcaattctcctgcctcagcgtcctgaatagctgggactacaggcatgtgccatcacgcccagctaattttttgtatttttagtagagatggggtttcactgtattagccaagatcgtctcaatctcctgacttcgtgatccacccgtcttggcctcccaaagtgttgggattacaggcatgagccaccgcgccccgcccagcccaaatcttayaataacaattccttttgtaacctcctcttcttgagatgccccatggttcccccatggtttgccttctcccacactgcaacaagcactaaagcaacatgttcaacctattcaacttcaactaggtgtgttctagcggtgt

SEQ ID NO: 731390 - DNA, 510 bp, Homo sapiens
ggctggtatcgaactcctggcctcaagccattcacccgcctcagcctctcaaagtgctgggattacaggtgtgaaccaccccacctggcttcccagctcatcaattctttctgagacgcagtctctctctcttcttcccatccccatgtccttctgggaagtatactgctgggagaagttgccagaatgaatgttttttttgaccgagaaagatgttttgctgtcagaactgctgaaattctatcctggctctaggtcccagcccttgcaaagttattrattctgaagaattccatgaccttgtttctctaggtcaaacctctctattaaaagggtagttatactatctcacttcccaaaattacagacctgttcatttccaggaagccccttgagaacgcatgggcctgggcacagcagctcaaacctgtattcccagtattttggaagccaaagcaggaggatcacttgaggccagaagacgagtcttactatgagcaatatagtgag

SEQ ID NO: 731391 - DNA, 596 bp, Homo sapiens
gctgctgaagagtttccaaggagaggtaagcttttctattcattttctatcctgagccacccttcgtggctaattggtctttttattcacattaaagaaatgctccgggcaaaaggtgctgcccagatggtgccttcccggctgctccgacccagcgtcatgcagattttgcgctctgtgatgtrattttccattgggtccttggtgaaagccctcctggaaaaggaagctatgctcagaatacacagagctgtggtggattgccagcagaagtgccccgtgtgtggttgcaacaggcaggttgttggcgctacggccttcaggagcccatgcatcccctctaggaagtcgccttgtccccctgagctggtctggggctgccactgccatgagtgtgtgccataagtgtggtgctttgctgagaggctggcgggggcacagggaggccacttgatcacaggcttgaaacacagagcatctagcagaagccacgaggagcaagcctaggctcagtagaaggaagtggtttctaacggatccttccagagaaggacggagccatctggcagacggcacgtgggtggcaagtcacctgg

SEQ ID NO: 731392 - DNA, 594 bp, Homo sapiens
gattgcgccactgcactccagcctgggcaacagagcgagactccatctcaaaaataaataaataaagggaatttgacataaaatcgttaatgttgactgtttcagcctgggtgacagagcgagactctatctcaaaaaaacaaacaaacaaacatgagctccatgtctgtttcatctgttcccctctaagtataaacttcctgagccttctaagtccagccaggtgggccagcggtcaccgagatccttcctcgctgggggatggaataggcctcccctgctttgctgctgttctttggccttgtcccctgcctcttttcttggaccacctacaaggacctagrgggacacagtactgggggcaggagctgggaaaggcctgccatggttcactgatagtaagaaatagagactcactcggagaaatttcctctgaaatacagcagactcagcgcagccctttgggcagatgaaggaggctgagaagagcatcccttcagcaacagctgcgtgccagaagcttcgttccgttctgccatttcatctgcacagcagctcagcccggaggggagaggagtaaatgggcccagagag

SEQ ID NO: 731393 - DNA, 637 bp, Homo sapiens
catttactgacagtcactcagtcgaggggagtcggggtgccttaactgtctgcatacttcaggccttaatccagtggaatccagaaacattagtagggtgcagtaagttctgctagttgcaagagacagcaactcacactgtcacaggaaaagggaggaagcccttgggaataatgcaacaggcattccagctatatgccacacagccctgctcctggatcacagggagagccgccaagctggccccaggaacagcggagccagagtctcacccagcccaggwgtgacaggcacctgaccgcaccagctcccacctgcttccccttcctgaagttttatttatttgtgcatttccttgttgcttatctctgggtctcattagagtgacagctccatgaggatagggctttgcattgtggctctctgcccagtgcctggcacacaacaggtgggacatagtgaatgactgaaggagtcaatggacccaaattcccgccactcccactgagtcctcagcagcggagttcaccaagggttgcactggtgactctcagagctttgtccctggtccaggtctcactcctgagtgccagcttgcatatctgactgccgcctggactttcccactgggatggct

SEQ ID NO: 731394 - DNA, 424 bp, Homo sapiens
gctggtctcaaactcctaggctcaagcaatcctcccgcctcggcctcccaaagtgctgagattacaggcgtgagccaccacacccagcctagtaatggtgtattttaaagagttcctaggtagaagaaaaagactaggcactccagaacttctgtgctttggttgcaaagttcactggaagcatctctttgcaagttgtccttgcctctgtctgtgacctgctatcagaaccgtattttactgcttgctgagatgcagtttagttcctacagacacaaacccttcaaayataaaggcagtgcctggaagggtttattttaagatttaaatcttaggaagcacattaccagtgatataaaatattcattgactcatgaaacactgctagaagtcgctgtttcgtgactgactcgtctccctttat

SEQ ID NO: 731395 - DNA, 618 bp, Homo sapiens
aagactcctggaaaaaaaggtgaagaaatcagcctggcgtggtgactcacgcctataatgccagcactttgggaggccgaggcaggcggatcacctgaggtcaggagttcaagaccagtgtgacaaacatggtgaaaccccgtctctactaaaaatagaaaaattggccgagcatggtggcgtgcacctataatctcagctactcgggatgctgagtcacgagaatcgcttgaacctgggaggcggaggtggcagtgagcctagatcatgccactgcactttagcctgggcaacagagtgagactctgtctcaaaaaaaaaaaaatgacaaaatcttatgatttcgttagaaatagcccctggttttcatgccaagaagttcatcaatgtgccacttggtagccttctcgaaggtgatagaaatgtggccrttgcagcctgattctgtacggtgactccagtccacgtattccaggtctcctggtgttggcaaacaagacctgggacccagggcccctccggagagctccctgtaacttcagtagcaggagacatgcgggatccctttacaaatcctcagtttgccttcataaaacattttcattcatgtgattaaga

SEQ ID NO: 731396 - DNA, 618 bp, Homo sapiens
aagactcctggaaaaaaaggtgaagaaatcagcctggcgtggtgactcacgcctataatgccagcactttgggaggccgaggcaggcggatcacctgaggtcaggagttcaagaccagtgtgacaaacatggtgaaaccccgtctctactaaaaatagaaaaattggccgagcatggtggcgtgcacctataatctcagctactcgggatgctgagtcacgagaatcgcttgaacctgggaggcggaggtggcagtgagcctagatcatgccactgcactttagcctgggcaacagagtgagactctgtctcaaaaaaaaaaaaatgacaaaatcttatgatttcgttagaaatagcccctggttttcatgccaagaagttcatcaatgtgccacttggtagccttctcgaaggtgatagaaatgtggccgttgcagcctgattctgtacggtgactccagtccacgtattccaggtctccwggtgttggcaaacaagacctgggacccagggcccctccggagagctccctgtaacttcagtagcaggagacatgcgggatccctttacaaatcctcagtttgccttcataaaacattttcattcatgtgattaaga

SEQ ID NO: 731397 - DNA, 486 bp, Homo sapiens
ttaattcctaaaattttggaactttctatgtcatatttcctggattcaaatttcagaaacattagttctgtgctagctgtggtcccacctctagtccaggagcaatgtgggtatttctgtttttctattcccatcgctgggggctcggcaaggygccagaacctcctcttacacttctcatggtttatttttgaagtaactataattcttgacacagttctgaaccatctcttgatctgtgtgagatactgaagaaatgtcttctttttccttcatggctaatgctttactaatctgagaggactgtaacttttatcccagtgaggccctttccagggtttgctcagagtttggtttatattctgactcttagactgaatatgcattgctggtaaaatgcacaaaggcataaatgagagacaacccaaaagaaggaacgtggctacagattttggccttggcctgtgtttgctacgtggaaactat

SEQ ID NO: 731398 - DNA, 577 bp, Homo sapiens
aattgtggctggaacccacgtctcaactgacactgagtagctcagatcatcccaggttgagcaatttgctcatttatctaagtataggcaggggaacggcgaagggcccgcagactcagtttagagaaatggacttgcccaccctaaatactgagtagtccagattagaaacagtctttgcaacactgggccagaggacagatcacgttggttgactttacctatgttgctctccttagacccctttacatgaaagaaaacagcaccatcaatgcaattatcccacattttattcaacccaaccaactacgtgaagacttccaccacaagctgtcttcttttaggctttaagttgttcccatccaaaaattattatttttttacaacttctatgcattgcccagaaaaawaccactgcagagactttttaaaaaaaaatttggctaagctgtgcaccattcccagagacaaagatgagacacttaggctgaaaagacccagagaaaccagtttctaccacatcatttattcctacagcttgacctcctgttagtgcttcagagtagcagcaaaggtt

SEQ ID NO: 731399 - DNA, 621 bp, Homo sapiens
gcgaaggggtactgggtgtacctcagcagtgatggttttaggcaagagtagctgttcctttgagccccagtcttcttcccattgcttcttaaacttctcttcctcctctacaatcctaaaatgagacccccatgcctgttactggagtcagaacccycataggcccatctcctgcatatcggagagccccagccagcctggggagaagcctcatggttctagtcatgatgaatcaagcaaagtccccgagcttgtattctaaattgagtgtgaaccccaccttggcaattatacgagactatgtttcagttactataatatgacaggctttactacaaataaaggaggacccaccaggggatgagagaaccaggtaaactggttctggaggcagcctctggttggccacactcccctgagcacactgatgttcatgcacagacacgcgtggagccgaggtactcactgttccatctccttccggtatctctcattttcctctgctgccttctgggcaatttcttttctccttctgaaacacaaatgcagattggcatgtttggccctatgcaagagaaatgaactcttccttactgtgaattcttgatttggagaaaagtt

SEQ ID NO: 731400 - DNA, 638 bp, Homo sapiens
agccctggatacagagccgtggtgagattgccccctgctggatactgccggctcctccaggcaccccggccctggggatcaattctggagctcctcatttaataaccacagggcaggaggaactctcagataacagctgaagctgaagcccaaggaagtgaggttttgtccaaggtcacacagccagtagctgcaaaacagagactggctcctggagaggttccggtctgaggccagtgcaggtcagctgggggcttaactcgaaacacacgtgctcaccctttggagacgtgctggcacacgtgagggaygcaagctggactccctgtgggtctaggtaggtaggggctgggtggacatgcagcctccgaggggtcctctagggcaactcctgccctctacagcattcccacagagtcaccttctcactattccaaggaacgcttccctcccactccgggacacagaccccagtcttctcagggacctgacaggagtggccaagggctcaaaatggcactggggtgggggcccactaaagaactctctaggtttctgggaacatgtaattcaaggacagcggccagactaactccttccacctatttttcacaacaaccctgcagagcaggaatttg

SEQ ID NO: 731401 - DNA, 598 bp, Homo sapiens
gctctcccctctaccccaccccgtcctttgggtctatggcctttgaagtctgggttctgtctgaatggcgggggcagagatgtgtgtgtgtgtgtgtgtgtgtgtgtgacagcagcacaggagtgagatgtgtgccgatgggtgtaggggaaagttacaatctgtacctgccaggggcatgggggaaggggagtgtgtgtatagtgtgtgcactgagagtgtcatgggagaaatttatggggtgtgtatagatgtgtgtgtttgtgttctgtatgagtgtgagatggtggagtatgtctgttggccttcaatctgatggtatttcctgggtaggataaagagaaaagttcagaaatacggagatggcatgattgactgggaagagccctggaatctgagccatccagaccggggctagaatcccagctctgggatttcctagttttytgtgtgtggccttagtcacttcacctctctgtgaatccattgcctcccctctgtgatgtatggggactgagcgagatcacagaggaaaggcagttggtatgcaggggacagccatcggcattagtgaaaactcaataaggtgtgaagctca

SEQ ID NO: 731402 - DNA, 554 bp, Homo sapiens
atatatatatgtatgtatatgaaagtgtaacactggcacctacttttaaatccattaatttatgaaacaaatctcttgtagaatatgttggcattgaaacagtaggtggagcttgcagtgagccgagatcgtgccactgcactccagcctgggcaacagagcgagactccgtctcaaaaaaaaaaaaaaaaaaaaagaaatgtaatggctatctacaaaaagttagttttgattgttggtttcctcccatattttatgtgtcttcacacwtaaagaaaattaaaattttcaaacattttatattccacaatttttgaaaaagtacaccgtttttcactgctatggtctttataaaggacatgacttaaaatttcaaataaaaaagaatgaatgttctaggataactctgtcttttaagagcatctttatacggaacaatttgaactggcattcaggcaacttcttttgttgttgcacacctgtattaggaaaattacacccattttacaaaaaaaaaattccaaactatttactgaaataagctcaaaacaatg

SEQ ID NO: 731403 - DNA, 596 bp, Homo sapiens
ctgttaaaggacaggactgtacagattaaaaaataaataaaagaaagaaaaggaaaggtaggttggggggagtcaatgtatgtttctttatttgtgatatattacaaaatcacttctcaactcggtgccaggacaatgcttggggcaaagggagagtttgttaggacaagactcttctgagtgctggtattcttttgtatggtagagaaagttcctttagttttaatgacgttgacaagaggtgggagaaaggcactcatgatttcccacaaaggtttcattgacaaaagtttataatttttgttcaaaagcacttcctaccaaacagcaagactttgaagtttattctttgttcagtcatgcttgttatggtttctttaagaagacagtgaccaaaaaaccctactacttttatagctagttctctgtacattaaaaaataaaaagaaaagaaaaattwaaaatacttttgcttaaaggaccacaagacaaatatcaaattctccctcaaggttttttgtattacacctttaattgctaaaacatagttaggtagttcatatatttccccactgtatacttagtttattccattt

SEQ ID NO: 731404 - DNA, 605 bp, Homo sapiens
acaatatgaaaggtcagatcttcctagtagcactaacttacccaacattgattaggtataattcttgggctgctggctagtgttctaaatgtacactttattatgaggcatgaaacatgttgggaagccaggcgcgctgactcacacctgtaatcccagcactttgggaggtctaagtgggcagatcaccaggggtcargagttcgagaccagcctagagcacatggtgaaaccctgtctctactaagaaatacaaaaattagctaggcttggtggtgtgctcctgtaatcccagctactctggaggctgaggcaggagaatcgcttgaacgcaggaggcggaggttgcagtgagctgatatcgcgccattgcactccagtctgggctacaagagcaagactctttctcaaaaaacgaaaacatgttgagaaagtaatgctgttatgcaaatcctatgtttcactttcttgagttatggatgattaaatttgtaatcttaaaattgcactgccatgtgagtctaaaatttaataaactggttccacaaacaaagggaaaaggatggtattccttttaaaacatgaatcaagcagaactgtcatca

SEQ ID NO: 731405 - DNA, 661 bp, Homo sapiens
caatttcatgaaggtagtccctaagggctggccagccttgataatcattaactatgattaataagtcttgcattgcaatgaatagctgctttttatctttgagggcatggctttcctgggagaatatattcacattcattttctacatgacgctattctttatgaaattcttctacgattcaatatataccaacatgagcattccctattaaattttcctgtcttctgcgtcatggttctatgtagtttggggtatacaggaatccatttcccatgtacttatatagagaccccaaattcrgcagaaacagtacaagtaatcaaacagcaaaaattgtgttaaaacctttttatcctactgtggacataattattttctaaccagtcagtgactttgctgacttcttcaggcaaatgtggctttaattcaataaaagctcctgaatttttatcaactgaaagggatgtcagtgtagacaagtgacacatttttaagctgatatttttgtcattgccattgtggccaatttactcatctgaattttccaccaaatgcaatttactcatctgaattttccaccaaatgcaataagaaagcaacagttctgcctactatgatgccaccaatatgaagccagtatcctacacacagttacaacct

SEQ ID NO: 731406 - DNA, 618 bp, Homo sapiens
tgtggtacttgtttggagaatcaatataagcactggcattttttcccatctaccctgagcaccactttttaaaaaattttacattaaagggaggaagttgacagagatatgttctcattttgttcatcttagtgggaagagtcaacctttcatgttcttcatacgatgacgggagtggccccactaattcacactctgaccacagtgatgcaaatggccacatttctgttgccacaaggaagggcactctaaaatatttttgcctaatagaaatcacattatttcttttgttcaatatgattttgcaactttggaaatcttttaaaactaataaggtgttgaggattcgccaratgttccttatcctccacacatctttgcccttttgaaaacagagtgtctctataagcattgttagcaaatgcttttggttatacatttccacaaaagaatgctaccttttgcaattttgtaccagcattttatttcttgagactggaaatatcaaatactgcataaaatattagtacttcaaaactatattccctactcctaaatttaaatgttcaacactggtacatattaaagaaagtgaatatgacttttgcactggcattt

SEQ ID NO: 731407 - DNA, 654 bp, Homo sapiens
tttggaatgcatcttggtatagcagatttaggttttgtaaccttcccatattgctcaccagttactccaaaaccatttagtcggctgggcacagtggctcacgcctgtaatcccagcactttgggaggctgacgcaggcagatcacttgaggtccggagttcaagagcagcctggccaacattggtgaaaccctgtctctactaaaaatacaaaaattagccgggcgtggtggagcatgcctgtaatctcagctaccgcagaggatgaggcaggagaatcgctggaactggggaggtggaggctgcaatgagctgagatctcgccactgcactccagcctgggtgacagagcaagactccatctcaaaataaataaataaatraataaatataataaaaccatttagtctactccattggtctaccagtctaaacagtcatacactctgtttaatgtcagaggcttggatctactgatatccttcccactacctggcatttttggagatacttgcttatctttccaaattaaatttctaaaattaagatgttttagcttcagggaaaattatttttattggaatcatattacatttataaattaaattatgaagacatgacatttttctgaggctgcattttttttcatacaag

SEQ ID NO: 731408 - DNA, 636 bp, Homo sapiens
gtgccagggtaggaaaaccctttagtttttctcttgtcccttggtgctctcatgttgaggtccctgactgtgctccttggagacactggtgtgccatatgttagtgtcaaaagagatgaacctgctcctggacaagctgatgggcagaaacctgactctgtaggtcctgtaattcagataaacatctgaacttttgaatgcttattatatrgacctttaccattgatttcagcatggggaggcataatctatcgctacatctaaatttataaagcagagaccattatctttctgctccaggtttcaaataatggttgtacaatgattttcattcctgcactgcacttggagagaaaaacttttcagcagattttattaaaaggcttttaatccatgaaagcttaaccagctcaagtgggtttaaagcaccgctgctacttcacagaggatacacgaagcctagttgtctaataaccaccacttgctataataaagattttggatcagagctgatgaattacaatgtttcttaaatctgtttctgccaatatctctagacattcataacctcttttattgccttctcctcctttgggagctgaagggagggatgttctgttacctcttaagtcccta

SEQ ID NO: 731409 - DNA, 636 bp, Homo sapiens
gtgccagggtaggaaaaccctttagtttttctcttgtcccttggtgctctcatgttgaggtccctgactgtgctccttggagacactggtgtgccatatgttagtgtcaaaagagatgaacctgctcctggacaagctgatgggcagaaacctgactctgtaggtcctgtaattcagataaacatctgaacttttgaatgcttattatatagacctttaccattgatttcagcatggggaggcataatctatcgctacatctraatttataaagcagagaccattatctttctgctccaggtttcaaataatggttgtacaatgattttcattcctgcactgcacttggagagaaaaacttttcagcagattttattaaaaggcttttaatccatgaaagcttaaccagctcaagtgggtttaaagcaccgctgctacttcacagaggatacacgaagcctagttgtctaataaccaccacttgctataataaagattttggatcagagctgatgaattacaatgtttcttaaatctgtttctgccaatatctctagacattcataacctcttttattgccttctcctcctttgggagctgaagggagggatgttctgttacctcttaagtcccta

SEQ ID NO: 731410 - DNA, 626 bp, Homo sapiens
ggcctccagctgcatccatgttgctgcaaaggacatgttttccttcttttttatggcttcgtagtattctgtggtgtatatgtaccacatattccttataaaatccaccactgataagcacttgggttaattccatggttttgctgttgtgaatagttccacaatgaacataggagtgcatctgtcttcttggtagaacaacttattcacccttggctctatatccaataatgggattgctgggctgggtggtagttctgtttttagttctttcagaattctgtaaacagctttccacagtggctaaactaatttgcatttycaccaacagtgtatgagcatttaagcatttccttttctctgtaggcttaccagcatctattgtttttttgactttttgataatagccattctgactggtgtgagatgatgttccattgtggttttgattttcatttctctgatgattggtgattatgaacatttttttcctatgtttgttggctgcttgtatgtctttttttgagaagtgcttattcatgtcctttgcccattttttaacggggttgttctttgcttgttgatttgtttaagttctctatagatactgaatattagtcttttgt

SEQ ID NO: 731411 - DNA, 600 bp, Homo sapiens
ggtgcatctcccaagatgagacgggctccttgaaagagattaaatcattctggatctatagcacagtttactccccatcagaaccaagtagaaatactttctgattgaaggcacacataatttatatcttcagaattcccacagattatgtttaacaaaatatgaactatcaataaaaattatgaacacgtgatgtaacaaggcaccctaagagtgtgagcaaaacaacaaagatgacattgggatccacaaacagaaaaacaataaggtcactgtatccagtgtttaaaatagaaattataaaagccaacacagccatctgctgatgtggaaagggtaaagagcctttgcataccaagaattctgcaccaacatgaagcagagatcagctacagccaagagaagggacrggaaacttgctccaacaccagagcgctccccaaaacactcctctggctcaaagcagatttcagccaccatgggaaagtgtcagaaacgctgagaaagcccctcccttgagccaaaagcacaaatggcctccctaagactgtggctggcgcagagctgcgcaaccccatctgctcctaatcatgagctttg

SEQ ID NO: 731412 - DNA, 630 bp, Homo sapiens
gtcttaactgataaggttacaaattggtaacatcttcaaaactaaattacatgttttgtcaccttcataggtttttagaatgttaaattactaatgtttgttttacaaagatgtaaatctgaaatcacaagtctgttcacagaaattccgctgttttaaattttttatttctagatattttaatcaatgccttaactctattcagaagataaaattgcaaaattctcatgttctagagaatataaatagtcattgagatggcttcatttctaaatgtatgtgacttctcttaaattagtttgacattgccctacttctacgtgaayttctttaaacagacctccaaaactaccacgttttggttttgttttgtttttgtttttttgtaatcttcagcacttttggcttaaatattttctccatttctaggaaatttattttttcatgcttggtatgaaggtccatgatctatttcttaatggctacataattgtcagctggttattatctttgtagagctatgattatatttaaatatcattttaagttagctatatgtttcatctagtataattcttggtattagcttattcaactgattatgtggacttttaaagattttgtattatt

SEQ ID NO: 731413 - DNA, 659 bp, Homo sapiens
tcatgagaacacactcactattacaagaacaccaaggggaaaatccacccacatgactcaatcacctcctaccatgttcctccctcaaattgggaattacaattcaacatgaaatttgtgtagggacacagagccaaaccatatcaggttgccataacaaaatactacagactggatagcttaaacaacagaaatgtatttcctcacaatcctggaggttagatgagttgtgagcagatttggtttcctttggaggcttctgtccatgccttgctktcctctcactatgtcctcacatggctgtcacttggtaaaattgtgtgttgtctgggtgctaatctcatctttttattaggacatagatcatgtttgattagggcccacctaaatgacctgattatactttatttttctctttaaaagcctatttccatatacagtgtcactctaaaatactgggggatagaactaaatatatgagtattgtaaagacacagctcggcccagatcaccatggatattctagttgctctcatccttatcaacagttactattgtactgatttgtatttagttccattatttccagaaaacacactggatatactgcgttttaaaaatatatatattttttgccatttgatatgatttggttgtgt

SEQ ID NO: 731414 - DNA, 630 bp, Homo sapiens
aaatgacatgctgagactggtaacccaaaatgatggtaaccgagagtagtgctaaagctctaagttttggtcacactctcacctaagtgagaacttgatcaaaaggagggaagtgttaaacaaaattatggaaggccattgatttggactgagcactaggacccaaaataccagaccaggtcaaaccaaaatggagtcacttatgttacatgtgatttaatcaaactaatactttaaggaagcagatagattgcaagacagagcagttttttgtttgtttgtttgtttgcttgtttttgtttttgttttttgtctctcttctgaaaacaggtgattctagcataagaaggtcacctctgctttaatctttacaaatgagtaacctgaagaccttaccctcatctttgttctgctgtttcccagtgggatttgtggccagttaattacatttacgatggtgacagagtgacattaatgcctaaagtttttaatgggcaattgttaaattaagtttagcctaaagctgcttctgtacatattttaagtctctcccaaaggtttctttgtacatagwgaactgtaacctaactagacatgtaaacagactaaccaactcttgtaccagtcatt

SEQ ID NO: 731415 - DNA, 613 bp, Homo sapiens
gctcttacgtgcaggcagtcactacatggaaacttgtggtagggtttctcactgcaggggaaggctcactatagcagcactttctctctctatttcacagatgccatcaggagggatctttggcttggggaaacactgttttctcttcctgcctttgggtgactgtacaaacttaaaaaaaraaaaaagaaaaaaaaaaaaagaaaccctccagcttcagcacagctccacacagggtgtctagccaaaatgcaaagttttaccacagtgcacaggcagacagtgtttttcaagtgcgggaacagagtgaggtgcctttcagcacctttttcggcacttctttaaaaaatgatttaaattggaggcaatagcaccaaatgctgaacatctgacacgcagacaagacttaatgaatcatacactttaacaacatcactcttctctagccacttgacttggcgtccatggttgttggttttttctcccccacaaaaacatttgttctgcagactatttgctagttagagtgtcctgggcaactcttcatattcatggcagggagaactggcccaggaaaacctgcagacctgagttcctcttagagtcttctctt

SEQ ID NO: 731416 - DNA, 613 bp, Homo sapiens
gctcttacgtgcaggcagtcactacatggaaacttgtggtagggtttctcactgcaggggaaggctcactatagcagcactttctctctctatttcacagatgccatcaggagggatctttggcttggggaaacactgttttctcttcctgcctttgggtgactgtacaaacttaaaaaaaaaaaaaagaaaaaaaaaaaaagaaaccctccagcttcagcacagctccacacagggtgtctagccaaaatgcaaagttttaccacagtgcacaggcagacagtgtttttcaagtgcgggaacagagtgaggtgcctttcagcamctttttcggcacttctttaaaaaatgatttaaattggaggcaatagcaccaaatgctgaacatctgacacgcagacaagacttaatgaatcatacactttaacaacatcactcttctctagccacttgacttggcgtccatggttgttggttttttctcccccacaaaaacatttgttctgcagactatttgctagttagagtgtcctgggcaactcttcatattcatggcagggagaactggcccaggaaaacctgcagacctgagttcctcttagagtcttctctt

SEQ ID NO: 731417 - DNA, 576 bp, Homo sapiens
tttttgttttttttttaactgaaatatgtaaaagttgaattagtgaatatgggtttaaaaagaaatcattggctagggaaggtggttcatgtctgtaatcccaacactttgggaagctgaggtgggaggatcacttgagcccaggagttcatgaccagcatgggcaacatagtgagacctcatctcttcaaaaaaatagtaataatgaattagccagatgtggtggcatgtgcctgtggtcctagctactcggaaggctgaggcggaaggatgacttgagcccaggaggttaaggctgcagtgagctctgattgtgctactgcatccagcctgggtgacagagtgaaaccctgtctcaaaatgaatgaaagaatgaatgtatttccttgtaatttatccttaaagctgtatctattgaccttttatcaatcatarttattgtttataagctataagaactctttggttaaaagaaataaagtaaatacatttaactgtattctgtagtgtgttttgtcaagttggctagtgacaagggcaaaataaataattaaaaagcattactactaacaactt

SEQ ID NO: 731418 - DNA, 581 bp, Homo sapiens
aagctgtggatccatctggtcctgggcttttttttttttttattggaagatttttataattactgattccattttattacccctacttgtctatttaggatttctgtttcttcctgattcaatctcaggaagttgggtgtttccaggaatttatccatttcctctaggttttttagtttgtgtggatagagatgttcataataatctgtgatgatcttttgtatttctgtggtatcagttgtaatgtcacctttttcatttctgattgtgctcatgtgaatcttcttttgttcttaggtaaacttgctagctatcaattttatttatcctttcaaagaaccaacttttgatttcattgmtcctttgtgggtttttttgttttgttttgttttttggggtctcaataacacttagttctgctctgatctttatttcatttcttctgctagctttgggttttgttcttgtttttttagttccttgaggtgtgacattgggttgttaatttgagaactttctgtctttttgatatagacatttaacactataaaacttatttcttagcactgcttttgctgtat

SEQ ID NO: 731419 - DNA, 604 bp, Homo sapiens
ccttttcagtgaggccttcccttgtgttctgtgtaaattgcagtctccgccccgtttatccagctctgttctgttcttttattccatagcactgcattctcagattataacaagtaaatggtgtgtttattgctcactacttgttttctttagataaaatacaaactccatagggcaggattgttgctttaaacactcatgtgctgggcatagagtaattgcttggtaaatatttgttgaatggatcagcctctctgaagattgaytatatttttcttctgcttgggtgaccaagaggttggatactccaagtctctgaaactctgtgattggttatccatgactgtgtcacccttgggtaaagattttgaggggttcaacaagcttagacattggacagtaattgcaggacccctcttgctgcttaagcgctcttgaccctgagagctgtgaatggcaacctctgctctcagggtttcgacggttacaatttcagtatgcacgggacttaacgttgggctcctggtgaactgggtgttaatgtgtttttgaaacctgcccttaatgtacaaattactttggagtaaagttagatctgtggtcc

SEQ ID NO: 731420 - DNA, 631 bp, Homo sapiens
ctgaatccctatttgcgaaagcttgatgaagtttgcagggtgttaatagatggtatagggaagaagggtgaggcagtgcaggagagtgctgggaatgtgtgagttaaatttagagggtctgatgtcaccctcaccactctgggcacccttctaccccacagacttttgacctcacagatgacctctcagggcaccatagttggggaccatctctgcatgtcagcaaaaagctggtgccccgagcaagtgtccttactgaacctacaagctaagrccaagagctgcccattcagacatgtcacacttgaaccagccataagtagtggatttttttttttttttctggcttggcttctcacagtctgtctttattccaggtgctgcagcgcagtaaatgtaatttgaagaaggcagaaggaacccatggctttagccggctgcccagattcctttttgcaccatccgtactaccaggtatgggcgagcacatatatctgatcctggcccgatggtgctggtcgagggccagggcacacatgtcgccagcagccatggatcgtttctgtagctctcaggtcactaggacacgctggagcaggggctggtgacaagtcccatggtgcagaggccc

SEQ ID NO: 731421 - DNA, 570 bp, Homo sapiens
ccagtgtgttaggcaagcagcagacctctccctcctggtccttatttggagcagaactgaaaaagccattgtcatcctttgtaatttttcaaatctcagctattctgggccttcgccttccccatgctctgacagttcacgccactcttttgtctggtcccctttggcagataattggactccattaatgtttcatgtttcctttagctgtcaggatgcttgcagctcaatagagggctttatcccagcaactctttctgttcccctggtgtgtttgcttttcatcccgttgctccgcagtttccctgtgtctttcattcattcgttcattcgttcattcatttgtgaaacaagtatcggttgctcgtgtaggcgataggaggcctggggcccaggcccaggggatgcagtggtgagcagtragtcatttctgatttaatgatccacaacatatggaccgtttccgtccaaggaagtgcaaatcctttttcgaagtagcagagtacaacttagaaagaaataattctttcatttcattaagatcagtgatgaaagaatacttttaaattt

SEQ ID NO: 731422 - DNA, 582 bp, Homo sapiens
tttaagtctttaatccatcttgagttaatttttgtacctggtgagagacaggggtccagtttcattcagacaagggtccaggttcattcttctgcttatggctaaaatttcctgtagatgttttagtttgtatggatagagatgttcatagagatagccaattttcccagcactatttattgaatagcatgtctttttgccattgtttatttttgtcaacttggtcaaagatcagttggttgtaagtatgtggctttatttctgtgttctctattccatttcattgatttgtatgtctgttttttttaccagtaccatgctgttttagttccttgagccatgtaatttgaagtcaggtaatatratacctctggctttgttctttttgcttagaattgctgtggctattcaagctctttttttttttttgttccacatgaactttacaatctttttttctaattatgtgaagaatgacattggaaatttgatagaaattatgttgaatctgtagactgctttgggggcagtatagtcattttaatgatactgattcttccaatccatgagcatgagatgtgt

SEQ ID NO: 731423 - DNA, 281 bp, Homo sapiens
tgaaggggtgttgtattttactgaatgctttttctgcatccatttagataatcatatggtttttgttttagttctgttgatgtgatgaatcacatttattgatctgcagatgtcaaactatccttgcatccctggaaktaaacccacttgatcatgatgtattacctttttaatgtactgttggatttgctttgctagtattttgttgaggatttttgcatctatgtttttataagggatattggcctgcagtatccttactttgttgtgtccttgcctga

SEQ ID NO: 731424 - DNA, 588 bp, Homo sapiens
gattcttagtggaataaagttctagcaaagccaattaaaaaaaaagaggagcctatatagcaaataattattcttctgactttatgcaaatactccagccaagtataataagactacaacttattttgcaaatgaatttgtcctatgacttgtctttagtgaaaatgagactggagagaggaaaattatatttcaacataaactatagtacacctgttattagattctagtcttgcctaatgtttttcagttttttttattttctacaatttagattgaattcaaaaatttttcctggctacaagtctccaaaataatgttttcaatttttttcttctttcgtttacttccccccaccccatttttcctgatttgaaatcacttaaaattaagcagtctttcttaaagccctacaractgaagctagacaatgtaaacttcagaagaaaataatagcaacctatttacacacataaaccactttcatacctgcctactgacatggacttcagagtaatacggcctatattgattttccaggattcttcttcattttgtttgtttgttgttgtttttcttccttcctcc

SEQ ID NO: 731425 - DNA, 602 bp, Homo sapiens
cccagagctcctccagagccgcgctgcgttccgcccgcacgcaaatcccgcctccctgcgcctcctcactcgcagcgcccaggacctcagaaagggcctgccccgcgcgaatccccagtcgctgggacttacttggccaccaggtttacagacttcgcagccgctgagagctagagaagagcccggagagcgccatggtccggggacgccggggccgggaagcgccgtggcccgggaggacgctgctcccgcagtagcgcgagggaggggcaggaccggggcggctgcctcgcgggcccggaacgggaactggctgcgactacagccgcagccgcgcccctctgttggcgcgcccaagagcctgccggctgctgggagaggccgccgwagggcgggggcggtcaaggcagggtcccacggtgctgccattcgcccgggtctggcgcgggggggcgagagaagctgcgcgcagagggacgcccggtgcgagagggtgagcccctggccaccgcgcagggccgagtggacaggcccaagttcgcccagaggtgacacacttgggaatttgtggtgccatcgtgccaggtccctcctcgtaaaag

SEQ ID NO: 731426 - DNA, 602 bp, Homo sapiens
cccagagctcctccagagccgcgctgcgttccgcccgcacgcaaatcccgcctccctgcgcctcctcactcgcagcgcccaggacctcagaaagggcctgccccgcgcgaatccccagtcgctgggacttacttggccaccaggtttacagacttcgcagccgctgagagctagagaagagcccggagagcgccatggtccggggacgccggggccgggaagcgccgtggcccgggaggacgctgctcccgcagtagcgcgagggaggggcaggaccggggcggctgcctcgcgggcccggaacgggaactggctgcgactacagccgcagccgcgcccctctgttggcgcgcccaagagcctgccggctgctgggagaggccgccgamgggcgggggcggtcaaggcagggtcccacggtgctgccattcgcccgggtctggcgcgggggggcgagagaagctgcgcgcagagggacgcccggtgcgagagggtgagcccctggccaccgcgcagggccgagtggacaggcccaagttcgcccagaggtgacacacttgggaatttgtggtgccatcgtgccaggtccctcctcgtaaaag

SEQ ID NO: 731427 - DNA, 602 bp, Homo sapiens
cccagagctcctccagagccgcgctgcgttccgcccgcacgcaaatcccgcctccctgcgcctcctcactcgcagcgcccaggacctcagaaagggcctgccccgcgcgaatccccagtcgctgggacttacttggccaccaggtttacagacttcgcagccgctgagagctagagaagagcccggagagcgccatggtccggggacgccggggccgggaagcgccgtggcccgggaggacgctgctcccgcagtagcgcgagggaggggcaggaccggggcggctgcctcgcgggcccggaacgggaactggctgcgactacagccgcagccgcgcccctctgttggcgcgcccaagagcctgccggctgctgggagaggccgccgaagggcgggggcggtcaaggcagggtcccacggtgctgccattcgcccgggtctggcgcgggggggcgagagaagctgcgcgcagagggrcgcccggtgcgagagggtgagcccctggccaccgcgcagggccgagtggacaggcccaagttcgcccagaggtgacacacttgggaatttgtggtgccatcgtgccaggtccctcctcgtaaaag

SEQ ID NO: 731428 - DNA, 640 bp, Homo sapiens
gcattttcttccactaggaaaataaatctaaatgaggcatgagtttattagcatgactgaggtcaggaggtcaagtgattagagtggaaggaacaaaagcaggagcagtaggagatgaggtagagagacaggcaggggctgggtcacgtgggcccttgaggccatgttaaggaatctagattctaagaggtcacaagctattgggggtggtttaggtaggaatataatctgattttcaaagggataattctgcatgctgagtggagaatcaattctaaggggatagaaatgatagttaagaaattagaaaagacagggccaggtgcggtggctcacgcctgtaatcycagcactttgggagactgaggtgggtggattacgaggtcagaagatggagaccattctggctaacacagtgaaaccccatctctactaaaaatacaaaaaaattagctgggcatggtggcgggcgcctgtactcccagctactcgggaggctgaggcaggagaatggcgtgaacccgggaggcagagcttgcagtgagccgagatcgcgccactgcactccagcctgggtgacagagtgagactccgcttaaaaaaaagaaaaagaaaaagaaaagaaaagaaataagcaaag

SEQ ID NO: 731429 - DNA, 583 bp, Homo sapiens
aaggtgaaaacaaatgaccgtcaatgggtgaatggacaaacaaatgtggtctatccatacaatggaacgtcatgcagccataaagagaatcgaagcacaggtgtatgccacaatgtagatgaaactaaaaagcatgctgctattagaaagaaaccagacatgaaaggtcacatactggttgattaaatttatatgaaatatgcagaataggtagacccataggaatagaaagctgattggtarttactaggggctaggggaaagagggaataggaaattaactactcatcaggtacagagttttattttggggagatggaatgctttaatactagatagaagtggtggatgcacaacaatgtgaatggactacatgccactgaattgttcacattaaaatcgttaattttatgttatgtgaatttcacctttaaaaaaaaatgagaaacctagccaggcgcagtggctcactccggtaaccccagcactttgggaggctcaggcaaatggattgcttgagctcaggacttcaagaccagcctgtgcaacatggcaaaacccagtctctacaaaaaatacaaaa

SEQ ID NO: 731430 - DNA, 666 bp, Homo sapiens
tactgggaatggacagccaaaaaaatagtagaagttggatatttaaattttactatagatcagtgtttctcaactttttttttttcaatattgtattagtctcttctcatgttgctaataaagacatatctgagactgggtaatttattaaagaaaaaagagttttgattgactcacagttctacakggctggggaggcctgacaatcatggtggaagagcaaggaatatcttacatggcaataggcaagaaggaaaatgagaagtgaaagcagaaatcccttataaaaccatcagatctcatgagacttattcactaccacgaaaacagtatgggggaaaccacccccatgattcaattatctcccaccaggtccctcccaccacacatgggaattatgggagctacaattcaagatgagagttgggtggggacacagcaaaaccatatcaaatatcaccctaaggaggttttttagacattttttcccaactacctccatatgaaattttaatatcacagatatatatatcaatctatgtgctgcatgtatattctgcaatttatttttttaaagacttttttcaccactcccaacccagaaccaattttggctcccttagggggctacattgcccccattgagaatacatgctgtagaccctc

SEQ ID NO: 731431 - DNA, 545 bp, Homo sapiens
atgttgctaataaagacatatctgagactgggtaatttattaaagaaaaaagagttttgattgactcacagttctacagggctggggaggcctgacaatcatggtggaagagcaaggaatatcttacatggcaataggcaagaaggaaaatgagaagtgaaagcagaaatcccttataaaaccatcagatctcatgagacttattcactaccacgaraacagtatgggggaaaccacccccatgattcaattatctcccaccaggtccctcccaccacacatgggaattatgggagctacaattcaagatgagagttgggtggggacacagcaaaaccatatcaaatatcaccctaaggaggttttttagacattttttcccaactacctccatatgaaattttaatatcacagatatatatatcaatctatgtgctgcatgtatattctgcaatttatttttttaaagacttttttcaccactcccaacccagaaccaattttggctcccttagggggctacattgcccccattgagaatacat

SEQ ID NO: 731432 - DNA, 616 bp, Homo sapiens
agcaaaactagaatcgattctgccctctcaatgtccctgggagagacccaggattgcaaacttgaaaattctcttgaactccatgattctaagtggtaaacaaacttatttttgggtacttaaactgcatgtactcctggtaagagtgtcctckaatttatgttcttgaagacaaaagacttggaaaatccttttatgaaaaccccacaaaggttgttacaaatagagagttgcaaacaagtttcaagttgacctgatttctctctgtaaaaatcttctttggtgagagtactttcctctcccggaaaataagttgtactttaaagaaatgaacaaataaaaatgtttaattttatacatagtggctttctaattctttgccccccagtaaccactcaaagtgaagatattggctgaaagtttgttctttatagttatctactcacacagatttacttacatactttaaactttggaaagtgctgcttaaagtgctttaagttaaaatgtttcttaagttttaaattttatggagaccagtcctagctgctgagagtccaacaaaggtagcacttaatgcatacaagaaaatataaattcgggatcccttgtttac

SEQ ID NO: 731433 - DNA, 599 bp, Homo sapiens
cattagcaattttaatttcgccccgggcctgtgatctcgccccacctccatttgccttgtcatattttattaccttgtgaagcatgtgatctctgtgacccacaccatatttgtacactccctccccttttgaaaatcactagtaaaaacctgctggttttgtggcttagggggcatcacagaacctgccgacatgtgatgtctcccccggacacccagctttaaaaatttatctctttgtactctttccctttgtttctcasaccggccgacgcttacggaaaatagaaaaggactcatgttgaattatcaggggtgggttcccctgataaatgatagctctgaggacagactgtaggttgaataagactttgcttatttacaaaggttttcttagcttacacatgctccctctctcactctttctaaagcatactgtcacagaggctcctggctcaagtctatcttggactgataatgtcagcatacgccagaagacaactccatttttaagacacctaattattggcgattaaagctttcctgtaatttgtaggatcattccaaaatgcattccactgaacaatgcattctgagac

SEQ ID NO: 731434 - DNA, 604 bp, Homo sapiens
attcacttatcagttctaagagttttttgatatagcctttaggtttttctacatataagttcatgtgcctgcaaacagagacaatttgatttcctcctttccaatttggatgccctttatttatttttttgccaattgctctggctagggcttccattactatgttgaataagaatggtaagagtgggcatccttgtctttttccagttcttagtgaaaaagctttwaagatttccccattcagtaccatgttagctgtgggtttatcatatgtggcctttattatgttaaggtactttccttctataccatcttaattgagagtttttatcatgatgggatgttgaattgtattgaatgctttttctccatctttggagacaatcacataacttttgtgtttcattctatggatgtgatgtattatatttattgatttgcatatgttgaatcatccttgcattcatgagataaatcctacttgatcatggtgtattatctttttgatgtgttgttggatttggtttgtattttgttgaggatttttgtgtctatgttcattaaggatattaacctgtataacctttttcattttttggttgca

SEQ ID NO: 731435 - DNA, 604 bp, Homo sapiens
attcacttatcagttctaagagttttttgatatagcctttaggtttttctacatataagttcatgtgcctgcaaacagagacaatttgatttcctcctttccaatttggatgccctttatttatttttttgccaattgctctggctagggcttccattactatgttgaataagaatggtaagagtgggcatccttgtctttttccagttcttagtgaaaaagctttaaagatttccccattcagtaccatgttagctgtgggtttatcatatgtggcctttattatgttaaggtactttccttctataccatcttaattgagagtttttatcatgatgggatgttgaattgtattgaatgctttttctccatctttggagacaatmacataacttttgtgtttcattctatggatgtgatgtattatatttattgatttgcatatgttgaatcatccttgcattcatgagataaatcctacttgatcatggtgtattatctttttgatgtgttgttggatttggtttgtattttgttgaggatttttgtgtctatgttcattaaggatattaacctgtataacctttttcattttttggttgca

SEQ ID NO: 731436 - DNA, 575 bp, Homo sapiens
tgtagctcccataattcccatgtgttgagggagggacccattggagatgtttgagtcatgggggtgggtctttcctgtgctattctcacgccagtgaatgagtcccatgagatctcatggtttaaaaaatggaagttttggagtcgcttccaagatggccaaataggaacagctctggtctgcggctctcagcgagatcgacgcaaaagactggcgatttctgcatttccaactgatgtrcctgcttgatctcactgggactggttggacagtgggtgcagtccatggagggtgagccaaagcagggcagggcaacgcctcacctgggaagcacaaggggtcaggggatttccctttcctacccaagggaagccatgacagactgtacctggagcaatggtacacttccgtccaaatactgcacttttcccatggtcttagcaactggtaggccaggagattccctccctcgccgggctcggtgggtcccatgcccatggatccttgctcactgctagtgaagcagtctgagattgacctgcaaggctacagcctggctgggggaggggcatctg

SEQ ID NO: 731437 - DNA, 506 bp, Homo sapiens
acactattcgtgtgctggctggtggttgacatcgccatggccctccatccttctgtccatccatctgtccctctgtccctcttcctatcttttctctttttctctatgaatatttcataaatgcttggacccctgcactgacgctattcgtagaaaggaaaacagaatcatrtggatgctataacaggtagtttgattgctactgtttccagaaaggttcttgtgctttctttaacaaagccctgaactatatccatttataactgaacaattaaaaatgagttcagtttcggccaggcccggtggctcacacctgtaatcccagcactttggcaggccgaggcgggcggatcaccaggtcaggagatcgagaccatcctggctaacgcggtgaaaccccgtctctactaaaaatataaaaaattagctgggcgtgtggcgggtgcctgtagtcccagccactcgggaggctgaggcaggagaatggcgtgaattcgggaggtgga

SEQ ID NO: 731438 - DNA, 419 bp, Homo sapiens
gagaaaattagaatctgaacacttaatgcagctataacctaaagggaaaatagcaaatgctttgctattttttttttgtcttttttttctttttttgaagcatctttcccctttcttctttacttatatagattggactttgtctcaggtagacagaatttttgtattaaagttattcctagtgcaatttaggctgttatttttttttttcttgcttgctcttttttccctttcttcgactctttcctcttcctggtctctttcttcctktctcttttttttttctttagttgtagaaagttgagttccatcccaattattaaatcttaggagaccattcccacatggttccgtaaatggtagcttcatcccgcattctttcatctctttccctgctctctggcttgacagttgaaaag

SEQ ID NO: 731439 - DNA, 589 bp, Homo sapiens
gatgaattttctcaaaatgaacacaccatgtaaacagagcccaggtcaagaaagaaacgctctgttgatccacgctactgctgatgggcatttgggtggcatccagggtttggctgtcaggaacattggctgccaggtagctgtcttttggtggatctgaatacacatttctattgggcataaacctaggagtggaattattgtctcctagggtatgcatatattagctttagtagacactgcctaatactcttcccaaggggttgtatagacttgcttctcattcgtgtcaacacttggtattttctgtatttttcaytgtagcccttctttgggctatgcagtggtatccagttgtggtttcatttgtctctgatgactgagggactcaagtatctttttaagatatttatcggccgtttggatatcttcttttctgaagtgtctgttgaagtctcttttttaaaaaattttttagttctttgtgggtagataattgtttaccagtttttctatcactgatttgaagtgatacctgcattggttactgccttaatatatattttaggttctttttctgtaaaatttt

SEQ ID NO: 731440 - DNA, 615 bp, Homo sapiens
cctgctatccttgctaatttactccagcactctgtcaagttttggtaagaacattctcacttctgtgtcatcaggtcttacttgctgtgttttgagcctgtttcctcccctttattcttcaaagccatcagagtacaaagtgggtgttcttagtaatcttttacatgcttgaagatacatgttagagtatctgaaccttccatattttatttcttccactgatagttttattttgattttggctgattacagcttttcctgattagcttttaaaaatggagaacaaaagactccttgcttttataarggtatgattagtactcaatacaggaaggagttctgaaatgctaactattgatgaagtcattcaccttagtggtttaatatctgtttctatcttgtttttaaatagggtgactttctacaaccatctccctgttgtgtgaatgtgtttaggatttttgtacgttgcatgttctctcttgattgatgattgttctaagtttgttcttttctaaacatcccattgattggctggattatagtttattttattagtcctttattgttgcttatttaaggcattctttttaaaaaatagactattttttagag

SEQ ID NO: 731441 - DNA, 615 bp, Homo sapiens
cctgctatccttgctaatttactccagcactctgtcaagttttggtaagaacattctcacttctgtgtcatcaggtcttacttgctgtgttttgagcctgtttcctcccctttattcttcaaagccatcagagtacaaagtgggtgttcttagtaatcttttacatgcttgaagatacatgttagagtatctgaaccttccatattttatttcttccactgatagttttattttgattttggctgattacagcttttcctgattagcttttaaaaatggagaacaaaagactccttgcttttataagggtatgattagtactcaatacaggaaggagttctgaaatgctaactattgatgaagtcattcaccttagtggtttaatatctgtttctatcttgtttttaaatagggtgactttctacaaccatctccctgttgtgtgaatgtgtttaggatttttgtacgttrcatgttctctcttgattgatgattgttctaagtttgttcttttctaaacatcccattgattggctggattatagtttattttattagtcctttattgttgcttatttaaggcattctttttaaaaaatagactattttttagag

SEQ ID NO: 731442 - DNA, 641 bp, Homo sapiens
tgagataaggaattctgaaagacgtatgagtggaaaagaggtagataatgaatccaaatggaatatactgttgttgagataccattgaggtatccaaagaagatttcaggtaagcaattggatagtatgcctatggagctcagaaagagatatgattatcatggcacatttatatttacataccataattcacccatttaaagtgtaccatttaatggtttatagtacattgacaaaattgtgcaaccwttactacagtcaattttaaaaccctttcattaccacaaaaagaaaccctttacctattaacaatcaccctttatctattaatcaatttctcctgcaccctatccctaggtactactaatctactttctatctctatggatgtgcatattctgaacatttcatataaatagaataatatattatgtggccttttctgtctggctttttttactcagcatgttttcaagattcatccatgttgtagcatacttccttctttgttatagctgaataatattccattggaacattagatatactagatataccatattgtgtttatccattcattaggtgatagatatttgggttgtttcccctttggggccattacaaataagctgatataaaca

SEQ ID NO: 731443 - DNA, 641 bp, Homo sapiens
tgagataaggaattctgaaagacgtatgagtggaaaagaggtagataatgaatccaaatggaatatactgttgttgagataccattgaggtatccaaagaagatttcaggtaagcaattggatagtatgcctatggagctcagaaagagatatgattatcatggcacatttatatttacataccataattcacccatttaaagtgtaccatttaatggtttatagtacattgacaaaattgtgcaaccattactacagtcaattttaaaaccctttcattaccacaaaaagaaaccctttacctattaacaatcaccctttatctattaatcaatttctcctgcaccctatccctaggtactactaatctactttctatctctatggatgtgcatattctgaacatttcatataaatagaataatatattatgtggccttttctgtctggctttttttactcagcatgttttcaagattcatccatgttgtagcmtacttccttctttgttatagctgaataatattccattggaacattagatatactagatataccatattgtgtttatccattcattaggtgatagatatttgggttgtttcccctttggggccattacaaataagctgatataaaca

SEQ ID NO: 731444 - DNA, 627 bp, Homo sapiens
tcttgcctcagcctccacagtagctggggttacaggtgcacgccaccatgcctgactaatttttgtatttttagtaaagacaaagtttcgccatgttggccaggctggtcttgaaatcctgacctcaagtgatccaccaaatggcctcccaaagtgctggaattacaggcgtgagccaccacacgtggacagaaagttgtaatttcttaaaaaataaagtcttacatctgattcctgaataaacaatgagatrgatagatagatgataaaagacagatgagagataaatagacagacagacagacagacagatatataggcaggccttttatggattgtcagcttgtatccaagaaagaaccattatgtatggtctcaacccaaattgtttagcttgtaatagggttaaaatgtaaaatttagtttttaaattttattttaaattataaatattttagtgtccttctgtatataagtatacctcattcgtgtcacatttgttatttggaatactaatgagcagtctaaagctttcatgtgaatctctctgaaatatttctatggtaacacatttgagttattagggctataagcctgaatttgaatgtgatattaactatatactac

SEQ ID NO: 731445 - DNA, 574 bp, Homo sapiens
gatgataaaccaaatttaaagcagttatatatctgaagcccaaccatgtagaagaaaatttaaaccaacagcctacaaagtaagtatcaatcttatcattctgaaactttgtaaaggaattacactaataaatttgagttaattttttaatttatatttttctagctacattttatgttgttaaaatgttttacttttacatgatatatccaatttataaacatctacatgacaaaaaaagaaagttaaatcagtccaagacatatcaactgcagaaaactaatacagggctcatagttataatttgtcaatattttacttgctaagttaaaaaggagaaagacaaaagacttgccatctaattattaattacacaaaaatctttcaggaaaggaagtgaaacttgagacatcgtttttggagaacacmtatatttccaatacttcattttgcccatttcctcaaatattctataaaggaaaaagaaccttaaacataaatgttaatgtaaaaggtttcttgttacagtaaaataacaaagtggggagatattgatcaaaaggtataaaatttc

SEQ ID NO: 731446 - DNA, 741 bp, Homo sapiens
ttctctgttctcttttggatcctgtttctcccacaggaatctttttcagtgaactaaaacgccatcctaattgtatgttcagtccctctgttgacttcctttcttattggcaagatttttgcttaaagaaaaaactaaaacttcattggccttttgcgaagcttgagatgtatccacactggctcctcttggactcaatgctccatttgattcttcccctcctttgccaccttcagtcttctacccagttccctttaatcattgattgttcccccttcaaacccatatttcttccattgggtcaatcaatggataaaaatgtactgaaaagaaacatgagagttacggttgtcacataaagggatcaaaaagggacttctaggaacgctgatatgccttcaaaacacagcgaaggtgccattgtctcctttttgggtaacctatcttcctcatagagccccaacagtcacaagtaggttcagccctaattcattcatgggctccaccctgaattcggtaatctagttaatttaasaaacagaaacttaaaaagccacctgttcaactaaatggatcttccaaatacaactctccaatattttgctgcccattttcaaacttcttgtaaaaaagatttacacctataagaaaactctccatttgtaagggaatctccctctctacaccaaaaccactggaaacccataccatgggaaaggcattcccttaaaaatttccata

SEQ ID NO: 731447 - DNA, 552 bp, Homo sapiens
gaaaaaaaatcaggtaagataacactaaaagacaaggtggtttttaaaaattaacctgctacatgcaaattaaaaatgtcatcctctactgataacatgaagaaggggaggaaatcagaattctagaaaaataaatcctgaataatagataagacaaacagtwttgtatttcaccacacaaccaattctacacacagtgtaaatcaactaatgcccgctaacagtagaattaatcaaaatttaacttgatacttttttcttaagaagttttagttaatcactgcttacattttgcaaatactgggtttggctagaaattaaaattaattccttagatcaatgtcaccaggtgttttttttttaaatattatttgctttaaagtatgggaattctaggcaccaaaaaattcaacaaaaaaaccttcaaaaataaaaaatctaatatgtattttacttgacaaatgataagtttgcttatgttttaaaacctataattataaattttaaatacaatcactaagaattcctaaaagacacagataataaataagg

SEQ ID NO: 731448 - DNA, 591 bp, Homo sapiens
tctatatttctgtttttgtaccaataccatgctgtttttgttagttactgtagccttataatatagtttgaagtcacgtaatgtgatgcctccagctttgttccttttgcttggcttactttggctatttgggctcttttttggttccatatgaactttagaatagttttttcttctcttctgtgaaaaatgatgttgatagtttgataggaatggcattgaatatgtagattgctttgggctctatggtcatttaaatgatactgattcttagaatccgtgagtatggaatattttttcatttgtttgtttaatgtatgatttcttttagcactgtttyatagttctccttgtagagctcttttttgtccttggttagatgtagtcttgggtattttgtttgtgtgtggtggtttttgtaaatgggattattttcttgatttggctctcagcttgaacattattggtgtatagaaatgctgctgatttttgtacatggattttgtgtcctgaaactttagtgaacttgtttatcagtttcaggagcctgtgatggagttttttgggttttctaggtgtagaatcataccg

SEQ ID NO: 731449 - DNA, 591 bp, Homo sapiens
tctatatttctgtttttgtaccaataccatgctgtttttgttagttactgtagccttataatatagtttgaagtcacgtaatgtgatgcctccagctttgttccttttgcttggcttactttggctatttgggctcttttttggttccatatgaactttagaatagttttttcttctcttctgtgaaaaatgatgttgatagtttgataggaatggcattgaatatgtagattgctttgggctctatggtcatttaaatgatactgattcttagaatccgtgagtatggaatattttttcatttgtttgtttaatgtatgatttcttttagcactgttttatagttctccttgtagagctcttttttgtccttggttagatgtagtcttgggtattttgtttgtgtgtggtggtttttgtaaatgggattattttcttgatttggctctcagyttgaacattattggtgtatagaaatgctgctgatttttgtacatggattttgtgtcctgaaactttagtgaacttgtttatcagtttcaggagcctgtgatggagttttttgggttttctaggtgtagaatcataccg

SEQ ID NO: 731450 - DNA, 500 bp, Homo sapiens
ttagcctgttcatatggtgaattgcattgattgattttcaaatattaaaccaacttggcattactggaataaattctacttgttcatggtgaatacttcttttttatacattactggattttatttgccatattgagatttttagacataagattatgagatatgttgacccctagttttcttttgatgtactgtctgtctagttttgagaccatatttttattttttagagacaggatcttgctctgttgctcaggctggagtgyactggcacaatcatagctcactgcagcttcaaactcctgggttcaactaatcttcccaccttagcctcccaagtagctgacactgtaagcatgtatcaccctgcccagctaatttttattggttttgagatcataaaatgagttgggaaatattcctccctcttctatattctggaagtgattgtgtaaattcttttttaaatgtttggtataattctacagtgaaaccataga

SEQ ID NO: 731451 - DNA, 627 bp, Homo sapiens
tcagctacctcaggagtaaagttactttctatcagatctcactattgttaattagatactgcaaggggtgagggatgggacctgtgtttggttacagaactgttttccaaagcagtgggactaccaatgtttaagagtttcygttgttccacatctcaccagcacttgatattatcattctttccattttagccattttaggggcatataatggttttaatttgcattttcctaatgactaatgatttgagcatcttttcatgttatctgtcatttgcacatcttctttggtgaattatctattcaacttttaaaaattaaatttagtgatttgtcttattgctgagttgtaagaattctttatataatctggatataaattttgtattagatatgttttgtaaatattttctcctaatctctgtgcttttaaatttttaacagtttttttctacaaagaatatacatttttaattctgatgaagtctatttaaaacatttttcttttaaaatacatgtttttcataagaaattattgcttaacccaaaaatcacaaagatttttctcctgtgttttcttcgtctggttttatacttttaggctatttataataatttttatgcagt

SEQ ID NO: 731452 - DNA, 577 bp, Homo sapiens
acttgccggataactgatttagcattcactctactgagaaaactctgtataacaaagttgcctagtaaaatcattaggctccctgtattgaaatgaaaaaggctttggggatgtttcagacttttctgtgtatactcttgcttggaagtgggtatataatgatactaaaartgtatttaaagttcccaaaccatgcagcgtgagaaagttaccatatctttaaagaactgtctctactgtacaaaagacaaaagacaaacatcaatttttgactaaacagataactatatttatgctttcaactatttatgcttagaagccctttcagatgtgtttggtttcttttgtgttttagaaggtttagataacagggataacaatgtaacagaataaatctgtatctatgaagtaaataactggattcacaaatgaaatttaaattcccagttcactgaatttaatagttatttattgagtgccttgtaggtgccatgcactgggatgcaaaaatgtgcaaaaaccaatacactctcaaggaactttaaatttagtaggaaagatagacattaatcaagta

SEQ ID NO: 731453 - DNA, 532 bp, Homo sapiens
aagactcttccatttatatcagagcaccatgagatgctccagagctgatctgtttaggagaactccagaccagacagggtatctggattcaactatgttctcgactcacagcctaagggaaccccagaacccctaaatgtctctaggttctgggaatttagaatacasagcatgccaaatagcatgatattttcatgatgccatttgttaaaataaaacaaggtacatagtttttactgccaaccccaaaactgtacaaggcaaaaatactgcattagtctaattgacaacgtagcactatcttaacacaattttttccatccctctatttctctaccctactccatcttccgccttatttgtttatttcttgctttaacatccccacaagtgattttgtgagtctttggttacacttcaaattaaaacaacaaaaagttactgtttaaaaagcaaatcccaattccctctttgttcctcaaatatcattctccatgtgtggataatactctaaaatacagacttctcagta

SEQ ID NO: 731454 - DNA, 532 bp, Homo sapiens
aagactcttccatttatatcagagcaccatgagatgctccagagctgatctgtttaggagaactccagaccagacagggtatctggattcaactatgttctcgactcacagcctaagggaaccccagaacccctaaatgtctctaggttctgggaatttagaatacacagcatgccaaatagcatgatattttcatgatgccatttgttaaaataaaacaaggtacatagtttttactgccaaccccaaaactgtacaaggcaaaaatactgcattagtctaattgacaaygtagcactatcttaacacaattttttccatccctctatttctctaccctactccatcttccgccttatttgtttatttcttgctttaacatccccacaagtgattttgtgagtctttggttacacttcaaattaaaacaacaaaaagttactgtttaaaaagcaaatcccaattccctctttgttcctcaaatatcattctccatgtgtggataatactctaaaatacagacttctcagta

SEQ ID NO: 731455 - DNA, 645 bp, Homo sapiens
gagggggttcttggagaggttaagtaacttgcccaaggtcatacagctggtacatggtagagcagggatctattccaagtctaacacagtatccattctcttaatccctatactataatgtcacttgaatatggtaacaaaagtagttagaaytgccagtgtaatcaactagaaacaaaattcaagcctacttgatagtttagctcataaaatctgtctggtatcaccaaaggtgataggtgatttgggctggggagaatctataaattattttcaacaattcaaatagcctaatgcatgggttcttaatctgtttctgtgctacagtctcctatgactgtctggtgcagcctgtggactaccttctcacaataatgtttctaaatgcatgctggctgggcatggcggctcatgccgataatcctaggactttgggaggccaaggcaagaggatcacttgagctcaggagtttgaaaccaggctgaacagcatggcaagaccccatctctacaagaaaatacaaaaattagtcaggtgtggtatcatgtgcctatggtcccagatacctgggatgctgaggtgggaggatttgttgagcctgggagttcaaggctaaagtgagccatgatggtgctacagcactt

SEQ ID NO: 731456 - DNA, 381 bp, Homo sapiens
catatgcatccacacatatacatagataatatacagtgaattaaaatcaaatcctaggctttgctaggattgcaaatgaaacactccactgaaatcatcaaaacagtaaaaaaaaattgtgagatagcacatacatayttgtatattagcacattcagtaggagaaaccagagggtctgaaaactactataattttaattttagtgataaggataaaaggttttcaacatatctataacagtgtatgtggtatttggtatgagaatgtctttgctttctattggtgacaaaagtcaaaggtactgctgtgccactgtgatttgttgcctacatttataatggaaggaaatgtgaaatttcacaattcataatgaaaggaaa

SEQ ID NO: 731457 - DNA, 381 bp, Homo sapiens
catatgcatccacacatatacatagataatatacagtgaattaaaatcaaatcctaggctttgctaggattgcaaatgaaacactccactgaaatcatcaaaacagtaaaaaaaaattgtgagatagcacatacatacttgtatattagcacattcagtaggagaaaccagagggtctgaaaactactataattttaattttagtgataaggataaaaggttttcaayatatctataacagtgtatgtggtatttggtatgagaatgtctttgctttctattggtgacaaaagtcaaaggtactgctgtgccactgtgatttgttgcctacatttataatggaaggaaatgtgaaatttcacaattcataatgaaaggaaa

SEQ ID NO: 731458 - DNA, 693 bp, Homo sapiens
tgggatccatatgcagaagaatgaaactaaacccctatctctcaccatatacacatagaataagctcaaaaacgaaacccctatctctcaccatatccatgtaaaataagctcaaaatggattaaagacttaaacataagactcaaaatgataaaaccactagaagaaaacaggggaaacactttaggacactggtgtaggtaaagcttttatggctaagaccccaaaagcataggtgataaaaccataaacagacaaatgggtctayattaaactaaaaagtttcttcacagcaaagggaacaatcaatagagtgaagagacaacctgtagaataggagaaaatatctgccaactatccatctgaccaaagactaatatccagaatatacaagcaactcaagcaactgaagagcacaaaccataaataataccattaaaaagtgagaaaagggccaggcgtggtggctcaagcctgtaatcccagcacctggggaggccaaggtggggcagatcacgaggtcaggagatcgagaccatcctggctaacacggtgaaaccccatctctactaaaaatagaaaaacttagccgggtgtggtggcaggcgcctgtagtcccagctactcggaaggctgaggcaggagaatggcgcgaaccggtgtggtggagcttgcagtgagccgagagatcct

SEQ ID NO: 731459 - DNA, 621 bp, Homo sapiens
gcaacttgccgaggacacctcactaataatgtcagagatgagatgattaggccacgactcctgagcctgcacactcaaccacgcacacactggctcccagcagtcagcctgcaatgcttcctacttgccaattccttctggccatgcttcaatgcttgagaaaatagactaattattatattcatattctttttttttttttttgagatggagtctcgcactgtcactcargctggagtgcagtggtgagatctcagctcactgcaacttctgcctcccggattcaagcaattctcctgcctcagcctcccgagtacctgagattaaaggcgcctgccaccacgcccagctaatttttttttgtgtgtgtgtatttttaatagagacggggtttcaccatgttgatcaggctggtctcgaactcctgaccttgtgatctgcccacctcggcctcctaaagtgctgggattacaggtgtaagccaccgcccccggcctgtattcatattctttttcaaacatgaaagaacttattcaagttcctattgccatggggctagaggccaagaatgaaaagggttatcaccatagaaggcggtgtgggtggaggtggtagtaagta

SEQ ID NO: 731460 - DNA, 621 bp, Homo sapiens
gcaacttgccgaggacacctcactaataatgtcagagatgagatgattaggccacgactcctgagcctgcacactcaaccacgcacacactggctcccagcagtcagcctgcaatgcttcctacttgccaattccttctggccatgcttcaatgcttgagaaaatagactaattattatattcatattctttttttttttttttgagatggagtctcgcactgtcactcaggctggagtgcagtggtgagatctcagctcactgcaacttctgcctcccggattcaagcaattctcctgcctcagcctcccgagtacctgagattaaaggcgcctgccaccacgcccagctaatttttttktgtgtgtgtgtatttttaatagagacggggtttcaccatgttgatcaggctggtctcgaactcctgaccttgtgatctgcccacctcggcctcctaaagtgctgggattacaggtgtaagccaccgcccccggcctgtattcatattctttttcaaacatgaaagaacttattcaagttcctattgccatggggctagaggccaagaatgaaaagggttatcaccatagaaggcggtgtgggtggaggtggtagtaagta

SEQ ID NO: 731461 - DNA, 616 bp, Homo sapiens
tgttaggattgcccagagggctccaggatcatcagccttatccaatagaatgtttcctgttggcctttcacctaatggtttcacagctattaaatatggtcccctagatgtatcattttattagatattaatacattcagaatgtggcaaactctacagtgcaaataacttagttttttaaacaaataaattgcaaggaaaaaagccagcgggaaagrgaagctacagattaaaatatatttaagagccacaacaaccaaatccagtgtataggtttgtcctgcttattagtaaatggacatttgctaattaactgcagaaattttaaaactgactggaaatccaatcctattttttaggtgtgatgacgcatggtaattacacattttttaaagtccttatcaagatacatactgaaggatttataaataaaatgacatgatgtctggtatttgcttcaaaacaatccagtggatgggggtggtgggccatggaagaacaggggagagggcttggggagagaggaaatcagatcagccttgagctgccgtgaaggctggatgacgggcacctgtgggttctcggtgccctgctctctactgtggatgacttcttg

SEQ ID NO: 731462 - DNA, 635 bp, Homo sapiens
caagccctgctctgaagcccaggccagctctgagacgaagcacatctctagaatccagctgagccctgacaacaagccaaactctggaacccagacacattttaagacccagaccagcttggagaccaatcccagttccagaatccaggctagctcggagaccaagccctgctggaaaactcaagctgactctggaactctggacagctccacgatgcagccacacctggacactcggtctagctccggaaccccagttaattttggaacccatgtgagattcatgaagcagcccagctctggaaccccagtcagctcaggattcagagacagctcccaaaycaaatcctattcaagaactcagaccagctcagaaacccaggtccacacggctgcccagtccagatcccaaccccagttgcatccaagtgcccatccccatcctgcagcccagtccagctccagtgatgattccagctctgagactgagcccagctctagaacctcgcctagtgctacaaccaggcccaactccaggattcagaccagctctggaaccccatccatcttggaagcaagacccagctccagcacacagcttggtgccaagccccactctccttgcacaatgcagc

SEQ ID NO: 731463 - DNA, 600 bp, Homo sapiens
gcgtgtcctcgtccattggttcttgcatgacaatcagagggacacggatcctccctttcatgtgagtactgcatggcacaggggtggaaaagaagggagaatatttactcaggaggtggtctcatgtgagtgatgtggaaatttctagttggcaggatggaggaaccatgcaggcgcaggtcctggagaccctccagcaccaagcatgaaacctgcagtggctgaactgtgggccagtcatgaggtctaagggaggagaacactcaggggttagggctgtggctctttatcaaggggcacagaattttcagggaatggacaaggcatagacccaggtaagtgactgtggctcactttccatcttgtgaggggaagagaatctccccacctgggggatatacgaggagctaaagcagccccacagggaccaggcctgcagtatcaccagagagaycagggaggcttctttatgccttggggaaaagaaggaagggatttgtgtgtgtgttgagtgtgtgtcctacaagggaggggcctgcccaacactccgtgtgctttgccctcagcaatgacccagagctgcgggtggaattctacact

SEQ ID NO: 731464 - DNA, 674 bp, Homo sapiens
gggaggttagggtgggggaagttccatattagacatcaagagatgccagttgacatctagaaagagattgggagaaaggtcagtatttgaagatgttgtttaggggattcttcatgtagtcttgatggttgaaaccctaatattgtagagaaagtatataacaggagtgggaggagaactcatttgggacagttcagaggaggaagaggggccagatgaggagcagtcaggacgatgggagcaaatgaagagtagatgactgggaagagaggaaactcatggagaagggaatttcaaagaaggagtgataaatgctgataacaaggggacaacatgtgaaaaaaggattggctgaaatcgtaaacatttgtgacttttagaagagaaatttcagtagattggtgagggcacaaatacaatttactcgaacaccattttgaatgtcaatttaatctttcttttatgattcrtatggcatttcagtacctcttaggacctcttggtcatttcataaatattggttatgtaacactgcagtttaaaagatacaggattaagaaaaatggtataggatattgtatattgaaaatttgctaggagagtagattttaggtgctcttaccacacacacacacacacacacacacacacacacacacacacacacgaggtag

SEQ ID NO: 731465 - DNA, 581 bp, Homo sapiens
tctagtttccttcttctgcatgactatccaattttcacagcatcatttattgaatagaatgttctttccccagtgtatatttttgtcaactttgttgaagatcagttgattgtaagagggtggctttatttctaggctttttattctgttccattgatccatgtgtctgtttttatagcagtgccatgctgttttggttactacagccttgtaatataatttgaagtcagacaatatgttgccttcagctttgttctttttggtgaggttttttgatgattcaggctcttttytgattccatatgaattttggtattgttttttctgactctgaaaaacaacattcataatttgataggggttgcattgagtcggtggattgctttgggcagtatggtcattttaacaatattgattcttctaatccatgagcatgggatgctttatttgtttgagtcttgtacaatttctttaatcagtgttttgtagtcctccttatagagatctttcatttccttggtaaagcatatttctaggttttgtttagttttgttgttgttgctgttgtagctattgtaaat

SEQ ID NO: 731466 - DNA, 590 bp, Homo sapiens
ctggccagaactcgaaaccagcttctcctctctgtggttttaatttgcattttcctagtgattaatcctgttgaacatctttttatgtgtttgttagccactcacatatttattgtgtgtgaaacaattgctcaaataccttttgcccatcttttttaccctctacccacaacaatttgtttttgatgtcacaatttacatatttttatattgtatattctttaacaactcatcgtarctttatttatttttgatgactttttgacttttaactttcataatagaaatttatatgatttatacaccagcggtattatagttttctggatctggctacacatttacctctaccagtgagttttatactttcatatatattcatgatggtaattattgtccttttattcccactttaagaactctcttaagcatttcttgtagggcagtactagtggtgatgaattccttcagcttttccttatttgggaaagactttacttctccttcatttctgaaggacagctttgctgggtatagtattcttgactgacagtcttttttttcctttagcactttgaatatatcatccc

SEQ ID NO: 731467 - DNA, 595 bp, Homo sapiens
cccacctcagcttcccaaagtgccagaattacaggcatgagccgctgcatctggccactgtgtgtgtgtgtgtgtgtgtgtgtgtgtgtgtgtgtgtaaatatatatatttttaaaacctttttattttgaaataattcagatttacaaaaaaagtgcaaaagttgaagggtatgagaatttcctttacccagattctacaaatgctaacattttaccatatttgccttattgtgtttccctcatttttttttcctgaactttctgagagtaagttgcagacataatgcctatttaccccaaatgaacatttttagaattatgacagcccatttgggtctagatctyctggagaaataccttagagtatatttttttaagatacttcagtgtgtatttcctaaatatacaaggacattctctaatgtaactgcaatataatgaccaaaaccagggtattaatattgatgcaatgctatcatttaatctttccatttgtcctaataatgtattttatggcaaaaggaaaaaaaattccctgtggaccagtatcctattggggatcacacattgcatgtagtcatcatgtctcttta

SEQ ID NO: 731468 - DNA, 522 bp, Homo sapiens
tttaaacctttaccaagctctttctcagaagctcacaaaacttaagacaatgtgaacatgatgagaaagcaaagctctccaacataaggctgaaaatgacaataaaagactgcaataaaagactagtgggatgaayatgaatgcttgtcagtgacaaacacattatgcctacaaagaataaatactgcacttctctttaggtctatttacagacaggaccccatgacctttcaggcataaacctccactggcagaagtaagaatttaatcacaaaacttctatggtaaattataaaaaataagaaatttggatttaggccttctgccatttccaatacaagtagctttgagtattcttggttgacaagggaatgtttgcatttctaatgttaacaaagaaaatatccaccactggcttcttaaccagacggaagcgggcaggtttctggatagaggcttaaggcaaatcaaacaggttcacaactaagcagcctattagggattccaggcatggctttgctt

SEQ ID NO: 731469 - DNA, 532 bp, Homo sapiens
acatggctcaagatgattcctacaaaggatccacagatagactgtcctgcaaaagttgatggtgcattctcaagtctgaagacagtagggaggcagaattccttctttatgggggtgctcagtcttttttcttgaggctttcaactgatcggatgaagcccactcacactggggacagcagtctactttactcaaagtctactaattcaaatatcacatctttacaaaggtactatcacagcaacacctaccctgatgtttgagcaaacatctggatgccgtaatctagccacactgacacawaacacacataagatgttctgaaggtacagtcagaaagattgatgaatggataggatatggtttatgaaactaaagagaagtcaaggatctctctgtggctcttagactgaacaaagggaagattaaagttgctaattaccgatagggcaacaaatgaggaagaagtcatggagatcagaaatatggaattttgtctggagctgttaacaatgtgatgcctgacagacac

SEQ ID NO: 731470 - DNA, 523 bp, Homo sapiens
gcttcctttcctcccctcgcctcccctcccctcccctcccctcccctcctctctcctctcctctcctttcctttcctttccttttttctttttttttgagatggagttttgctcttgttgcccaggctggtgtgcagtggcgtgatctcagctcactgcaacctccgcctcccaggttcaagcgattctcctgactcagccttctgagtagctgggattacaagcgtgccggcaccacgcctggctaatttttgtatttttagtagcaatggggtttcaccatgttggccaggcttgtctcgaactcctgacctctggttatccacctgcctcagcctcccaaagtgctgggattacagacytgagccacggcgcccggctgggagcattattttcaaaacaatccaatactgaccccattttactaataatttaaacaaaaagaatggtaaattctttacccaatatttattgggaaaataaataccttactgtgtttgaaaaaaaacagtgatatgcaact

SEQ ID NO: 731471 - DNA, 601 bp, Homo sapiens
atgctattgcactccagcatgggcaacagagtgggactttgtctcaagaaaaaaaaaattaggttttgcattgtaaaagcaaaatgccttcagatcttatgaatggagtcttgttgatcttaaatagttactggcatggttcaaaggagaatgaagacaaggaaaggaattaagtgaaacttcaatattaccttgaagtagataaatagcttcattcgacttgtccccattgttacaaaaactaatggtttaaggtgaaggytatttttttttcaatttcatttaaagatgagttaggtatccacagttttggatgtgcgcagatttttgcctgaaaattttggaagccagagtataacaggagaaaaaataaatcaccaccaaatagaatacagcattgcataaatctgaaagttctccacattttgtgaagtgaggggtaaaaacccttgctgaacagagcaacaagaaaaactaacccagagtatgaattttcatatagagtaggaaagataaggatggacaagacaggaacgtgtggttaattccagttttaggcatatttatgtggctagcataggccaaacaacactatggctta

SEQ ID NO: 731472 - DNA, 614 bp, Homo sapiens
tactctgaattcctatgctcctctgtgcttcagtgaaatgttggcaatatctatccctaattaacccaatcaatcatttactcaatgcctagatctgaaaatctgaatactctttgaagtaacacacgtaacaacttcatgaccacaaatcccagagaagcctctcacatttccagacaattttagcattttaatctaattattttcccttctcaaaggtgacatttctccactgtctctttcctgaaatttttctcattctcagctgaaaatttgattcatatttaataaaatagatccaatccagtgccttatcttattacagctacatccaccaaamtacctgcatctgtatcacatgttgtgtcatctctctctttaaaatctatgaactttctctgctcttatctaagagcatggatactctggatccatactttcataccttgttaggacctcactcctagaactccctccttttacttctgtctcaccttctaatggttcatttacattagtactcatgtagcaggacaagttgcagacaaaacccctcagacaccgagttaaggaaggaagggcttcatttagccgggagcttcagcaagactcac

SEQ ID NO: 731473 - DNA, 583 bp, Homo sapiens
taatagagtttggatatttttcgcctcccaaatctcatgttgaatggtagttcccatgttggaggagaggccttgtgggaggtggttggatcatagggctggattcatataaatagtttagcaccatcccttgggtgctgttctcatgatagtgagtgggttctcagaagatctggttgtttaaaagtgtgtggcacctcccctctgtctcttgctcttgcttctgctcctgccatgtgagacccttactcctcctttgccttccaccatgatttgaattttcctgaggcctccccagaagcagaagccatgwtgcttcctgtagagcctgaagagccatgattcaattaaaacccttttctttataaattgtccagtctcagttatttctttatagcaatgcaagaacggactaatacagctgctgtttagacttcacgtgagcaagcattcaacttctgtgctatgacagtaagcaactagcattcatttaattcagtcttacttacccttacatctaatcaaaattttgttaattctgtctctttgatatgtactaaatctgcaattattttctttatta

SEQ ID NO: 731474 - DNA, 548 bp, Homo sapiens
atgccgcttctggaatcgcgctctcgccgccgcgacagcgaccgccgccgccgcgtctccccgcccccacgaccgcacgtcgccgtgacgcgcatcgcacgaggcggttcgagccaataagaccacacgccgtgcgcagccgcgctgtcctaaaccggaagccgcccctctgaccgctctaaaacctgggtgcatcgtgggagctgtggttcggccaggaacttagcgaaaactatactgggtgttgagggccsgaggagcgtgcgctccttaggcgctcacacaactcctcggagttttttctcccaccgaaaaaggaagcaatttggagctgaggaggagggggccgccccggctcgcggatgcttttcgcagtctctatggatactggctacacactttgggcaagagccagaatttgaggatttaggctggatcgtgtgtctctgccaagggctgataggatgctgagcgtcgtctgtgaagactgcggaaagaaatccaaaagcattagcccagttttgcccagagcaatagtgtttgccttt

SEQ ID NO: 731475 - DNA, 603 bp, Homo sapiens
gtagacacaagtaacactgggcaagtcattgtcaaatataaagcctgtcacttctacaggatttaggcatgtgagatgcaagcttatgtagtttaacaaaaagaaaataggttaattttgcaaattttataatttgcatgtgaacacatttcctgggtctcttccagtgccatggaaggggctcctacaagtgaggggccaccttgaacttgattggcttcctgggaaatccactgcaacccccagattggggctcagcaggctgttgcacccagaagatgtagctgagaagtggatgggacttgttggagcaccattttatgcaggcaaaatttgagatgattgttaccattgttgagaaattttaaattggggaacttggacatgttaagactcaggttgatgcaattttattgttgtattcgtwcactgaatacctattgcttatgcaaagtgttcttggggatactgatatggacaaagacaaaagtcttgtcctcattgatataagaggataataaggcgtatggcaacaaataaagcagaggaggagatgggaatggtaatggtaggtcccacctctgtggaccatgttgataagat

SEQ ID NO: 731476 - DNA, 485 bp, Homo sapiens
gtaaacatgtaaactataagcatagtgggtcatcattttcacaatttcacctgttcaccattaaattcctagtacctagaatgccggtttggtctataaatcagtatataaatggtttagtgggctgaacattgcattggcattcttggtattcactactaacaaatgcagaagtaggagagggaaataaatcatagtttaaatgtggtacctgaacyatccctaattctctagggatttgtgaacttctcgagctatttatgtgcctcatgatcttccagaaatattgcagcaagattctgaggtgttgctgactcatacaaggtgacacatttgttttcaaaataaatagaagagccaggccaggaagaaggaagccaagataaacataagtaaagattactgtaattgaaagaagagggtatgtacttgtagaaaagtgacttctctaatatgcgtgtttctgcttttctcctaattttata

SEQ ID NO: 731477 - DNA, 622 bp, Homo sapiens
aaaatacaaaaggaagagcatgtgctatttttttgatgtcactgacttcagagacactgtgttcaaagaattaccaacatactttaattcagtgattgcttggtgtttagaatgtcagtgctttaattttgagcatcctgaaatatatcttttgtacatacagagacggatgtatcagaatcagattttcagtaacccctggattatagtttggagtactttaatttagttaccctcagtggtctctaggagtttatgtacacttagattttctgtttataaatgcatttagcttttctgtatctgggtaratggagctattcaactactcagcatagaattaagattaaaaatttgtttgctaaagaaaaggaataaaaaaagaaagaaatttgaaatcaccccactatctcttcccaggaagtgtaagattgcatttttgaatattcaggttatttctaaacatgtagaatcaggaagtctaataactgaacacaaattagagagctattcatccagcagatttctagtcttggccagacattgggaccatctgcggttctttccaaagtgcagtttccagggtccatgcctggaatgctgaagaaacgggtcagaagtt

SEQ ID NO: 731478 - DNA, 596 bp, Homo sapiens
ttactcttcgttaatattatgtttaacatacttaaaaaatatttccatttgcaattctgagcaattttaaaacaaatcattgaagtcgtgtaagcttatgccaaaattactaggtttccagcccaagtaaagagtggccccaacctttttggcaccagggactggtttcatggargacaatttttccatggacctgggggtagcaagtgatggcttggggatgaaactgctccatctcagatcgacattagattctcataaggagtgcgctacctagacatctcgcatgcatagttcactataggactgaagctcctatcagaatctaatgctgccactgatttctcacctgaggcacagctcaggcagtaatgttccctggcctgccgcggcccagttcctaacaggccactgtcattgtgaagagtttcaggatggtgatggcagaacaggccttctaagagtgcgactgtaccattgtacagcttgcatgtccatgaaactggctttgcctatagaaccttttgaacaagatgaccctgattttctaattcgctgagaaacacaccaaggccaattaatttgactggcctttc

SEQ ID NO: 731479 - DNA, 653 bp, Homo sapiens
atgcattacatggtgattacagtctgacagatgttttgaagttgtaatgtgttcatcagaaagcacgcagagcagggatgagcaccgcttgtttgaagatgttgaggtttattctggcaactggaaaaatgcaccaatgctgattgaagtttggggacccttatatttgagaaaggagacagaattggatttcagtctctggtagatcagcatttgtgggcattgaacatgagattgtatcatgttgctttatctctgccgtgacagtcactgtcaaaatattctctactggggtagaaaactctcacttgaatttaaggggggtmcacatttgcttttctatgttcataattttgactccaccttatacgtaatcgttggaatgaggttcaagtctacttgtctcccgaatcacacataggagttcctcttagaaaacctaatttgtgtttgtgcgtagtctactttggaaacttttcatttctctgtgtttctgaaagagcagtcattgtaggaaaataaatggaggttttaatttaaactcgatttttaccaactgggtgaacatagaaactcttgctgtctcacttgcctgaaaaagagaatatagactaattgtttgaaactaaaacaatttgcctttctcaagagat

SEQ ID NO: 731480 - DNA, 458 bp, Homo sapiens
aaataaaccaaatccagtcaaatctctagttttgactcctagcttaccggaaatacgtgatgggaaaaaaatgaaatgacaccactatgattcaatcagccaaatccagcatatgcaaatttctaccagataaatggtttagtttcttccccaaacaaatggcacaaggaaacggaggtaagaatgggatgctgttatagatttwaaaagatttaagaaagtataaactaaatacactatgtgcatcctctctgaacgtgcttcaaacatatcaaggggtcaatgagcagttttgaaacaataagggaatttgaacactgaatggttgtcagaagatagtaagagatcattattaattttactagacataatgatgttctgattttgttttttttttaaaaaaaaaacagtgttatttcctttatagatacatcatatagtattaactaatgaaatgc

SEQ ID NO: 731481 - DNA, 548 bp, Homo sapiens
acgtgatgggaaaaaaatgaaatgacaccactatgattcaatcagccaaatccagcatatgcaaatttctaccagataaatggtttagtttcttccccaaacaaatggcacaaggaaacggaggtaagaatgggatgctgttatagattttaaaagatttaagaaagtataaactaaatacactatgtgcatcctctctgaacgtgcttcaaacatatcaaggggtcaatgagcagttttgaaacaataagggaatttgaacactgaatggttgtcagaagatagtaagagatcattattaattttactagacataatgatgttctgattttgttttttttttwaaaaaaaaacagtgttatttcctttatagatacatcatatagtattaactaatgaaatgctttgatatctggaacgtttaaaaaatattcccgatggagtaagtgcaaagaaacaggtaagcaaaatgctgataattgctgaaacacaggatgtgtacctggggcttcatttactatctcttcattttctattttgatatttgt

SEQ ID NO: 731482 - DNA, 673 bp, Homo sapiens
agtaagagatcattattaattttactagacataatgatgttctgattttgttttttttttaaaaaaaaaacagtgttatttcctttatagatacatcatatagtattaactaatgaaatgctttgatatctggaacgtttaaaaaatattcccgatggagtaagtgcaaagaaacaggtaagcaaaatgctgataattgctgaaacacaggatgtgtacctggggcttcatttactatctcttcattttctattttgatatttgttggacattctcataaaaaggaaagttatgttttattttctcataagctagtaatgaaatagccctamgtaactgatattgtagagacaagaataggtgtaatagagcttaaggttttcatttaaaaaactatctgtagacttcaatggatcttaggtggcatccatgcaataacactcgtggaacatgcaggacaggtgtggagctccatcttcacacagtgacattttttatgcttctgttttccctaagagtggagtgagaggatgattattttatatcatggacttcttccctgctatactttttttaattattttactttcacttctgggatacatgtgctgagcatgcaggcttgtttacataggtatacatctgccatggtggtttgctgcacctatcaacc

SEQ ID NO: 731483 - DNA, 673 bp, Homo sapiens
agtaagagatcattattaattttactagacataatgatgttctgattttgttttttttttaaaaaaaaaacagtgttatttcctttatagatacatcatatagtattaactaatgaaatgctttgatatctggaacgtttaaaaaatattcccgatggagtaagtgcaaagaaacaggtaagcaaaatgctgataattgctgaaacacaggatgtgtacctggggcttcatttactatctcttcattttctattttgatatttgttggacattctcataaaaaggaaagttatgttttattttctcataagctagtaatgaaatagccctacgtaactgatattgtagagacaagaataggtgtaatagagcttaaggttttcatttaaaaaactatctgtagacttcaatggatcttaggtggcatccatgcaataacactcgtggaacatgcaggacaggtgtggagctccatcttcacacagtgacattttttatgcttctgttttccctaagagtggagtgagaggatgattattttatatcatggactycttccctgctatactttttttaattattttactttcacttctgggatacatgtgctgagcatgcaggcttgtttacataggtatacatctgccatggtggtttgctgcacctatcaacc

SEQ ID NO: 731484 - DNA, 567 bp, Homo sapiens
accccctgatagcccccagtgagtcatattcccctccctgtgtccatgtgttctcattgttcaactcccatttatgagtgagaatatgtggtgtttagttttctgttcctgtgttagtttgctgagaatgatgttttccagcttcatccatgtccctgaaaaggacatgagctcattcttttttatggctgcatagtattccacggtgttatatgtgccacattttcttaatccagtctgtcattgatggacatttgggttgtttccaagtctttgctattgtaaatagtgctgcaataaacataygtgtgcatgtgtctttgtagtagaatgatttataatcctttgggtatatgcccagtaatgggactgatgggtcaaatggtatttctggttctagatccttgaggaattgccacactgtcttccacaatggttgaactaatttatactcccaccaacagggtaaaagcattcctatttctccacatcctctccagcatctgttgtttccaaatgttttaatgattgccattccacctggcgtgagatggtatctcattgtgg

SEQ ID NO: 731485 - DNA, 578 bp, Homo sapiens
atgcatgaactcaagcattaaattagaattgattttttaaaaaactcacacaaacagatgtattatttaaaaatctttaaagcaggtttaaacagttttcaggattaaaagcagccactattagaaagaacaaaaatacatttgacataaatataaggagcctcaatagaacctcctgtacccagtcattgtcaatgccacatccattcattcaccagcccttatatcaatgcttgctgggctcacttaccacgatcagcacgtgcatgtccttayctgaaagcttgccactcaaatgtgctcagtcttacctgtgtggctgggagtgttggggatttaatgtcaagggaaagaatcttccatcaatgaatgatgaaagttagttttcacaacttccggtccccttggccctcatcaaagggctccaggtgaggtttgggctccttgctatcctccgagtttccacggtagttttaagcaccattgcccgtggtaatggctgacattgatactgcactttttttttatttaagatggagttcccctctgccacccagactggagtacagtggcgcgat

SEQ ID NO: 731486 - DNA, 570 bp, Homo sapiens
tagcttcagtcattattttttctaaaaccatcatgctgttctagtacaattttaaggttaaagtatgaatcaatatgatatataaagaacactctatctcattcaaaaatatattaaagtagggagctaagctatgaggatgcaaagacataagaatgatacagtggactttgggtacttaggggaaagggtgagagcagggtgagggataaaaaactacacattggatacagtgtacactgcttgggtgatgggtgcaccaacatctcagcaatcaccactaaagracttattcatgtaaccaaacaccacctgttatccaaaaccatatatatatatatatatatatacacatatatatatgctatagattttttaagcaagctgtgcatgttacactgtagcctgatttaactttaactatatgtaattgccatttctccatatcattatattttttcagcatttttaagtgtcttcattaaattcccatgtaaagctagactatatttaactatttaactattggatatttaagctgtttcatacatgtcactattactactacta

SEQ ID NO: 731487 - DNA, 507 bp, Homo sapiens
aatgataatgttattcacaacttttatcttcttcagcaagagtttcctagaatagtaaagctatgttgatgaaacctagaataacaaaggcctgtaaatatacacagtaagctatgtgggtgtatacagtttcggttctcactgacaaaacgaaatttgagctcattctcaaaggagtgagggaatgagtcatgccaacatttgaaagcagagttccaagccaggcccaagtccaacttttgcagggcctgtggcaaggttatagatgaatgcctactatatgcccaaatatttaagtgttggaaatcaagttagcaaacytttttttcttagagatggggtctcactatgttgaccaggctggtctcgaactcctggcctcaaagaatcctcccatctcagcctcacaaatgctgggattacaggcatgagccactgtgcctggcctagtaaactcttaaataaaatgttagccaggtggggtggcatgcgcctctagtgccccct

SEQ ID NO: 731488 - DNA, 675 bp, Homo sapiens
ttgcctaggcattggaaacagcagtaatcaagacagttcagttctttcccattttatctggggatgtaagcctagcctcagataaaaataggaaaataggaattgcgtatctttcaagtcttttccaatccttatgccctaaggtatggcttcagtagcaagcstctttggtactgaacaccaagaggcaaaaataaggaaacagttaagtggacaaattctgagatacagattcaaatattggttataccatctgctagctatgagactttttgaagtatataacttagtgcccagtttcctcatctgtaaaatggggaaaaatgataatacctgcattataggatttgtgaaggaattgaataataaaatctatacaattattaagcacaaagaaaatgcacaatcagtagtaattaaaataacaaaaagagcaagcacacattgctccagaacttggggcctcataccatcttttgcttgagcagacctcaaaagcaccactagcatcctccacccagacatgcttttcaaatcagattctcccaaccccttgaagccttgcactgtagagcactcaaactctctcatccaaattctagtcttcttatttgatttctcagggctggaatcatttgaaatgaatggaggctagaaaggatcctgtagtttggg

SEQ ID NO: 731489 - DNA, 625 bp, Homo sapiens
caagcggtcagtggatctacaattctgaggcctggaggatggtggccctcttctcacagctccactaggcagtgcccaagtagggactctgtctgggggctccaaccccacatttcctctttgcactgccccagtagaggttcttcttgagggctctgcccctactgtagacttctgcctgaacatctgggcatttccctgcatcctctgaaatctagacaaaggttcccaaacctcaactctttccttctgcatacctgcaggcccaacaccatgtggaagccaccaaggcttagggcttgcactctctgaagcaatggcccaaggtgtaccttggccccttttatccaakactggagctagagcacctgggacatatggcactatgtcctggggctgcatagggcagggggccctaaaccatttttccctcctacgcctccaggaggaggcctccctgtgatgggaggggctgccacaaaaatctccgaaatgccctggagacattttccccattggcttggctattaacattcagttccttgttacttgtgcaaatttctgcagcaggcttgaatttctccccagaaaaggcatttttcatttttaccacatggccaggcag

SEQ ID NO: 731490 - DNA, 596 bp, Homo sapiens
aatattgaaatcatataaaatacattctctgtccataatgaaattaagttagaaattgataacaaaatgaaaactccaaagtccctaattatttggaaattaataaatacatctctaaaaaactccatgagtcaatctgcaattgatattagaaaatattttaatgggattataagaaaatattacatatagaaatattatatacaaaaacccatggaatgaaagccatgctgaaaagaaaatttagagctttgtgtgtttattggaaaatttaaaagtctgggaaaaatcaataagttaaaacccatctaaaaatgttaggaaaaaacttaggtattaaaacccaaaagattttttaaaagaaaaaaaaaaggaagtacataaaaakaatagaaaacctgaaatgttacatgacaaaataggctcaaagttgaatgttggctttttaacaaaattaataaaattgacaagtttcttgtgagatcatgttttaaaattgcctaataaagggcagggctaaaggagatacatatcagtatacgtcctgcagatgttaaaaagataagttatattattatgaattattttttaatttt

SEQ ID NO: 731491 - DNA, 637 bp, Homo sapiens
gcacttgaaaagatgctcaacatcattagccatcagggaaatacgatttgaaaccataatattttcaaaaagttaggagatttttaatggtcgcaacacaaagaaaagatgaacgtttcaggtggtggacatactaattacctgatttgatcactacacattgtatacatttatcaaaatatcactctgtagtccctaaatatgtacaattattacatgtcaacgaaaaagaatgaaaacacaatgacacacacttcacacccactggaatggctagaatcagaaagacagataatgacaagtgttggcaaggagtgagaaatcaaaaccctaatacactactggtgcgaatgttaaaaagatgcacactgatgctttggaaaacagtctgaccatttcttaaaatgttaaacagagctaccatatgacccagccatttcactcctaggcacatacgcaagagaaatgaaaacatgatgtccacacaaaaacttgtargtgaatgttcacagcagcattacacataatggccaaaaggtggaaacaatccaaacgtccactaactaatggaaaataaatcgtggtaatacccataaaagattaaccagcaataaaaaaaagtactgacacatgctat

SEQ ID NO: 731492 - DNA, 547 bp, Homo sapiens
tcgtaggtctactctgacaccacccaagtgggtgacgggggcatgtggtggggttgatggttcaggctcactactgagcccctttgaatacaggcagggggaggggtggctaagtgcagcttcccgctagaacacgtgggtcccactgataccatkggagtgggggcagttgttcctcctgggtcagggtaaaagtctaagctcccaacatggcctccactgacactatgggggtgggcctcattaccatcctgcagggatagatgtcccaagctctctgctgggctagctctgacactgctccagcaggggatggggaggcctcattacaacaggcaaagaaggtctaggctccccacttggcttttgctgatgaggctgtgggattggggccatgggtttttccatggtgtttgcatagagtagggcagttacttcttagagttctccatctttctaagttgccctgtcctgatcctttggctagagacaccaggctttgcttagccgttggctcctattggtgtttctggggtactggtttctc

SEQ ID NO: 731493 - DNA, 601 bp, Homo sapiens
tttgtcccaaaaagatgtataagaatgtactaatagttttatttgattaggattgaacagttcagttgtatctatgccccacagtgaccagtaaagtccaattaaaatatggaaatgtaaaagtgtatgccgaataccttaaagtaactaattatccttacacacaaaaggctcagtgcattaaatatttgcctatcacctgtgtgctgtgtaccgtggccatgcctcgctctgcactatgaacaactcagacctgtcccttcacggtctgattagggtgtcrcacaaagctctctccctaacatggtttctcaactgtcaaaatcatgaaaatgacagcacctaaccactattttaaagtatgtacagtaaatacccaaatgtgtgtaaatgtcatagacatatacaaagtcagtaatctcacccagtcctgctgtgtgaacctgtcaaagcacctgggagtgccctttacaccattaggtgaaattcatcaggcacttcagacaaccaggttgcactgttttctcactaaattggctttatttatacagtttcctggaacctagcattcctaaacaagctccaaaatgcagaagaagaa

SEQ ID NO: 731494 - DNA, 575 bp, Homo sapiens
aggtctcgcttatctatttttgttttgttgcaattgctttggaaaactgtcaagaaatctttgccaaggcctatgtccagaatgttggacctatgacaaaacctacgacataactgtcctaggtattcttctaaagtttttatagttttagattttacatttaagtctttaatccatcttaatttttgtatatgatgaaaggcaggggtccagtttcattgctctgtatatggcgagccagttattccagcactatctattgaataggggactcttttccccattgcttactgttgtcaacgttgttgaagatcagatgattgtaggtatgcagctttatttccaggctctctattctgttccattggtctatgtgtctgtctttctacyggtactatgctgttttggttactgtagccttgtagcatagtttgaagtcggataatatgatgcctccaactttgttctttctgcttaggattgctttagccatttttgggttcaatcttggggggttgtatgtttccagaaatttatccatttattctaggttttctagtttctctacatagggg

SEQ ID NO: 731495 - DNA, 622 bp, Homo sapiens
tttctaacaagtacccaggtaatgctgatgctgctagtcaagggaccgcactttaggaaccactcatctaagagagagatgttgagaaccagagccagactggtgaaagacgaactagagaggagagaaagtatatgaaagatatttggaaggaaggaaccacaggactcggggattggacatgggggcaagggagccagacaaataaaagatgacttcagagtatcaaacctaggtgccttggaggatatgagaatcacagaggcaaaatccsaaacatttggaagtggaatgaagtcacttgacaggtactgggaaaatatatgaggccttattccataagcatctgcaccatggcactcaagtttaaaggcctcctgtgttgtcttcagagagaggctaatgagaagtagaaagaccaagtctgtattttgtctctccttttctagaatataacctttgagtagaggaggaaacagaagatagaaagcagggtatacgaaagttagaaggggcttaaatagtctggaaacaaagaacacatcattgggttgctaagtacattcagtgagtactgaatgtatatgggcaaacactaataaggaaaaggtaaatcagtaaa

SEQ ID NO: 731496 - DNA, 622 bp, Homo sapiens
tttctaacaagtacccaggtaatgctgatgctgctagtcaagggaccgcactttaggaaccactcatctaagagagagatgttgagaaccagagccagactggtgaaagacgaactagagaggagagaaagtatatgaaagatatttggaaggaaggaaccacaggactcggggattggacatgggggcaagggagccagacaaataaaagatgacttcagagtatcaaacctaggtgccttggaggatatgagaatcacagaggcaaaatcccaaacatttggaagtggaatgaagtcacttgacaggtactgggaaaatatatgaggccttattccataagcatctgcaccatggcactcaagtttaaaggcctcctgtgttgtcttcagagagaggctaatgagaagtagaaagaccaagtctgtattttgtctctccttttctagaatataacstttgagtagaggaggaaacagaagatagaaagcagggtatacgaaagttagaaggggcttaaatagtctggaaacaaagaacacatcattgggttgctaagtacattcagtgagtactgaatgtatatgggcaaacactaataaggaaaaggtaaatcagtaaa

SEQ ID NO: 731497 - DNA, 570 bp, Homo sapiens
aactttcccttttttccttgcttccatacccaaacaaagccaccaaaatatgcatcaagcattcattatgcaacaggccccatgcatgacactatttgtctttcttgccccacccaattaacatgtgctgctaacaactctcttcctcccactcccatccacgtctatacctgggatgtacacatagaagaataaattttagatcaatcatctgcagcaaccacctgtggcttatcaacagacattttctaactgtgggtttaacagattgttggggagtgtcactgaaacaraggcactagtatgcccaagatagtggggaaaaatcaccctgcttcctaaagatttcaagccaaatgtacttcctcaatccctcactgggctctgagcaccatggacaacgtgctgttactgaaagacaaggagtagacgcagccttctcggtatgcagtgttcattctcactcccttgctgactgcagtttggggctgatggaggatccttagggagccattcactggagctttctgctgaatttttagcaggctgtaatgtattctacattactgc

SEQ ID NO: 731498 - DNA, 578 bp, Homo sapiens
ttgataaatttcaaaataagtatggtgagtgaatgaagcaagagaaaaagagtatacacattattattccatttatacaatattcttgaaaattaaaatgaatctatagtgagaaaaagatcaatggttgcctgtggatgatggggatgcagaggcattacaaaagggacaggaggaaacttttgagtgtgatagatatgttcatttgtggtgatttcaggagtttaatgggatatatgtcaaaacccaccaaattttacactttatgtgcagtttcttatatgttctataccttattaaaattgtaaattgcacaaaaattgaggaaatattcttttagtatttgaattcagattaatcaatgaattcattcatgtcattgatggatgaataaaatttcaacatacatcattgttttttcattttagtttcactcattawcttaaataaaaatatcaaccaatgttcatatcaaaacttgactccttcatcaattacaaacatagcccagctaaggatacaagcttcagcaaaagtcattgaaagcattttgtgagattcaataggctatatggaat

SEQ ID NO: 731499 - DNA, 622 bp, Homo sapiens
ctaagctctggagttccagaccagcctgggcaacatggtgaaaccccatctctactaaaatacaaaaaaatcagccggcacggtggtaggcacctgtaatcccagctactcaggaggctgaggcatgagaatagcttgaacctgggaggtggaggttgcagtgagccaagatcatgccactgcactccatcccgggcaacaaagcgaaactctgtttaaaaaaamaaaaaacaaaaaaaaggtgtcattaacaaaatctgttgttgaacgcgtgtaaatacacatacctctgtattatgacagattctggaaatactggtcattctagtaaccttattcttacttaaacttgggggaacacgcctttcttgaaactataacttcgaagtttttaatgtaggcaaacccccaacttccagctttggaaatcagctctgttgcagcacattttatgaagaaaaaaaatgttctgtgtgaaatacagcttttaatctcaagttttaaaaagacatgttgtctatttgaaacttaagatgtgaattggcttatctttgggtccttatcccaggtgccagagttcttgatgcttctcccccacaaacctcgactcatcgagaaaaat

SEQ ID NO: 731500 - DNA, 608 bp, Homo sapiens
ctggcactagtggcctatgctgcaaggttcttatggcaatgcccgaagtacaaggataccagtagaaatgtgacagatctcatagaagctaggcttggaagtggcgctttcacttctgccccattctgttggccaaataagtcaatgaytgaccccagtgcactctgccccttgatagagctgcagttatatggcacatggcatcgatatggactgaagggatgagtggtgggtggtaagaagaatcaaagccagtgatatagtctgttatgcacgtgaacttgggtttacctgtgggtggccatattcctccatgtagaccacaaaatagggagagtgcatctgtcttgaaaaagactgacacagatacttaaaaacagaaaggaaggatatctctatcctgatgactttcctatttctggttctaggtctttcctgagtcttggctacatctccattcttggtttctgtgcaagatctctgagtccttttaataaatccactctgtgtgaatactaaaaggaaaatggaaaggagggcaaatagaattagctgattttctcatgaggaatcacagtaccaacaagagctcagattaaccatagctg

SEQ ID NO: 731501 - DNA, 609 bp, Homo sapiens
tggcattcattcatttatgagggcagagcactcatgacccaatcacttcccaaagggtcccatctcccaacactgttgcactggggattgagtttctaacacaagaatttctggaagggacaagaacattcaaaccatagcaaggtgcttatcagtcatttgtaattttttttgtatgaaatatctgttcaagtcctttgtcagtttctttttgttgttcatttttttgtttgtttgtttaagatggggtatcactgtgttktccaggctgatcttgaactcctgggctcaagtgaccctcccacctggtctcccaaaagtactctgtcaactccttaactaggttgtttgcctccttattcagttgtaagagttccttatatcttctggatccaagtcctttgcccaatgtatcttgtcaatatttttcccagcatgtggcttgctttttatttacttgatggaacaatttgaagagcagaaagaatctcaatggatacaattgataaatatttcttttatggttaatgctttttgtgctaccacaacagcatgaagattttctccttttctataaattttacacttaggtctacgatccacttaaaa

SEQ ID NO: 731502 - DNA, 506 bp, Homo sapiens
acattcacactgttgtacatccattaccaccatgcagccctagaactcttttcatcttataaactgaaactctgaacccattgaactctccgctcccctctgttccagtctccggcagccatgttttactttctgtctctatgaattgactactctaggaacctcgtataagaggaatcttacagtatttgtccttttgttactggcttacgcatttaacatgatgccttcaaggtccacccatgytgcagcatgtgtcaaaatttccttccttctttgggactgactaaatattttttagtattccattttatttcttctgatagcttctcagatatagtcatgcatcacttaacgacagggatatattctaagaactgcgctgttaggcaatttcgtcattgtgcaaatatcatagagtgtatttagaaatgtgattgtactgaaatactgtaggcaattgtaacacaatggtatttgcgtatcaaaacatatctaggtcaggc

SEQ ID NO: 731503 - DNA, 603 bp, Homo sapiens
atttgctcataaaatgcatgaactgattgccatagtggtggcaaaaagactatttctgggggtctttaggagaaaatgagcagcattaaatcctctgctttactgtaaacataattttctatagaatagggaatgcctttaacttaaaaaaaaaaatttaaacagcctaggaggctgaatacaaatgtagtggatatagtctatctctttcctacaggtgacagctgagggcatgattagcttctggaatgctatctacacacaagaaatgagtagattaactatctccactgctcattcctagggcacagacctgctctgagataaccataactctaaaatgcccaataatttatcccagctatattagaaacttctttggtaattttctcagtctggtaggaaagttagtgaaaaagggtacctctgtcccacaagaagacawttttttttatttttaaaaattctagcgccttcattttttcaggtacctttcttttgttgcatgtacaaaattctgaagaaagggcgaactgtttgttttctctgttgaaaccgaccttgccctttcagaaaattactaccaccagtaaattcacagta

SEQ ID NO: 731504 - DNA, 586 bp, Homo sapiens
ttcatgtttaaattatttattacaccctccaggaaccatccaataaatgatacaacttaacatccacctgtttaacatgatattccaatctgctacttttctttctgccaactgcaagcccaagatgaggtttagaataacctgtgcctagaaaattaaaagacaaaaaaggaagaaagtgtgccctccagtacagtcctcatgtctgagtctatttttcattctttgttttgcacagaattagggagtcacagatacagacggtctgacataaagatgcaaaatgtgccagagtcatggtggggccagcggtgattgatcaggctggagcctctgagaaggtgagcaagctgggaaagggccggctgggggcagkactgggtgcaagtggcgtctgattgggataagctgaaaacacccaaagtggccagtgcttaaggtcaggcacaccctcttctccaaagggacacttgaagatcccttaatccaagacttccaaccagaaactgtcatctgacacagcaataggtcccctccccttggatcttcctgctagctagtgttccctctgtcctcctgagcatct

SEQ ID NO: 731505 - DNA, 656 bp, Homo sapiens
ggcatttaaggagataatcatatgatttttctccttagttctattaataggatgacttacatagtagatctcataatattccactacccctgtatttctaaaacaagcttttcttagtcataatatacttttaaaaatatgctgctggattctgtttattattttaaatatgttttacatttattggtctataattttttgtactgatattcataaatgagattggtctaccaatctcatatttttcttatcagatttagaaattgcccgggcgcggtggctctcacctgtaatcccagcactttgggaggctgaggcgggcggatcatgaggtcaggagattgagaccatcctggctaacacggtgaaaccccatctctactaaaaatacaaaaawttagccgggcgtggtggtgggcgcctgtagtcccagctactcgggagtctgaggctggagaatggactgaacccgggaggtggagcttgcagtgagccgagatcgcgccactgcactccagcctgggagacagcgagactccgtctcaaaaaaaaaacaaaaaacaagaaattaaaatgaaaccaactttatgtaatgaatttggaagttttccttttattatactctgaaataatttaaataaaaataggattatctt

SEQ ID NO: 731506 - DNA, 500 bp, Homo sapiens
cagaggctttagaagtaaattgtttacattgattcacaatcccataagcctttatagtaaactatcctctttgaatttactaccttggttaattcagcagaaaattgctttctatttctgagacccgcttagaaggcttgagcagatttttttttaaaaaaattgttctgcgatgatgatgaagggagacttgagaatccctttgaaaaayagaattgactacagaccgaacagcctgtgtttatggataactgagcttcacacctctcactgaaggtgagaaagtcctattgaagatgacaaagcccttatcacagtgcctggtacaaggtgggtacccaaatgtgtgtccctataagacagcagcaaagaaactgttactcctcaaaaactctcatctccactgaatgggtataggacatagaatcttcctgtacttaagcaacttttaaatagcactttatacactctcaaaagatcaattacatcagagtagctat

SEQ ID NO: 731507 - DNA, 500 bp, Homo sapiens
cagaggctttagaagtaaattgtttacattgattcacaatcccataagcctttatagtaaactatcctctttgaatttactaccttggttaattcagcagaaaattgctttctatttctgagacccgcttagaaggcttgagcagatttttttttaaaaaaattgttctgcgatgatgatgaagggagacttgagaatccctttgaaaaatagaattgactacagaccgaacagcctgtgtttatggataactgagcttcacacctctcactgaaggtgagaaagtcctattgaagatgacaaagyccttatcacagtgcctggtacaaggtgggtacccaaatgtgtgtccctataagacagcagcaaagaaactgttactcctcaaaaactctcatctccactgaatgggtataggacatagaatcttcctgtacttaagcaacttttaaatagcactttatacactctcaaaagatcaattacatcagagtagctat

SEQ ID NO: 731508 - DNA, 539 bp, Homo sapiens
tttctttttatttttctttccatgatgagcatttactctttcaacagccaaagatcatttccacgttcttctggtaatgaaactgagcaggtgtcccacagagctgatgttcgtggtttctttgaataaacatagaagttggccctccyagttttaaaacctgagaaagttgcatttgtcttatctgagttcctttccaaggaaaccagccatcaggcctcccaaatagtagcaaggagctgaaagtcaccagatcactgcatttggacaatcagatgcccgacactttatctgttaagtttgcctaactgaccacttgcttcccattgaccagctgctcttctttacccctccctaattcctgttttcccacacatggttacatttcttccctgctatatcagctcctaattttagtcagtcagggagatggatttgagacctcctggcctcttggctgcagcactctattaaaggcttcatctttggcaatacttgtttcagtgataggctttctgtgaagcaagaaacaggatcta

SEQ ID NO: 731509 - DNA, 617 bp, Homo sapiens
gtgcagatgtcctaatggaagaacaagtctaatgtctttaaggaaaaaaataaggctactttgtttggaaaggaatgaggagggatgccatggaaagaatgacggttggagaggcagggctagatcatgtagggcctggtagatcatgataaacagtttcaacttcatgcaatgcctatgtaaaagtataaaggcttttttttggttgkttgtttgttttaataggaaggtcatcaagatcctattgcagcaattcagaagggaagcaatgatagtgatttggactagtgaaccattagtggaaaatggagaaaatgaatacaattgggattattttgagggtaaaaaaggaagaatttgttgttggattagatgtgggggttcaagaaggacagccctctttctcagtttttagttgaacaactgagaggatagtatcatatccttagaggaggaagacttaggagaaaaatgtttttcagacagggaaggaagaataaataatttcagatcatccatgttgtttaagatgtctattatacacccaagtgtacataaaactttgatcaagactagagatattatctagtttgcatatctagatagatggtgctgcc

SEQ ID NO: 731510 - DNA, 578 bp, Homo sapiens
tagtgtttctcattcttgctattgttagattttgccttttctttttttttctgattagcccaggtatatatttcttcaaagaaaaacttttgtctttattttctttgttagttctctgttttccattttattgatttctggactgatctttattatttcattgttaatgcatattttaggtttcatttatccttcttttttttgttaataaaggtagaaactgaagttacagttttcatctcttttcatatatgtattagtgtttagttgtataaatttcactttaagtgctgttttaggtgcataccacaaatgttgatgtgctctatttgtattttaaaaatataaatagctgaaaatgtttcccattctacttttgatatcttatttgaccttgggttattgaaaagtaaggcktttttttagtttctgaatatttggagatatctttttgttactggcatcttaattctattgtggtcagtgaacatactttgcatgatttgaattcttcaaagtttatggagacttgtattgaccctggatgtgaattattagtaaacgtttcatgtgttgtt

SEQ ID NO: 731511 - DNA, 627 bp, Homo sapiens
tgggattatttgagtttttagatctctggggtttgtagttttcattacatttgacattcttcagccattatttcttcatctatatgttttttctcctatttctctattctcgtttctttacataccccaggcatatgtatattagatcacatgaagctgtccaacacctcactcacacaccgttcattttattttcagttatttttcccctatgtttcattttgtagtttttacattggttttccagttcactgatcttttttcttttcttttttttttttttttttgagatggagtttcactctgttgcctaggctggagggcagtgcagtggtgagagctcactgcaacctccgcctcccaggytcaagcaattctcctgcctcagtctcccaggtagctgggactacaggcgtgtgccatcatgcccagctaatttttttatttttagtagagactgggtttcaccatattgaccaggctggtctggaactcttgacctcgtgatccgcctgcttcggcctcccaaagtgctgggactacagatgtgagccaccgtgcccagcctccagttccctaatcttttgggaatcaatgtccaatctgccattaatcatatctaatgca

SEQ ID NO: 731512 - DNA, 608 bp, Homo sapiens
gagaccctgtctcaaaaaaaaaaagaaaaaaaaaaaaacctggctaattcctcccaaccacttctctcatcaagagatagaaacttaaaaaaaaaaaaagagtaaataaataaaatgactgcagcaaaataaaaattttttaagagctggagtctactcacctcacatttcactgggcagctgtgctgccctcagagcttgctctaaccagtggaatgtggttgcaggaacactgtgccagtgctaggcctggaccttagaagccaggtagattctgttctctgctcttatagcccagacccacactggtagtaagaagtccaattattctgctggagagagaggctcagctgcctctgcacccactcccctaccccctagccagctgarctaccatacacgtgagtgaagccatctagaagattccagccctggccaagctcccagctgaaggcagccacatgcatggccccagccaacaccacatggagcagcatggtgaagccaagccactgccctgtcccaggcgtgggatgagggaggctgtgttagtccattttggtgttgccataaagaaatacctgagggtgggcaatttataaagaaaa

SEQ ID NO: 731513 - DNA, 564 bp, Homo sapiens
tctcagttctctaatgagtttaggaaaagttatgattttgtagtttatctggctattgttgctgttaggatgtaatactcatcccagctttccacatcctgcaatttctttgtgttttaagaattttttttaatttatactttaagttctggggtatctgtgcagaatgtgcagttttgttacataggtatacacgtgccatggtggtttactgcacccatgaacctgtcatctacattagttatttcccctaatactatccctcccctagcccccaacttcccgacaggccctgaggtgtgatattcccctccctgtgtccatgtgttctcattgttcaactcccacttatgagtgagaacatgcagtgtttggttttcwgttcctgtgttaattttgctgagaatgatggtttccagcttcatccatgtccttgcaaaggactcatcgttttttatggctgcatagtattccatggtgtatatgtgccacattttctttatccagtatatcactgatgggcatttgggttggttccaagtctttgctgttgtgtacagtgcc

SEQ ID NO: 731514 - DNA, 488 bp, Homo sapiens
gcaagagcacataggtgaagaggaagcggtggctgatctgggcggaagctggaggtcactgggagtcaggaatgcagcactcatcagtacgaaacccggaaacagctcctagaaggccctctgagctttgaaatctgctgctttacaaactttcttcaggaytctcctttgccttccagcaataatcagcatgtcaacgatggtggccttcatctttctttttccttgtcctgtcaccccaaatgagttttgcggggttttttttaatagagatggggtctcttcacgttgcctaggctggtctcagactcctggactcacacaatcctcctaccttggcctcctaaagtgccgggattacaggtgtgggtcaccgcacctggccccaaatgcgttttaatttcctcagtaactcctccctgctccatacacacaggactggggaaccttcttcctccggcagccaaagccgccaagacctgcaggta

SEQ ID NO: 731515 - DNA, 471 bp, Homo sapiens
gtggttttcgtctttggttctgtttatacgctggattacgtttattgatttgcgtacgttgaaccagccttgcatcccagggatgaagcccacttgatcttggtgaataagcttcttgatgtgctgctggattcagtttgccagtattttattgaggatttttgcatsgatgttcatcagggatatttgtcttaaattctcttttttggttgtgtctctgccaggctttggtatcaggatgatgctggcctcataaaatgagttagggaggattccctctttttctattgattggaatagtttcagaaggaatggtactagctcctccttgtacctctggtagaatttggctgtgaatccctgtggtcctggacttttttggttggtaggctattaattattgcctcaatttcagagcctgttattggtctatacagagattcaacttcttcctggtttagtcttgggagg

SEQ ID NO: 731516 - DNA, 464 bp, Homo sapiens
tgttggaacccctctctcctggcagcttcaagttttccacgacggctgcagcagatctaagacataccatttaccaggctgacaagagtccaagttccagcaatccctggaggtccatcctgagaaggccatctcaggttatagaccagcataaatcgggagctcacaggacagaagacactgattggctcacgcccagtggggcccaccccctgatatgggaaagttgggccctttccacttccagaaatttgggcacctatttggaagggagaaagggccacaactaataactgtttatkatagaaggaaaaacaataaatatgcttatacttctgctctgagggaatcattcagcctgcagaaaatggagacatctcattactacctggcgagtcaaacacaggcctggggatccagagatgtatttggattccaaattctgtgtgggcccctatacacag

SEQ ID NO: 731517 - DNA, 565 bp, Homo sapiens
taggctatgatgggcgtgtggattcattcactgatagaactagcctgagcccagggtcccaaatcaacgtgctggaagacccaggctacctagatctcacacaaatagaagcaagcaaacctcacagtgcccagtttttgctaccagttgagatgtttggtcctggtgcaccaaagaaagcaaatyttattaatgagttaatgatggagaaaaaatcagttcagtcatcattgcctgaatggagtggtgctggagagtttcccactgctttcaatttgggttcaacaggggagcagatatacagaatgcagagcttgtctcctgtctgttcagggttggaaaatgaacagttcaaatccccgggaaacagagtttctagattgtctcatttacgccaccactactcaaagaagtggcacagattcaggtttaatccaaagttttattcatttctctctgctcaagagccttcccacaaaataggcactagcctgtcctcacttactggaagtgggaagagaaataggataagaagttctctgccatggaggcaaaatagttggaa

SEQ ID NO: 731518 - DNA, 690 bp, Homo sapiens
ttaacagtctgggtgcggtggctcatgccagtaatcccagcacttcaggaggccaaagtgggtggattacctgaggtcaggagttcgagaccagcctggccagcatggtgaaaccccatctctactaaaaatacaaaaattagcccggtgtggtggcacacacctgtaatcccagctactcaggaggctgaggtaggagaagtgcttgagcccaagagacggaggttgcagtgagccaagatcacgccactgcactccagcctggtggacagagcgagactctgtctcaaaaaaaaaaaaaaaaaaaaaaaaaaaaaagcattaacaaagacaaaagcagaaatataatgaaatggtaaaagacaatggatgaaataaatctaaraacttggtctttgaggagatgaacaaaattagcaaatcccttgagcaggtcaaatcaaaggagaaaaaaaaacagaagtaagcaataaaataagtgaaaaagaagttaacaacccatatgcacaagaagttttaaaaatttaagaaaatagaataaatgactgtatatcaataaatttaaagacccaaatataattagtttttcttggaaaactatagtaactgacttaagtagcagcagaagtatgagaaaactacatctgacaagagattaatgaccaggatctcaaacaactctataggaaa

SEQ ID NO: 731519 - DNA, 590 bp, Homo sapiens
cacaacagctacctaagatataatacattgagaaatgaatttaacaagacatatatagaacttatatggaaaaaactgagagttctaaaaaaggatatgaatataacagatgacctgaataaatggagagaagtaccacattcctagacatgaatgtttgatgctgaaaagatctcaattgcccaaattagtctctctttttttaagagagagagagagactgttgcccagattggagtgcagtggcacgatcacggctcactgcacctcaaattcctgacctcaagtaatcctcccacctcagcctcccaagtagctggggttacaggtacataccaccatgactggcttatcaaaaaaatttatttttgtagagattaaggtcttgccatatgatgttgaactcctgggctcaagaagccatcctcccycatcagcatcccaaaatgctgggattaacaggcaggagccatggtgcccagcacccctaaactagtctttaaatgtaaagcaattccagtcaaaatactttggaggaggattaaaagtgcaagaaccaccaataacattttgaaaaccaagaacagaat

SEQ ID NO: 731520 - DNA, 560 bp, Homo sapiens
gcattatgctaagtgaaataagccaggtacaaaatatcatgtaatagtatgattccacttgtgtgcaaagtcctgagaatacaaatctatagagacagaaaatagattagtggttacctggaattgaggtggaaacaggcattaactatgaaggggcctgagggatcttattgtgatgattgaaacattataaatctggattatagtgagacagatgtaccaccactaggtactttactaaaagccattgaattgcatgcttaaaatgggcttgagtactgcagtrggttttctgtgcaggtgtcttaataaggttttgtatggagggagaggctagccctcatctgggaaagagacttgctaggatttagtcgattttgtctctgtttgtgccacctgccccactatgaaagctttatgaccaataaaaacaggaaatatgcaattcctggagctcaggttttatattttcctgccccagaggacaacataaaatccatgttaaccctagattttatgcatttcaggtgttcaaaacaaggtacagtgtaatgcaggga

SEQ ID NO: 731521 - DNA, 608 bp, Homo sapiens
tttagataccttctaaaacacagaagtgtcaactggttgatgagatttaataatattatccagattaccttttgtttcataaaagatccccacaagagttatatgttcatattttacaaaacaaattgtataccattattttcatattttaatttcatcctagtacaactgactggatgatgggaaggttcagtccatgtatcaggtagaacgaatcatcatcacatataattatgtgccccagaggcaaaatgcctggttccctctacacattgtcttctccacagagacaggcaaggaaaatggttatcagtgaagctgttttgtcaatttctgattaatttgggggaaatggtarcagtttgtttcctgttatgtcatgatgcatggatttggtgctttcataaacacaagcatgttcagatgattcaacagtttggttttgacaaattcattaatacattgattttcatatcaaagaaaatattgatctatttaaaggactggctatgtatcgggcactcaatctgtgttccccaaccacgctgaaattttgttttcccccaacaggcccacatgaaagtacagaaagccaatgataggctggc

SEQ ID NO: 731522 - DNA, 665 bp, Homo sapiens
gcagctgggaccacaggcaccaccatgcccagctaaattttttatgttttgtagagatggggactcactatgttgcccaggctggtctcaaactcctggcctcaagtgatcctcccacctcagcctctcaaagtgctgggattacaggcgtgagccaccatgcttagccaaggtccttatctttttaaaaaatgcacttccggtaacatttttgagtggtatgctcctatgctcccaattctattttgttgaaagtcctgtgactttttttttttttttttttttgagacagagtctctctgtcgcccaggctggagtgcagtggcactatctcggctcactgcaggctccgcccccgggattcacaccattatcctgcctcagcctcccaagtagctgggactacaggcgcccgccacctcgcccagctgattttttgtatttttagtagagacggggtttcaccgtgttagccaggatggtctcgatctcctgacctcgtgatccgcccgcctcagcctctcaaagtgctggrattacaggcgtgagccaccatgcttagccaaggtccttatctgtttaaaaaatgtacttctggtgacatttttgagtgttatgctcccaattctgtttggttgaaagtcctgtgatttttgttgtagatc

SEQ ID NO: 731523 - DNA, 581 bp, Homo sapiens
cttggaagggagtgaggcaataaggacattcatttttgcaattcattcctgaggtttgaaagagcacaagttgggaagaaaaggattatgtttcctatgaaaagtgaagaactgaggacatgataaaggcagattaatctccttcaaatatctcccaataacataatcaatgtggtaatgaagccagttaggagtttggggcttgaagtatccaagtaattatttgaaatctctccttggatagaaaaagaattaataagagcaaactagtctttaaaatgagggcatgttttgaaatgaaatcaattatctttgatgcaaytactcttcccctggaaagcatttttttttttgagaaggataacttttcaatttacaagcacttcttgcagaagaatagaatttacctaatgcttgaggatgcccttcaaatgttgggtcacatctggtggatacatgatagtttataaagctctctcaaggtatggtttcaagtaatccccataacatagcgtagatcatatcagtcaacgcggctgtgattggagtactaaaaagccagtacacatgctctaaaagat

SEQ ID NO: 731524 - DNA, 619 bp, Homo sapiens
atcttaagaaaattgctccttgaggaagaaaattcaagttggctcttttccccccttttccttctgcctctgattccatatagtctggagggtttcaaacacaataaaacacactgagctcttcaagtgattgagacacttcagaggaacattttgagaactgggattatgaagcgagaggacaactcaggcacaacctagtaatgctgcagtatctgggcagcaagagggtcttgcgactcaggagagatggacgatggacagtgatagggaagctcattaagaaagtaaactgaagaaaaaggtaaagaaacctttaaaagacaaacagttttattttcctaatatgcttgtttgcttaattcagaaaagcattcatccctcagtattagtaytagtatcagtactgaattctagctttctgttagtcacttggttggactcaaagatgaatgagggagtcaagcacaatgacacatgcctatagtcccagctacttcggaggctgaggcgggaggattgcctgagtccaggagtttgagaccagcctggacaacataggaaaaccccatctgaaaacacacaaaaattaaaaattaaaaaaaaaaagatgagtaag

SEQ ID NO: 731525 - DNA, 603 bp, Homo sapiens
tcatttcctcatgactaaaattttatttaactgtattagataacagtattgagctgaagataagattaggccatttgcacttagaagttaaaagctaaagaaacattcagagagaaaaaactgaacaaagcaaatcacagacagacccaaacaaaaccaaacagaagcaaaatgcactttccacatgcaggaatcaagtacaatagaaatcagggcaaagtttttatgcattatatttctataggcagaatattgttcgtgtgtstctgcactattgtgtcagctcatccctgtttttgctgttgcaaacagtgggcactgtttctcgagttgtgtatggaatttggttgtgctctgttagggcagcttgtgcaacagaagcacaggggtatagagcgagcagagttaagaggtgagaaggagaagtccaaaattgtgtccttgagatgttacttgttaagagtcaccatgctctgtgtgtgtgtgtgtgtgtgtgtgtgtgtaaataagtgtctgtattaattattcacaaagtaataccatgataattgctatgccattaatacaacattgtggacctggttattttagacatgaaaataa

SEQ ID NO: 731526 - DNA, 603 bp, Homo sapiens
tcatttcctcatgactaaaattttatttaactgtattagataacagtattgagctgaagataagattaggccatttgcacttagaagttaaaagctaaagaaacattcagagagaaaaaactgaacaaagcaaatcacagacagacccaaacaaaaccaaacagaagcaaaatgcactttccacatgcaggaatcaagtacaatagaaatcagggcaaagtttttatgcattatatttctataggcagaatattgttcgtgtgtctctgcactattgtgtcagctcatccctgtttttgctgttgcaaacagtgggcactgtttctcgagttgtgtatggaatttggttgtgctctgttagggcagcttgtgcaacagaagcacaggggtatagagcgagcagagttaagaggtgagaaggagaagtccaaaattgtgtccttgagatgttasttgttaagagtcaccatgctctgtgtgtgtgtgtgtgtgtgtgtgtgtgtaaataagtgtctgtattaattattcacaaagtaataccatgataattgctatgccattaatacaacattgtggacctggttattttagacatgaaaataa

SEQ ID NO: 731527 - DNA, 646 bp, Homo sapiens
aattcactgactcgtaaaccaaactgatagaagttctgactcttactagtccaattgaggtcctctggtaattgtcttctggtagaaagttgtggattttgcattattattgtgagacctccaattcatagacaaggaccacatgctctccttycatattctcctaaattagaaaacttcaatgagtgtgttatatatctccatcccaacaaatatttatcttccttggctttctagcatcctttacatttctccgtttccctaggcccctagcaattatgaaatccattaactataattataaagctccattaaaaatttgatatacacagcagttaatattcaccatctgtaatcttccaaatgaatatttgtttatttcagtacttcagctgctacatctaaaaatgaaggtaaataatttgacaagggcctcaaaagccctgaatattttatttcaactgagcagtatgtgacttcttaaaatatctcaggctctttctttcataatgcccctattgatttctttttttagaagactagaaagggaaaggatttaggttacaaaattcatacttatttttagtaaagtatttaaaaaccaaaaggtatcattagagaaatgctattatattgtcagtgcaat

SEQ ID NO: 731528 - DNA, 611 bp, Homo sapiens
gttgctgcctctaccaaccaataaagcagaaggattccccttcttagatcagaaaaaggataccaggcagtaaagggagaaacacagataacctaagagtgtgggaagactctatggcctcacatcgctacacacacagcactccagaaaggtaccaccttctgagacgcaaagtgggagtagggtgggcayggtggctcacacctgtaatcccagcactttgggagaccaaggcgggatggatcacctgagttcaggagttcgagactagcctggccaacacggtgaaaccccatctctactaaaaataccaaaaaacttagccaggcatggtggcagacacctgtaatcccagctactcaggaggctgaagcaggagaatcacttgaacccaggaggtggaagttgcagggagccaagatcgtgccgctgcattccagcctgagcaacaagagtgaaactccatctcaagaaaacacacagacaaaaaaaaaaaaaaagtgggagtaggacagagcagacgaggaaggagactgtgtgtgtgccctcccaggaactcacaggtccagggatccaaggcgagaacctatttttataataactccatccag

SEQ ID NO: 731529 - DNA, 611 bp, Homo sapiens
gttgctgcctctaccaaccaataaagcagaaggattccccttcttagatcagaaaaaggataccaggcagtaaagggagaaacacagataacctaagagtgtgggaagactctatggcctcacatcgctacacacacagcactccagaaaggtaccaccttctgagacgcaaagtgggagtagggtgggcatggtggctcacacctgtaatcccagcactttgggagaccaaggcgggatggatcacctgagttcaggagttcgagactagcctggccaacacggtgaaaccccatctctactaaaaataccaaaaaacttagccaggcatggtggcrgacacctgtaatcccagctactcaggaggctgaagcaggagaatcacttgaacccaggaggtggaagttgcagggagccaagatcgtgccgctgcattccagcctgagcaacaagagtgaaactccatctcaagaaaacacacagacaaaaaaaaaaaaaaagtgggagtaggacagagcagacgaggaaggagactgtgtgtgtgccctcccaggaactcacaggtccagggatccaaggcgagaacctatttttataataactccatccag

SEQ ID NO: 731530 - DNA, 639 bp, Homo sapiens
aggattttaggataattccaagtaaataatcttatattcagaatacagaaagtgggtggaaagcatatttcaagacagatttcagtttgattactgtatgcaggacattatatagtttggatatttgttcctgcccaaatcgcatgttgaattgtaatccccagtgcctgagatgaggcctggtgagaggcatttgtgttgtcaggagaatcctttatagtttggtgctgtctttatgacagtgagtgagttcttgtgatatctggtcatttaaaagtatgtggcacctgccycccgcaactccctcttgctcctgctctggccatatgatgtgctcctgctttgccttccaccatgagtagaagctccctgaggcctccccagagaaagatgccagcagtatgcttcctatacagcctgcagaaccatgagccatgaaacctcttttcttataaattacccagtctcaggtatttctttatagcaatgcaagaatggcctaatacagaatggaaacacacaaaaatgttaacagtggtggtgatctctgggtgatgaattttggatggctgttttgtctaatctacattttcttttgttctgtagtgaagatatattaatgttatgatttataaaaat

SEQ ID NO: 731531 - DNA, 639 bp, Homo sapiens
aggattttaggataattccaagtaaataatcttatattcagaatacagaaagtgggtggaaagcatatttcaagacagatttcagtttgattactgtatgcaggacattatatagtttggatatttgttcctgcccaaatcgcatgttgaattgtaatccccagtgcctgagatgaggcctggtgagaggcatttgtgttgtcaggagaatcctttatagtttggtgctgtctttatgacagtgagtgagttcttgtgatatctggtcatttaaaagtatgtggcacctgccccccgcaactccctcttgctcctgctctggccatatgatgtgctcctgctttgccttccaccatgagtagaagctccctgaggcctccccagagaaagatgccagcrgtatgcttcctatacagcctgcagaaccatgagccatgaaacctcttttcttataaattacccagtctcaggtatttctttatagcaatgcaagaatggcctaatacagaatggaaacacacaaaaatgttaacagtggtggtgatctctgggtgatgaattttggatggctgttttgtctaatctacattttcttttgttctgtagtgaagatatattaatgttatgatttataaaaat

SEQ ID NO: 731532 - DNA, 584 bp, Homo sapiens
tgcgtacgtagagtttgagaatccagatgaagccgagaaggcgctgaagcacatggatggaggtgggtgaccctgccacataaccctgacctctcagagacccgccgccgcgaggggctttcaaactgatttccaactgggctgcacttctttttgtttgtttgagacagagtttcacacttgttgcccaggctggggtgcagttcctggaccaaactgaggtttgggctgctmtttctcatggcccaataacaagatgcacattaactgagtaggtggagtttttatttctgcaaccagttgcagggaaaaggcctggaaattattgccagaccaacttaaaattacaaagtttttcagagcttatatattttttaagctatatgtctatacatatgtgtacatttatgtaaagacataagttactgacttttaatctattaactaaggattgagtcttgaagaccttcctctggagcctcagtaaattgacttaatttaaatggctgtgagtgctggggtaattacccttgctttgccttctgctaaatcacagcagtttggggagttttcttcccaataaa

SEQ ID NO: 731533 - DNA, 584 bp, Homo sapiens
tgcgtacgtagagtttgagaatccagatgaagccgagaaggcgctgaagcacatggatggaggtgggtgaccctgccacataaccctgacctctcagagacccgccgccgcgaggggctttcaaactgatttccaactgggctgcacttctttttgtttgtttgagacagagtttcacacttgttgcccaggctggggtgcagttcctggaccaaactgaggtttgggctgctatttctcatggcccaataacaagatgcacattmactgagtaggtggagtttttatttctgcaaccagttgcagggaaaaggcctggaaattattgccagaccaacttaaaattacaaagtttttcagagcttatatattttttaagctatatgtctatacatatgtgtacatttatgtaaagacataagttactgacttttaatctattaactaaggattgagtcttgaagaccttcctctggagcctcagtaaattgacttaatttaaatggctgtgagtgctggggtaattacccttgctttgccttctgctaaatcacagcagtttggggagttttcttcccaataaa

SEQ ID NO: 731534 - DNA, 598 bp, Homo sapiens
aatattgaaatcatataaaatacattctctgtccataatgaaattaagttagaaattgataacaaaatgaaaactccaaagtccctaattatttggaaattaataaatacatctctaaaaaactccatgagtcaatctgcaattgatattagaaaatattttaatgggattataagaaaatattacatatagaaatattatatacaaaaacccatggaatgaaagccatgctgaaaagaaaatttagagctttgtgtgtttattggaaaatttaaaagtctgggaaaaatcaataagttaaaacccatctaaaaatgttaggaaaaaacttaggtattaaaacccaaaagattttttaaaagaaaaaaaaaaggaagtacataaaaakaatagaaaacctgaaatgttacatgacaaaataggctcaaagttgaatgttggctttttaacaaaattaataaaattgacaagtttcttgtgagatcatgttttaaaattgcctaataaagggcagggctaaaggagatacatatcagtatacgtcctgcagatgttaaaaagataagttatattattatgaattattttttaattttta

SEQ ID NO: 731535 - DNA, 615 bp, Homo sapiens
ctgagatgtgtatcagacaccggccatacaccccagatgtgctcggggcacagcctggcctacggagcactctagtctgcaggtgggcacctaaggccctaccattcccgcttcttattgtcatatttacttagttctcagcacctctgtccatctttaaatgacttaagcaagagtacattacagtagcttagatgttcctaagcttccacagagcacatcccatctgtgacaacgattcagaaaaagamcaaaatttcttttattcttaagggtacacagcataagagaacagcttaggcagtttactgtaactgattgtcctgatgtccttatccataaactaaaaaatccccacagaagcttctgtaagtataatgtgaaataagtctataaacacaacagcaacaacaacaagaatgtaaaccaaatgcccagttatgggaaactggtgaagaaatttactggtaaacccactgtaatggtgtgtgtgtgtgtgtgtgtgtgtgtgtgtgtgtgtgtgtacatgtcaacttggctcagtgacagtctctagttatttaagctaggtgctgctgtgaaggtattttgcagatgtgatggatattaagagta

SEQ ID NO: 731536 - DNA, 489 bp, Homo sapiens
actactactataatgactactgcttgcagctaactcttctggagtcactgtgtgctgtaagggctggggaataggtaattggctttagagagaaagccagattcatcatccatgcaatctggatgaagaaacaagaatttaaatcagagggtcaatactaattactggctgggcaaggcggttcacgcctgtaatcccagcactctgggaggctgaggcgggcaaatcacttgargtcaggagttcaagaccagcctggcaaacatggagaaaccccatctctactaaaaatacaaaaattagccaagtgtggtggtgtgcacctgtaatcccagctacttgggaggctgaggcaggagaattgcttgaactcaggaggcggaggttgcagtgagccaacatggcgccactgcactccagcctaagcaacagagtgagactctgtctcattaaaaaacaaaaaacaaaaaacaactaattacctattag

SEQ ID NO: 731537 - DNA, 612 bp, Homo sapiens
aatcttcatcccctttcagcttttacccagctcaaagtgtcagagattctgacatctcctggaattacaaactaagagagagaaagaattgtgtgtattttttagcattatcctatatggtctctcaaatcatttttatatgcttcaattaaccattgtacagaatatcgaaaaatctaaaacttacccctttcttgagctccctggaatacactaaacttgcaagaattgtagcttttctcagagatacttttggataaataatgactactytaagaaatggcattaccagtttctcatttgctcaaaagatgaaagtatttgtattaacaagttgatgagacaaggagagcggggacaaggcagagaaaggacagaaatttaagctttcagaatttttagctgtaggatgaggtctaatacccaccctgcttgagattttcctaatctgctcttatgcaagctgaaaaaatagcgcctgaccaaaaaaaaaaaaaaaaaaaaaaaaaaaagcacctgtctcttgaacaactttgtaagtcaacaatcctgccaacaactgagcccaaaagaagtatatttatttcagcaattctgagacttcccaacatc

SEQ ID NO: 731538 - DNA, 612 bp, Homo sapiens
aatcttcatcccctttcagcttttacccagctcaaagtgtcagagattctgacatctcctggaattacaaactaagagagagaaagaattgtgtgtattttttagcattatcctatatggtctctcaaatcatttttatatgcttcaattaaccattgtacagaatatcgaaaaatctaaaacttacccctttcttgagctccctggaatacactaaacttgcaagaattgtagcttttctcagagatacttttggataaataatgactactctaagaaatggcattaccagtttytcatttgctcaaaagatgaaagtatttgtattaacaagttgatgagacaaggagagcggggacaaggcagagaaaggacagaaatttaagctttcagaatttttagctgtaggatgaggtctaatacccaccctgcttgagattttcctaatctgctcttatgcaagctgaaaaaatagcgcctgaccaaaaaaaaaaaaaaaaaaaaaaaaaaaagcacctgtctcttgaacaactttgtaagtcaacaatcctgccaacaactgagcccaaaagaagtatatttatttcagcaattctgagacttcccaacatc

SEQ ID NO: 731539 - DNA, 587 bp, Homo sapiens
ctgaactccagcctggtgacagagtgagactccatccaaaaaaaaagaaaaaagaaaaaaaaaaagacaagctacagatagggagaaaacatttgcaaatggactgaaatccagaatgtaaagaactggctcggcacagtggctcatgcctgtaataacagcactttgggatgccaaggtgagaggatcatytgagcccaggagtttgagaccagcctgagcaacatagtggaaccccgtctctacaaaaaaaaaaaaaaaaaaaaaagaaagaaagaaaaaccagaatatgaagaactatgaaaactcaataataagaaaacaaatcctcaataagaaaatggacaaatatttgaacagagaatcttcccagactcagcagtcttaaagtcattcctatgggagtggactagaatgaagaactgtccaataaatgatggtgacagaacatagtactaaaagttgaggagaaccagagatttggtaagaaaagggaaaatgtgctctgctatatttagtctacatttattaaacatttccaatatgacaagatagagatcaacactgatagaaactggttgcggggg

SEQ ID NO: 731540 - DNA, 587 bp, Homo sapiens
ctgaactccagcctggtgacagagtgagactccatccaaaaaaaaagaaaaaagaaaaaaaaaaagacaagctacagatagggagaaaacatttgcaaatggactgaaatccagaatgtaaagaactggctcggcacagtggctcatgcctgtaataacagcactttgggatgccaaggtgagaggatcatctgagcccaggagtttgagaccagcctgagcaacatagtggaaccccgtctctacaaaaaaaaaaaaaaaaaaaaaagaaagaaagaaaaaccagaatatgaagaactatgaaaackcaataataagaaaacaaatcctcaataagaaaatggacaaatatttgaacagagaatcttcccagactcagcagtcttaaagtcattcctatgggagtggactagaatgaagaactgtccaataaatgatggtgacagaacatagtactaaaagttgaggagaaccagagatttggtaagaaaagggaaaatgtgctctgctatatttagtctacatttattaaacatttccaatatgacaagatagagatcaacactgatagaaactggttgcggggg

SEQ ID NO: 731541 - DNA, 572 bp, Homo sapiens
gtaatgcctcacagggcctggccctgatgcctaggcccagagacccctcttggcccaggactcagactttccatatactcagaggtctctgcagaggcagagtgaagaaaatgaaacaaaatttgcaggtttattcccaaatatgatttttcttaagaatatagtaagaaacatgacaaagggcatttccactggtttaaaggcctatattagttttctactgttgcctaacaagttactacaaatttagtggcttaaaacaatacccatcaattatttcataattctgtaaagtcagaattctgggtggactcaaccagattctctactcagggtctcacargcatagtgacagcaggtctcctctctggaggagcgagaggagactccctctccgaactaatttaggttagtggagaatccagttccttgcagctgaaggtccaaggtccccattccctcactggctgtcggcctgaggctgcctgcattcttttttctcatgcccctctttcttcaaaccagcaactttgtaccaagtccttctcaggcttcaaatgtctctgatttcc

SEQ ID NO: 731542 - DNA, 585 bp, Homo sapiens
caatggaaacactatagcaattcccccccctcccaaattaaaaatagaattaccatatgatttatcaattcgacttctgggtataaccaaactaatttaaaagagggaccaaactaatttaaaacagggactctgacagacatctgtacacccacattcattgcaccgttattcacaagagccagaaggtagaaacaagcctaatgtacatcaaaagatgagtgaataaacaaagtgagtggtatatatatgcaatggaatattattcagcctcaaaaatggaggaaattctgacacacactacracatggataagccttgaagatattatgctaagtgaaataagccagtcgcaaagaacaaatactgattccacttacatgaaatacctagagaactccaattcatagagacagaaaatagaacagagattatcaagggcagaagggaagggagaatgggtagttaatgtttaatggaacagatcagttttgcaagatgaagagattggttgcacaacaatgggaaatgtactgaataccactgaattgtatacttaaaatagttgaagtggtaaattctatg

SEQ ID NO: 731543 - DNA, 552 bp, Homo sapiens
ttcaactttttaagtggttcttcattgttgctcttccagaattatcctatcaagctttttttttttttttttactttttaactttgaaattattgtagattcacatgcagctgtaagaaatacaacagttatccctttatccagcgtcactcaacggtaacatcttcagacctgtagtgcaatatcacaaccaggatattgacaatgatacaatcaaatagagaayatttttatccccacaaggatactgcatactgactgttcaggtgcatccacttccctctcacccccatccttttcttacctcctgcaaccactagtctgttctccattgctatagctttattatttcaagaatgctatctaaatagtatcatacagtgggtacccttttttacataggcttttttccccttcagcataaatctctggaaattaatccgaatcactgagtgtcttggtagatattggtccttttcgactgccaagtagtatcccatgctgtggaagtaccagtttgatgtttggttgttccaactttgaggctattgt

SEQ ID NO: 731544 - DNA, 642 bp, Homo sapiens
atttgagattaacgtatgttttgctcaaggttaaataagcatattttgtttaaaaaggaatctaataaaaagacagtattacataaataatggttctgatagtagataaataatggtaaatttgggtcctccaagaagcagacaccaagacagaattgacgtgcaagagatttattggaggaagacatctgtgaaggagaagyaggagtggcagagctaggtacagagagccttcagactacagagagttctgaccatctagcaagaaagagagagaaggaaggagaagtgggtggagaaagcctcaaactgaaggtggtgctaagaaagtcctgaccaagccaatggagaatcatagagtacagattgcctgttccagaggcccacactggaccggaatgaatggcccagtactcctgtcgtgcccagtcattggtaggagcccccagggagaggagcagaagctgaaggcatgacaggtggggctgtctttcttgcaggaatctgagcagcacacttccatggctgctacagatgatacaatatggtaaaaaccacataggtggtgtgccagtggctaaagtttgagaaacactgatgtaaaagctaaaagtttgaaatcagacagctctgactttgagt

SEQ ID NO: 731545 - DNA, 594 bp, Homo sapiens
aaagaaaaacatcaactgaatagaggtggtacatggacaggtcaagaattagaacatggttttttgttcttgcgatagttgactgagaatgatgatttccaatttcatccatgtccctataaaggatgtgaactcatcattttttatggctgcatagtattccacaaaaaaccaaacactgcatattctcactcatrggtgggaattgaacaatgagaacacatggacacaggaaggggaacatcacactctggggactgttgtggggtggggggaggggggagggatatcattgggagatatacctaatgctagatgacgagttagtgggtgcagcgcaccagcatggcacatgtatacatatgtaactaacctgcacattgtgcacatgtaccctaaaacttaaagtataataataataaataaataaattaaaaaaagaattagaacatggtatgaaaatcattgaagtttgagagatgctcaactggattatttcccaaaatgagtgctttgctaagtagtctgactttaaaaatataaaatagcaattccttttgaaaaagacaatatttataatgccagacttaaaac

SEQ ID NO: 731546 - DNA, 580 bp, Homo sapiens
gtcactacttttggtcttaggtctggtcaatccatgctgatattctctgccttgcctcctgaggacttttgagtttgtaaccccccaacttccgtttttgtttacaaaaaagaaaatactagaaattgtgtcagtagcttaagaaatttaatttagcttaagaaatgtgatttagttgccaaatgttggggtgttctgcatgctgatttactgatgggcaactccctgaatcaaatggcaatacagagactaagggttcttctcgatttggaaaattcgggtcattttgcaaaccaatggtatgttctgtatgatgggaaaraaaatagtttctcagcagacgatatttttggaaataactaagtccccttcccctaccccctgacaccaagaacaaggctccaagaagctaggggtctggcccagcaaagacaagtgggaagatgcctttgactctatggtactttccagggaggcagcagatgaaagccatgtggtttaaagggccagatagtaaatatttcaggcttcataggccatttgtggtctccatcccatacattttatcttttaaaatatt

SEQ ID NO: 731547 - DNA, 609 bp, Homo sapiens
aatattctttaacccttctttaatgcctgctaacactttttaacaaaaaaagaggtgcccttgggttggaattttttttatttcaatagttgtgagcatacaagtgatttgagattacatggattagttctttagtgtgatttctgagactttagtgcacctgtcacccgagcagtgtgcactacagccagtatgcagtcttttatccctcacccttctcccaaccttctcccctgagtccccaaagtccattatatcattttttatgcttttgcatcctcgtagcttagcccccaattatgagtgagaacatacagtatttggttttccattcctgagttacttcacttagaataatggcctccagctctatccaagttgctgcaaaagacattatttcattcctttttctggctgagtagtattccatggtgtacataagccayattttctttatccactcattggttgatgggcacttaggttggttccatatctttgcaattgtgaattgtgctgcaataaacctgtgtgtgcaggtgtctttttcagataatgacttattttcctttgggtagatacccagtagtgggattgctggatcgaata

SEQ ID NO: 731548 - DNA, 639 bp, Homo sapiens
cagaacgagaccctgtctcaaaaaaaaaaaaattgtatccataaaattagaagaggttaggccgggcacggtggctcacgcctgtaatctcagcactttgggaggccgaggcgggcggatcacgaggtcaggagatcaagaccatcctggctaacacggtgaaacctcgtctctactgaaaatmcaaaaaaaaaaaaaaaaaaaaattagccgggcgtgttggcaggcgcctgtagtcccagctactcgggagggtgaggcaggagaatggcgtgaagccaggaggcggagcttgcagtgagcggagattgcgcctgggcgacagggtgagactccgtctcaaaaaaataaaaatagaaataaaaataaaaattagaagaggttactacataaatgggagtaagtaataaaagagtggaaattaaaaatatgatggattatattaaaaattcatttactaggtttaaaataaagtcaagtaaatctcctagaccattgaacgaaaagataaaaaggtagaatatacaagagaagatttaatgggcatagacatccaatcctagaagtccaacatctgattaatgagagcgtcagaaagagcagacaaagggggaggaacaagcaattaaagagataata

SEQ ID NO: 731549 - DNA, 637 bp, Homo sapiens
aacatctcacagttagataccatccttacattgaatgaatttccacttgcactgcaaattagcaatgaagacattaaatggaatcccgatagtgaccgtttcaagagctaaggcaccatttactattctgttttaattatggtctcttagcaaattttcaccagttataatgttcaccccattttccaagtaatgcttctcaaatactgtatgaaattatgaaatctgtgtgtattatattttctgctctctgttacatgcaaaatttataattctawaaatttcttgtaggaaaaattcttattagactggaatggttaatttggtttcttgccatcctgctttttgcatgttgtgaaccactagacattgatgtaatcttttatttgacttcatttctaacccccacctcagttccccaagcaataatcctactccatccctttcctccatagtgtgtgtgttggtggggggtgggtattaaatggatattttttctggtccctaatattttcactttttaaaactctacatggctgaaaaaaaaagccagtgtcagttgatgatatcttagtctgtttgggttgctgtaacaaatagatcaagtaacttataaatagcagaaatttgttactca

SEQ ID NO: 731550 - DNA, 637 bp, Homo sapiens
aacatctcacagttagataccatccttacattgaatgaatttccacttgcactgcaaattagcaatgaagacattaaatggaatcccgatagtgaccgtttcaagagctaaggcaccatttactattctgttttaattatggtctcttagcaaattttcaccagttataatgttcaccccattttccaagtaatgcttctcaaatactgtatgaaattatgaaatctgtgtgtattatattttctgctctctgttacatgcaaaatttataattctaaaawtttcttgtaggaaaaattcttattagactggaatggttaatttggtttcttgccatcctgctttttgcatgttgtgaaccactagacattgatgtaatcttttatttgacttcatttctaacccccacctcagttccccaagcaataatcctactccatccctttcctccatagtgtgtgtgttggtggggggtgggtattaaatggatattttttctggtccctaatattttcactttttaaaactctacatggctgaaaaaaaaagccagtgtcagttgatgatatcttagtctgtttgggttgctgtaacaaatagatcaagtaacttataaatagcagaaatttgttactca

SEQ ID NO: 731551 - DNA, 516 bp, Homo sapiens
ttaaggaaattgtgaagaaaatgagaaaacaaaacctattttaaaagaaaattaaattttaaaacatgtttaaaagaaatgcgaagaatataagaagaaaatatatttggcataattacattcagaacgtggagaytgtggtttcacatacacagacacctttttatttatttatttatttatttatttatttatttatttatttattttaagaaatggggtcccatctctaaaaaatgctcaaactcttggtgtcaagtgattctcccacctcagcctcctgagtagctgcgattataggcatgcatcatgatgttcggcgcagagactgtggtattatattaataatttttttcaaggaagaaaacaaaccagatctacgctgaatgagttctgaaagctgactgaaagaatcctgttaatctagaaggatgagaagaaagattgcctgtaaaaaaaaaaaagaaaaaaataccaaaatgaatctccctcattgctgaccactgagattcagcc

SEQ ID NO: 731552 - DNA, 601 bp, Homo sapiens
caagacactcaaaagcttgtgctcagttctccgcgtgtaaaaattaatggattggtttaaaagggtgttcctcagctctaaagttattataaccaccctttctcccacccctccccacataccacttcctcctacagccagcagtagggtggcacaagctggcagacattaagtagaacctctataaatatttggtgtttgaataygtacaaaacgcaccccaagggcattggtacagaccacccccaggaggtgtcatcagatgatgctcaatgtcaaatgtaccttaaaatgaggcactcagcctggtgaatcaaaagaaaagtggagttcaaggtcaggctgtgtggcctcaggcaagtgcacaacgtctctgtgccatctttcctcatctgtaaaaggataacatttgtcctgccacttttacaaaaaaattcttccaagaatccagtgtagtttgtagatgaatacactctgaaagcagcaaattcctacctaagggtaaggtgggatgaatcccacttgtgccccctctttatgtctccgttggcatttggctctggatgagagaaatgctgttaaggaagaagagacataaaat

SEQ ID NO: 731553 - DNA, 586 bp, Homo sapiens
tcctctctcccccaatcccaggcaccctcactgtttcaccgttttgcccaagctgcagtgctcttctgtgcttctctgggcctttttcacacagagcttcccagccctgaatattctgatcagtttccaggacaaccagccagcaagctcctatccgtgcttcagwgcccagctggatggtgtctttttctctgggcctctttctctctctctgctcctacagcatttcttactttgttctatacacctctcaccatggcccctcgaccaaaatggtgagttctttgaggatttggacaatggcttaaaaccttgttttcccaatgcctgcctaccacctgacccattctaggagttccaaaactgtctggtagagaaaatcatgaatgaatgaatgaatggtagacaagatgacattccactagtagtgccatctagatgctctggtcatacactggcaataaggctgtccttgttattgcctgattttcacaaggccgcacagaaagcgaaggtgggtattaaatttccctttaaaagatacgtaactttataggaagggaagtgtgataagaatgaaaagcta

SEQ ID NO: 731554 - DNA, 459 bp, Homo sapiens
ggcaggtggagggcagccgcctaagagactgcgtgagccttcctgtggggatttccatagcttgccccaggtgcttcaaaaccgcctgacattaagggttcagtccttttcctgccagttcctcccaacccggcccaagtgtgtctgatctcagaaaatcstaggctgcctcggggctctggcgggttccacctggaagggcgctagttatagcctgccgcctggccctggaatcaccatcccaggaggagggggagtggtggtggtagaagtcataacaatacaatcggtgacaatagctaacgattagagaggccctcacgtgcctgcgaggcaccttaccgtaccagcgcattcactcttcccatccctgcccagaacctgcattattcccactgcacagatgagagcaccaaggttcacgcgactagccaggacgtgaatccaggcgtcggactc

SEQ ID NO: 731555 - DNA, 631 bp, Homo sapiens
tttgaaacttgtattcaattttaaaaataatgttaatttggggaaaactatttaataatactataaattagggcaacaactcttcaacctctgccaacaagacgcctcgcaaaccacttttttttttttagataagagtctcactctatcacccaggctggaatgcagtagaccaatcgcggctcactgcaaccttggccttccaggttcaagcgatcctcccacctcagcctctcaattatctggaaccataaaagtgtgccaccacacctggataattttttgtatttttgatagagacgaggttttgccatgatccccaggctggttttgaactgctgagctcaagcgatctgcccacctcggcctcccaaagtgctgggattacaggtgtgagccaccrtgcccagccgcaaaccagtcgtaagcacaagattactgatcaaccaaaatcaaagtctagtaattaatatcgttacctttcccttcaaatatgtaaagacaaatggcaactgcaaaactaaaactaaattataatgaggaccagaacttttaacatgtttcaattctatacattttaagtgtttagaataaaaactcataacttcatctaagattattctaacaagtt

SEQ ID NO: 731556 - DNA, 388 bp, Homo sapiens
tttgcccacatcctgcattcatgataaatcatatagcctccagtggaatgctaggttggtcatgatccctttgacctttttggctcccaacacataattatgttgttaggccaggtgcagtggctcatgcctgtaatcccagcactttgggaggccgaggygggcggatcacaaggtcaggagttcaagaccaacctggccaacatagtgaaacctcgtctctactgaaaatacgaaaattagccaggcacggtggcccgtgcctgtagtcccagctacttaggaggctgaggcaggagaatcgcttgaactcaggaggtggaggttgtggtgagccgagattacaccactgcactccagcctgggcaacagatttagactccgtctc

SEQ ID NO: 731557 - DNA, 625 bp, Homo sapiens
gcccagaatttttacatcattgtacaatgaaagtctttacccattaaactattgggggaactcgcccccaatatttcaacgtaggttccttctattttctataagagtcggccggctgacaaatagagacagtacaaagagaggaattttacacctgggccgctgggggtgacatcacatattggtaggaccgtgatgcccacctgagtctcagaccagcaagtttttattaagggtttcaaaaggggagcgggggtaagaacagggagtgggtacaaagatcgtatgcttcaaaaggcaaaagcagaaccactaataaggktctaacaaagatcacatgcttctgagggaataggacaaagggcaaaagcagaaccactgacaaaggtccaacaaagatcacaaggcaaagggcaaaagcagaaccactgataagggttgtgttcagcggtgcatgtattttcttgataaacatcttaaacaacagaaaacggggttggagagcagagaaccagtctgaccacaaatttaccagggtggagttttcccaaccctagtaagcctgagggttctgcaggagaccagggcgtatctcagtccttatctcaacggcacaagacagaca

SEQ ID NO: 731558 - DNA, 633 bp, Homo sapiens
aactagctttttaagctccccaccctgccttcctgtcttttcacaagtgcttttgttttcaatttcacaaagacaattaaggctattagttctgaacacctctaaattccaacctcatacatataaacatcttggtgcttacagccatccttgccttcttctgtcaacactgaccataactcccaagagacaaccataggtgccatgtgacattcctctctcctcaccacaggagaagacgctagatccaggaataactaaaatggacattagytgttctgcctagcccatcccgtcaatatctcctcctttgaaaaactctttcttccctttccatctggttctactaagccagacaatttgataccccaattccaagtctatcagatgataaggagctcaggctgagtcattggttgattcatccaaaatacactacatcgccctgcacaagtgattggcccacaggattggcacaggatgtaaatgaggccaaacagagcccttctccagtagggttttgcagtgatggtggagaagcgagtcttatgcctcatgtgtcactctgagatataaggatgtatctccagatctgccaatggccatataaaccacaccatgaagagcatgagg

SEQ ID NO: 731559 - DNA, 683 bp, Homo sapiens
ggaggcttgtggacttgccctggacaggtcacccttctttgatcaggactgttgtaaatcagcttggcccttcctctctctgctagaaggtgaccaatcctcagggctcctcagctattgtcttactaacgagcctactttttgttatttttttctttgttattttatattagattcagaaagtatgtgtacaggtttgttacatgggtatattgcataatggtaaggtttgggcttctagtgaacacatcacataaatagtgaacattgtacccaatagagaattttttaaccctcacttctctcccaccttcctcacttttggggtccccagtgacatgctcttatacttagagaaacccaaaagattcctgcaaaagactcctagacctgataaacgactgcaatgaagcttcaggatacaaaattaacataaaaaatcaggtgcatttctatatactaacaacactaaagctgagaaccaagtgaagaactcaacctcatttacatggacatgaagatggaaataatragcctgctttaatgtgatccaaatgttcatgggaaactctaaagcagttttgaagaatcttagtgattcaaagaacatggctcaaaaactactcttcttcaggacatattgttaacccagtaattgcctgagtgattaactatgagggata

SEQ ID NO: 731560 - DNA, 608 bp, Homo sapiens
ttaagatataagtgaagaagccagatttgattacactaaatatagtatgaccctatttttgcaaaaagcatagaatttttgctagaggaatacatgctatattattaacgttaggtatctttggtggtggtattataggaagtttgatttttctttttcctaaagcgaatggtttttggctgggcgtggtggctcatgcctgtaatcctgacactttaggagtctgaggcaggcagatcacttgagcccaggagttcaagaccagcctgggcaacatgatgaaaacccatttctacaaaattaataccaaaaaaattagccaggcatggtgatgcatgcctgtagccccagttacccaggaggctgaggtaggaggatcacctgagcccagggaagttgagtctgcagagggctgtgattgcatcactgcactcttgcctsggtgacagcatgaggccctgtctcaaaaataaaataaaaaataaacacagtgaatgtttttttaaaaatctaatttataatgggcccaaaacaagccaagggccacttcacatatcacaagactaaccctgaggttgcaaaactcatatgccagagaatatcatctt

SEQ ID NO: 731561 - DNA, 752 bp, Homo sapiens
ctacccatctcaatgacatgtttttggggtgcacatacatatttcagaggattactgcaggcctagccccaatctcaacatcactaagttgacagctgtctgtagttatttgttgaattcaaatgaaattatacaactgagtaaagcatagcatactactgtttactaagagtgagaccacctttctaaaaattatgacaatgacagaaagctagtcagcaaaatagctcactccattctgcttctaacctcccaagctaactcttctggatataggccaacctaactatgggaggaatttagtttacagtttaattttaaagcaaggatgataatagccctttcccaaaactaaccccctccttgtttagggactgaaaaccacccttgtaaaactaatgaaaagcgacaaggttagaattatgggaggggcctgaattctgctaaaatgtaggagtaactaaatgataaccaaccattgtcccctagcttgcttttctataatttcttactgctcaggagccatctagccagaggtcacwtgattggtaatgcccccaaattgctcctatagataacatcactattgtaaaacctaagattggtctttgagatatttttcagacttttgcattctggctactgactgactctacctggacccatgactcacaccagggaactgactcaactggtcctgtgactcctacccagaaactgactcagtgcatgaagacctcaatgatttcatc

SEQ ID NO: 731562 - DNA, 618 bp, Homo sapiens
caagatcagataacatcagttctttctggatctatgagggcactgccacaagtgcaggactattctaagtctgaaagtttgaactatttatagaaattaggaagacctttcccctttaaaaagttatgtggtattacctgagatgttcactactaacactctgttttgtcatagtccaygaccctgcaatttaggtagcctatccctaggtgtcagtaatgcgtcagtacctcccagccttgagtagggcttttggcaaaacccttccctttcttcaatacgaagaattttcatgaaacattttgtatataccagataacaagctaagaaccaagaatagaaagacaaactgacctggccctgacttcatcacaagtataattctttattaagatagctaaacttcagcaaataataaacacaagttgtaaagatgttttggtgcagctcttgaaagagcgaactggaactcaaggaggcctagaacgtctcaggataggaggagatcaggaaagactggcctctggtaatatgccagaatcaggactgtctgagggggaaaggggtgtccctcctgcagaaggctgggttctttggttggaggaagcactctgagat

SEQ ID NO: 731563 - DNA, 612 bp, Homo sapiens
attcctgagcctacatcattactccacccgaagaatcaattatcaaagatgaatgtactctacaaaccaaggggaaggggagtgaaaagtctccctctctctgtagaaaaattgcttagtgattagattctgtttcacccaaagaataacagcttcttgaaagatacatgtcaatacagaacaattttactttctgtgcctggttatattgattcaaaagcggtggtggtggcagtggcagtgggggtgggcaggtggaaggtgaggaagactatyttcttgccttgggcaaaacccagaagtaggcaaaggagagagatttggagtcatttagccatgacagagtgagaccaaatagactataaatatcaccttaaagcaaaaccaccctggggcaagaaaggctcctgcctgggactccacgctttagagggctctgctctagctcctcctcctcacagggcaaggggtccaaggtagcaggagatgtgtcctagcagagccgtacttctcccttctagagcagcgctgttccacagaaatgttatgggagccacaaatggaagctacacatagaactttaaacttgttagtagctatattagaaaaaaa

SEQ ID NO: 731564 - DNA, 640 bp, Homo sapiens
gagatccctaaggatttttaaaacttgctctattgccattcattcagatgaaaagcaacaaacataaaaacccaccaaagaccaaagtaaagagaatgatttaacctgccaatggtacattcagatgtgcttcctgtawccctgtgttcttggcacaaagaaagatgctgttaagaaaattaattctatttattttggaatggagcattctctgctcagccactaacacaagaggagatggccacacacatagaatagaaattgcacctcaaagctcagtgttggttttgatttgagcttggaattgttgcatgttttgttttttgtttgtaactattaatatcaaaagcattttttaagttaatgtttacttctttttgctctgaaaggacaatacaaaggtagaaagctgaagatttcaactcactcccaattactattgtcaagtttccaatggcatgaaaaggacactcgagggtactagaatggcaactcttcacattctgggttcattccctactacagacgtgctgcagcagcggtatcctcaccctttgcttctctttctggccagcttttgataaccctttcaatccccaagggaagagaaggaaggagactgtggttgtttgtctccaaa

SEQ ID NO: 731565 - DNA, 590 bp, Homo sapiens
agagcttttgtgtattaaaggattatatctggtccattgagaatactgtacaggtagaggacatagtgcttgatttttatattactaaataaagaaaactggaaattacttatgtcttttggttataaccaagccattcaatctttctgaaccctaatttatcagcacaaaaaataacaatgattataaacatccattcctaaggagtgttgaaatgaataacatgaaagaattaatactttgagaaaacagatcttctatcatttgtttcatgattgcttttcaggatacaaaatcatttctttagtgaataaacccatatttgacaatagtaagtatatgagttccatcagtgaaaggaaatgtatgaaaagaagaatgttttaaaagtaatgtttttttagatagtgtatactgtccattattttacttataaattmccccattattatgtagagcttgtaaaattttagaaaacccaaactcaaaggatatgaaaagaattcacgtgctggtaaaatattttatactctaatattaggttaatattttaggttataattgtatttattaatattaggttaatatta

SEQ ID NO: 731566 - DNA, 409 bp, Homo sapiens
tggacgacagcacatctgtttacagcacggtttaaataacattttaagctcattattggtatctactgctcagaaaaaaaattcctttcaaaatattactgcttattgacaatagaccttgtcatataggagctgtgatggagttgtacaaaaagattaatgtttttatrcctgctaacacaacatccattctgcgcccatgaatcaaggaataatttcaattttcaggtcttatttaagaaatatattttgtaaggctatagctacatagatagtgatggatctgggcaaagtacattgaaaaccttctggaaagaattcactattctagatgccattaagaacattcttgattcaaggggggagatccaaatagcaatattaacaggattttggaagaagttgattc

SEQ ID NO: 731567 - DNA, 650 bp, Homo sapiens
tatatcaaatatgtccagtagtggatacttttgaggctccccccagaggctctggatctcctttactgggtataaacacccgttgctcagctcctttactcatagttttgccactaacagctgttaccagcagccctcttccaagrctatctttgggctacaaattgctttacccagcagctgggaggcagggttgctggaagtgcctgggaggctacccttctcaggtaaaaggagagattaattctgcagatgagtaccatagacacaacattaacatgagtctaagaagcacatctctcacatttttacatgttttaactgggatgcaacttataatcgacttgttctacttcaagtggtagtttactttgtacacacaataaggatatgtctgatgtttgatggtgagttagagtcaatgaaattagggactagaaaagagtgaacaaaaactgtttgaaaataatcatgaagaggtttaggaaaaaactaacatttaaactggtaatatgtggaagtgtcaggcaacccatcctatcgttttgcaagtatgctatctggaaattaaggccaatcgtagtttaggtaaaagttaaaggaagagagcaacatttaacagggatcctactgtgtgtccagcactgaag

SEQ ID NO: 731568 - DNA, 636 bp, Homo sapiens
attactgaattagaaatttttttaaaagtagctaaattaaaaagtttccaggtcaaacataagtgtgtggataattaggtagggagtttagatgactgaaaataggtcaaattcaatgtgaacacaaagatttgaacttcatataggactacgtatcccaaagggcacaattgtgtgaggtgataggtctagtaaaagactcaataactaagttgaattgctctaaagactcgttttgtaataataaaaagaactgaccttgawttatgttactaagcgtataatgtggtaatgtctcctctctaagaaacaaatgaaaggccaaagttctgagatctccctcccttatgattcagctcttttacagaggaaataaaaagaattgaaagtaggaggagagtgcctagtgtttaagcacatggaggaatcagcctaagtaatgttctttttgcctttgctggctccaaaagagtctgtagagattgtagatgtctcctgtctaggagtttcctcaccttgattttgctccacctcagaacgtttccaataatcgcaaacccaagtcagtttcaaatggctttacatgaatcagaaagtgaatgactgatatatacatgtgaggtagatacatgtata

SEQ ID NO: 731569 - DNA, 636 bp, Homo sapiens
attactgaattagaaatttttttaaaagtagctaaattaaaaagtttccaggtcaaacataagtgtgtggataattaggtagggagtttagatgactgaaaataggtcaaattcaatgtgaacacaaagatttgaacttcatataggactacgtatcccaaagggcacaattgtgtgaggtgataggtctagtaaaagactcaataactaagttgaattgctctaaagactcgttttgtaataataaaaagaactgaccttgatttatgttactaagcgtataatgtggtaatgtctcctctctaagaaacaaatgaaaggccaaagttctgagatctccctcccttatgattcagctcttttayagaggaaataaaaagaattgaaagtaggaggagagtgcctagtgtttaagcacatggaggaatcagcctaagtaatgttctttttgcctttgctggctccaaaagagtctgtagagattgtagatgtctcctgtctaggagtttcctcaccttgattttgctccacctcagaacgtttccaataatcgcaaacccaagtcagtttcaaatggctttacatgaatcagaaagtgaatgactgatatatacatgtgaggtagatacatgtata

SEQ ID NO: 731570 - DNA, 630 bp, Homo sapiens
tatctggaccagagactgaaacacagcttggaggctgctaggaccactgcctccctgcaggactgctgttcttactggagcaactgcagtagcagagggccttgcaggtgacatcagagatatgggcttctccatgggacccttgccctgctatttgtcccctagtgcctgaggaagaaacaagggaggaagaaacagatgtggcattacaaaacaacttgagaagctaaacttctctaaacctctataaaaaaagacaaaagactgaaatatctttccattctctctrtagaaaaaattgtaattgtatgaataagggatcaaaaaatgtagtaaaaatattacatagtgcattaagcagttaatattaatattcatgcaaatatatgatttctctttattttgtgttgcttttcgtattagtcttctacatttgtaaatgttagtgatttgtcattctaaattaatgaccacttttataccaaattttgtattcatgtttttcagagagatccaagttatataaacttcagtgccaaccaaacctggatctatcaatggaattatagaaaataaacaatcacaccaacattgccaaattttattaatgaactcattatctcagggaga

SEQ ID NO: 731571 - DNA, 612 bp, Homo sapiens
ttaccaagtttcttgactgactggtctaaatagtttctcttatagtttatttagaaattctagtttagacattgagatattacataaaatttaactcaaggaaggccattttatatatatatatatatatatatatatttttttttttttttttttttttttttttttttgagatgtagtctcactctgtcactcaggttggagtgcagtagtgtgatcttggctcactgaaacctctgctgcccgggttcaagcgattctcgtgccccaacctcccaggtagctgggactacagrtgcgcaccaccatgcttggctaatttttttgtatatttagtagagacggggtttcgccgtgttggccaggctggtctggaactcctaacctcaaatgatccaccatcctcggcctctgaaagtgctaggattacaggcatgagccaccgcgcctggccaggctgttgtatttcagtgttcctttcaaccaaaagcagcaagtacctcttgtgaaaacaaacatagtgatggcttacagtggtgatggcttttggggttgtcagatgtccaatatatttaggaggatttatatgactcaaaaaatctaaaactactt

SEQ ID NO: 731572 - DNA, 599 bp, Homo sapiens
gttatatttaatatatttgtgtcctgtctgctaaccttgtcagatctgcctattttgttcttcttttgaaaataacaaaatttatttttgtatattctttttactgtttttgtttctttttatgttttaataacttttccaaaatctattagttgcattttattaggcacacattttccactctctcagtttgttgtctttctcatagtgttggctttccctgcatgattggaaattattggttggggagttatcttcttccctatgattcactgttagactgtctagttgtcccagcactatgtagagcaggtacaatttccaagtagaggttgagactgaaaacctgatctacaatacataaattattactatttgttttgcaatgccaccatggtgacatttacttatgtaaattagggaggtgtgactccattgtaactttcttgctgtgacatgaaaaytaaatttacagaacagagaccactggtggtggagagagtgggatgggacaggggaagagggaatggtagtttgtgagagtctatagactgtttcttatagtctgtctgtatccaaggctgatgtggtctgttgca

SEQ ID NO: 731573 - DNA, 606 bp, Homo sapiens
gtgtcatgggattgagctggtgggaggtaactaaatcatgggggcaggtttttcctgtgctgtgtttgtgataatgaataagtctcacaagagctgatggttttatatttatttatttattttgagacggagtcttgctctgtcacccagtctggagtgcagtggcgcaatctcggctcactgcaagctctgcctcccaggttcacgccattctcctgcctcagcctcccgagtagctaggactacaggtgtgtgctatcacacccagctatttttttttttttttttttgtatttttagtagagacgaggtttcaccatgttagccaggatggtctagatcttctgacctcgtgatctgcccgtctcggcctcccaaagtgctgggattacaggtgtgagccactgcgcccrgctgagctgatggttttataaagagcagttcccctgcacatgctctcttgcctgcagcgatgtaagatgtacctttcttcctcctttgtcttccatgattgtgaggcctccccagccacatggaactgtgagtccattaaacctctttttctttataaattacctagtgtcactgggcgtggtggctcatgcc

SEQ ID NO: 731574 - DNA, 625 bp, Homo sapiens
aaaaggaaattcccccacctccattagctctatttgtgtaaaactggcttggcttagataataaactcactccatatccaactaccctgaccaaggcgctgcagtgctctggtcggtccgagttacatgctcagtcctggagccaggggtagtgaacagacagaaagtgaaggagggttggaaactcagagsgcaactaatattctcttatcaaaagaagtgaagatagatactgagtagacaaaagcaatggatgtccataacagtgagactctgagagcataaaggagggccactgaactaataaagagaccaatttattaatttatgatttttttcttgagacggatctcactcttgttccccaggttggagtgcaatggtgcgctctcagctctcagctcactgcaacctccgcctcctgagtggctgggattacaggcacccaccacgcctggcttaatttttgtatttttagtagagacggattttaccatgttggccaggctggtctagatgtcctgacctaaagtgatctgcccgcctcggccttccaaagtgctgggattacaggcgtgagccactgtgcacagccctattaatttatgattaaagatatgtggct

SEQ ID NO: 731575 - DNA, 669 bp, Homo sapiens
gcggggccaaggagacacgctcacctggtgctacactgtgccctggtgatctaggaccccaaattccctgcccaaacagctgcagcctacttctagggtccacacaggttcttcccagagttcattttcccagggactcacagggtgtccagaaagcagccatttgcctgggggtatgggtgaagcctgggcatgcactctgggtgtccacatgtgtgctcacaaggccacctgtgtcaygggatggacacagcattgggaacaggaggataatggtcctctcctcacactgccattttcctctggggagctccagcaagtctgaactctacatttgaacctagctttctagctcatgacgaatttgtaaaactaggaagatagaatatatttaacttaaaatgtttagcttgatgtaaaactcttcgatgtctagagtattgagcctccaatgatatgcaaaccctgcaccgccaaaggttcagagcagttgtgttggccagaaatgatctttgttgtatgctgagattgtacaaagcaaagacccacctctagagaagcactcctgttcctaactctgaagtcaggatattttgaacaggtaaaacaatgtaaactgagataatcaattttaagtttattttagaatgatgccaatgatgtgagtgt

SEQ ID NO: 731576 - DNA, 669 bp, Homo sapiens
gcggggccaaggagacacgctcacctggtgctacactgtgccctggtgatctaggaccccaaattccctgcccaaacagctgcagcctacttctagggtccacacaggttcttcccagagttcattttcccagggactcacagggtgtccagaaagcagccatttgcctgggggtatgggtgaagcctgggcatgcactctgggtgtccacatgtgtgctcacaaggccacctgtgtcacgggatggacacagcattgggaacagraggataatggtcctctcctcacactgccattttcctctggggagctccagcaagtctgaactctacatttgaacctagctttctagctcatgacgaatttgtaaaactaggaagatagaatatatttaacttaaaatgtttagcttgatgtaaaactcttcgatgtctagagtattgagcctccaatgatatgcaaaccctgcaccgccaaaggttcagagcagttgtgttggccagaaatgatctttgttgtatgctgagattgtacaaagcaaagacccacctctagagaagcactcctgttcctaactctgaagtcaggatattttgaacaggtaaaacaatgtaaactgagataatcaattttaagtttattttagaatgatgccaatgatgtgagtgt

SEQ ID NO: 731577 - DNA, 571 bp, Homo sapiens
gcctacttctagggtccacacaggttcttcccagagttcattttcccagggactcacagggtgtccagaaagcagccatttgcctgggggtatgggtgaagcctgggcatgcactctgggtgtccacatgtgtgctcacaaggccacctgtgtcacgggatggacacagcattgggaacaggaggataatggtcctctcctcacactgccattttcctctggggagctccagcaagtctgaactctacatttgaacctagctttctagctcatgacgaatttgtaaaactaggaagatagaatatatttaacttaaaatgtttagcttgatgtaaaactcttcgatgtctagagtattgagcctccaatgatatgcaaaccctgcaccgccaaaggttcagagcagttgtgttggycagaaatgatctttgttgtatgctgagattgtacaaagcaaagacccacctctagagaagcactcctgttcctaactctgaagtcaggatattttgaacaggtaaaacaatgtaaactgagataatcaattttaagtttattttagaatgatgcc

SEQ ID NO: 731578 - DNA, 629 bp, Homo sapiens
ggataaatttttttttctgcagttattttttaattaaactttttattttgagataaatgtaggctcacatgcagttttaagaaataatacagattaatcccttgtgtgtttccccaatggtaacatgttgccaaaccatagcayaatttgatattgtcatcgatacagtcaagtacagaccatttctatcccataaagatccctcatgttgtcattttatgggcacatttacttccctctctgtcacccttccttagcccttggcaatcactaatctgttctccattttggtaattgtgtcatttcaagactgttatataaatgaaataatacagtagataaccgtttgagagtggctttttcactgagcatacttctctggattcatccagtttggtgcctgtatcatattaataattccttttcattgctgagtagtattctacagtaaggatataccacagtttatttaaccatttactccttgaaagacatctggtttgtttccagtttttggctattggaattaagctgctattcatgtaaaaggttttgtgtaaacctaggttgtcatttctctgggatatatatatatatccaggagtgcaattgctgggtcatttggtagc

SEQ ID NO: 731579 - DNA, 629 bp, Homo sapiens
ggataaatttttttttctgcagttattttttaattaaactttttattttgagataaatgtaggctcacatgcagttttaagaaataatacagattaatcccttgtgtgtttccccaatggtaacatgttgccaaaccatagcataatttgatattgtcatcgatacagtcaagtacagaccatttctatcccataaagatccctcatgttgtcattttatgggcacatttacttccctctctgtcacccttccttagcccttggcaatcactaatctgttctccattttggtaattgtgtcatttcaagactgttatataaatgaaataatacagtagataaccgtttgagagtggctttttcactgagcatayttctctggattcatccagtttggtgcctgtatcatattaataattccttttcattgctgagtagtattctacagtaaggatataccacagtttatttaaccatttactccttgaaagacatctggtttgtttccagtttttggctattggaattaagctgctattcatgtaaaaggttttgtgtaaacctaggttgtcatttctctgggatatatatatatatccaggagtgcaattgctgggtcatttggtagc

SEQ ID NO: 731580 - DNA, 629 bp, Homo sapiens
ggataaatttttttttctgcagttattttttaattaaactttttattttgagataaatgtaggctcacatgcagttttaagaaataatacagattaatcccttgtgtgtttccccaatggtaacatgttgccaaaccatagcataatttgatattgtcatcgatacagtcaagtacagaccatttctatcccataaagatccctcatgttgtcattttatgggcacatttacttccctctctgtcacccttccttagcccttggcaatcactaatctgttctccattttggtaattgtgtcatttcaagactgttatataaatgaaataatacagtagataaccgtttgagagtggctttttcactgagcatacttctctggattcatccagkttggtgcctgtatcatattaataattccttttcattgctgagtagtattctacagtaaggatataccacagtttatttaaccatttactccttgaaagacatctggtttgtttccagtttttggctattggaattaagctgctattcatgtaaaaggttttgtgtaaacctaggttgtcatttctctgggatatatatatatatccaggagtgcaattgctgggtcatttggtagc

SEQ ID NO: 731581 - DNA, 633 bp, Homo sapiens
ctggatttctgaggttgaaaagaatctgtgtataagtggaccctctaatgtcaaacccagttgttcaagggtcagcggtaatccgatatgctacatggcttcacttaaactacatgaagctatataagtttacttagaaaagacaagacggtcagttagctgtgtctcggatgctgtgtctcggatatcatgggcactggtgatgcactcttggggggttttctattctcttctctatgctcatatgtttataagaatatgtcacagcccccgagacagagaggaacatcaaaccagaaaacagtcaccccctactccgccccccaccacccctgagcctctggagggacartagctcctgctcctcccagccctgtctcagaggcatggggctgtctggggctcagcagctacaggcgcattcaggaggaagaggacgtcttaccctggcccccctcagctgggtcctggccctgccacgggtccaaggttctctccccacacccactctcattgccgacgtccaggcagctggccaggtctgggagctgtaatgagctgttgtacgcaaggtccatgtagctgtagaaaccaggaatcaggaaagtgatattctagaaaacaaagcaggga

SEQ ID NO: 731582 - DNA, 571 bp, Homo sapiens
caataccaacccaccccggccttagaggaagccagctgcagacccccgggccctctcccaccatcccgccttggaggaagccagcctaaggacccccgggccctctcccttgggcaaggcctctcaagaggggcaggaggagccgtcaggagcacctggtgagccactgcccttctttgtcgcagcctgtataaaggtgtcccgcccctgcacaaggctgttctccgagacaaagkcctttccagtctgggagggaggcgtctgtcaccacgtgtaagttggtttctgtcctccgccttaccgcatttgtcgtgtgttcttgactcctcaaagtgctgtctcaaagctacccagctaaccctgaggagggacgatggctgcagtcacagaagggacttgctttgaccatcgattccctccatgtcacaaattaggcagctgaggcagaaaaaccgaataactgccccaagtccatgcagctcaggagcaggggctgagaagaacgcaggctcctggtccccaggcccccaggccttccttcccacacatcagcccagtccccactggatgg

SEQ ID NO: 731583 - DNA, 586 bp, Homo sapiens
tcacacataggtgacagcacagtgaccccagttatcccttgctccccgagccctgccactgtcttcccacagccagtgtcggagcaagctccattcataggagcctttcttcatccagaaactcctgccctgcttgcccacgtgctctcaacgtgagacgggtgggagtcgggcttctgtggcattggtgccgtggcagactcagccctgcaggcgtctgtcccttggtaaaggccagggaggctggcaggwtctccttcctcttgctcagtgctctccctgtgcggtgctggccaggggcctggctgcgggaggacccaggcctatgatgagggtccccaagggtgactgggcagagcttcccaggaatgggctgctcctcggctatgccccaggctccaggagcccctctgtgatgtgcagcctggtgaggtcccctaagagggcttgaggcttggcgccaggaggctggttcaggtcttgggtctgcagcatgtcagttgtacgtgtggcctcggaccgtgagccttcactttctcagtgcagctgtggcacaagccttgggtacaagccttcccgcctcgac

SEQ ID NO: 731584 - DNA, 595 bp, Homo sapiens
gcgcttcccgctcagcctggatcctaagccaccaactgcagggaaaataggaagcaaaagatggatgctgcctccagggtgctgtgtgaggctgagcaaccccttcccctctctgggccttggtttccatctgtgaartgccaggagggatgacaaagttcacaagtctcctcttccagcctgggtgactcttgacttttttaacatcttcctctcctactctagaaccctcagcacacaagggaaagtaacgggaatcagaaagaaaactgacctttcactattttctattctattttgtgttgtttaactgctagttgtgacttgttagaggaattaaaaggccaactggagattgcagcctacagtataaaaatggctttcgtgtctgattgttgcacctgcctccagaggctcacccactgtgccgacttctgtggacgcaccaggtgctgcttctctccagggagatgctaaagacaaactattcaggttatttttagtttaaaaaattcaggaggaaattctgttttacccgtaagacacagagggtcatgggccctccatcagtctttgccgagtgcatgggaggcca

SEQ ID NO: 731585 - DNA, 627 bp, Homo sapiens
tcccaaagtgctggcttctttcattttttagaaccccatcctctccaggagaccccatccagtcactctgcttcctcctcctgtcctctcccaggaagttctctcctcacctgtgagcaggagccccttccatttgatgcgctgtgtgcagggaggggctgagagggttcccatggtctctgctgcttgtgtgttctcctctgtggagataagcctaggatccagaaactctctgagcacggctgtcagctgtgctgtccttcctctttctgtgctgagcctcttcccagggcaggagcaattctcaagctcatgggcagggtcaggcccaggacacctctctgtcccctcctctctaagtcctgcctccttgtccctccttctgtttctccttttgtctgtgtttcaggtccctgggaattgtggmggcctctgcctttttcagcagtgattctttcaccaaacctcaagacacactttgtgcagacacacagacacacacacacacacacacacacacacacacagaagagatacacacagacccacacagtcagacacataccctgcaggttgggcaagaacagtcctgggcctcagcctcctggtgtccccatggctctgggt

SEQ ID NO: 731586 - DNA, 562 bp, Homo sapiens
tctgctgctcttgtttaccaatgcatatgacaaattcttaggtacaaatgacctccaaggtggctcttgcatgccccagggtcttaagaagcacagatccaggctaatcagataggagtgtgctgagtacctggtttccaactcattgtagtaaaccccgtcaccctctcggaagatgaagaagtagttttcctcatagcccttgctagctttgttcttcacgttccagttgtactcccgagcaattttgtagtcatacctgaagatgagggcacaggttcagccccatttcttcyctatcccaatccccaaaacttcccaatccccaaaacttaaccgcaacccacgcacacatcatctggtgcatagtccatctcctcctcctggtcccgctttcgtttcttcaacgtctcttctacaggcaggaaataggccacaaactggttcccttcctcatccatcatgcccctggttgggggaaaaggagtagcaatgaagtgtgaggacaagaggcagcaaggagcaggccaaggtggacagcaggaccacctacctaatcatg

SEQ ID NO: 731587 - DNA, 657 bp, Homo sapiens
gagcagaaattaatttcctctgaattctggaggctagatgtctgagactgaggtgtcatagggtcagcttcttctgaggcctcttgccatggctagaagatggccatcttctcattgtgtcctcacatagttgtcccttcacctgtattttctgcgtcctcatctctcttctaataaagataccaatsataatagattagtgcccacgctaacgacctcatttaaccttgattacctatttcaagactctgcctccaaatatagttaccttccgagatattgagaattaggacttcaacataggaattttgcagggacacaattcagcccataacacccccaaaatgatgccttatttattagtctgggtttataactttatatttcttctcactaacattaggaggttcttgactcaccatgtgctattgaacattagatgaaacattggattataaatatagctcatgttgcaatgatgccaggcaacgatgtgtgccgctgaacagtcatctcagtaaactaaagtgcatgcgagatgttcctttcaggatttattgtttggagaacaagtggaaattctgtttgatgagaacttggagcaaacgctttctccagtgctgacctggatcctattcttggcaatgctcagagaga

SEQ ID NO: 731588 - DNA, 578 bp, Homo sapiens
ggagatctggctcccatttgcagctttgcctcaaattaagtgacttggcttaaattattttacctctcctagactcaagcttcccatctataaaagagtgtatgatccagcaatcctgctgttaagaatatatccaaaagaaaggaaatcagcatattgaagagatgttgacacacgtactcatgtttatagtggccctattcacaagagccaaaatatggaaccaaactacctgtccatcaattgatgaatgaataaagaaaatgtggcctatacacaaaatggaatactattcagccatgaaaaagcaggaaatcctgtgacaggaaacaacatggatgaaaccagagataattatgttaaatgaaataacccaggcacagaaagacaaatattgcttgttctcactcatatgtgagagccaaaaaggcagatttmaaagaggcagagagtaaaatagtggttaccaaagcttgggaagggaggagagaggggaacgaagttagttaatgggtacaaatgtacaggttgagagaaggaatatgctctagtatttgagagtatagttgggaaattat

SEQ ID NO: 731589 - DNA, 661 bp, Homo sapiens
aatattactacttttcaccttcttatccaaaccaaaccagatccagatcctgtgaattaaaatgaccagaatattagcacccttaattatagcaatctgttcctctctttttgttttccatggattctgtccaacccaggaatattatgtttgcattattgctatagaatttgcatcaaaggcatggcttgatttttcttttttatgttctctggaaatctcaagccccaatgactaaaatcctgaaaggttttaagtttttccgctagttaatacagtaagaaattagttgcatctacatatttagattattgtaggaagtcatacacaattttcactttgcaaaacatgattgtgtagacagaacctcatgttccaagtaactgtttgtcgttaggtagctagtatcatctgttcatctagcactcttggccttttttactctttaaacacagagcttccaagaagagttatagggcagagctacaatgcagttatttattccagccctctcacaagacaactrtatttaggatatgatttcaccagtcttagactctgtactttgtagtctggtacataaacacaattcaaatgtcctcacaattcttcatatgagcaaaaagagaaaacagatctgagttagttctataattaaaat

SEQ ID NO: 731590 - DNA, 616 bp, Homo sapiens
gaaaagggacaaattctacaccatgtgaacagaaggaacgtgcatgtaagactagatgggccatctctaagaaaataacagtgatgcttgccttggtgaagaaggcttgcttcttaggaaacttgtaagcaaatcagctgcataatcctactaaagagggtttaacakaaacttgagctcccaccagcttccctactcttaggactcactttctccagagttttcagacacatgtgggtaagatgcttcattagcacccagcaggatgctaagattgcaaggtacaaaataagtagggagtgaggggaagggtggcttccctgagaaaaaaagtgtgggatccatattggaggcaaccattgataaggaagatgaggagtgggagacaggttaggaggaacttgaagaccagcagtggtcgagagatttcctggatgcaggagacataaaaatgaattccaggattgcttcccctcattggtgagctagggctctgagacagaaccaaggaccatatcccatacagatcatgtatgcatgatatgtccatgctgtgtccttcatattcaggctgtgttcttttctcatcacttctcttttccattccacaggtaat

SEQ ID NO: 731591 - DNA, 616 bp, Homo sapiens
gaaaagggacaaattctacaccatgtgaacagaaggaacgtgcatgtaagactagatgggccatctctaagaaaataacagtgatgcttgccttggtgaagaaggcttgcttcttaggaaacttgtaagcaaatcagctgcataatcctactaaagagggtttaacagaaacttgagctcccaccagcttccctactcttaggactcactttctccagagttttcagacacatgtgggtaagatgcttcattagcacccagcaggatgctaagattgcaaggyacaaaataagtagggagtgaggggaagggtggcttccctgagaaaaaaagtgtgggatccatattggaggcaaccattgataaggaagatgaggagtgggagacaggttaggaggaacttgaagaccagcagtggtcgagagatttcctggatgcaggagacataaaaatgaattccaggattgcttcccctcattggtgagctagggctctgagacagaaccaaggaccatatcccatacagatcatgtatgcatgatatgtccatgctgtgtccttcatattcaggctgtgttcttttctcatcacttctcttttccattccacaggtaat

SEQ ID NO: 731592 - DNA, 589 bp, Homo sapiens
ctcttattttttatagaagacattagggtggaaaatctgagcactgggcttggtgtcagaagatggagtctgagactgggcactgtcatatgaatctaggaaggtcatctgaattctctaaacctcgatttctttatctgcaaaattggagtaacaataccccccttgcctccttcagagagttattgatggggagaaaaattaaaatgattttttttgtgtgaaaaaacmtagaaagtgaaaagtgtaaaacatagtgggatgtttcaattattcaaggaatgagaagccagagcgtgttataaatttaatccaaaataaaagatgcaccaccccgcaactcactccctgataaatcttctcatctgaagcaaccctctgggaatctttgctaaaaatgttgactactgatccaggagaattacagagtggctcttggtttaacacttttgcacccacctgctgtacaaagacagccttgtttgcttcatagacaatcttccgttggctttttgggtgccttcatttgaacttggatgtttctagagcatgtaaggctcactctttaattcgttgttttagggacttc

SEQ ID NO: 731593 - DNA, 513 bp, Homo sapiens
tgccctcagcccacagaggttttgacaggagctgtggctctccaagccacaagctctctgtggctatttcaatttccattaatcaacatgaaataacatttaacactcagttgctcatttgtgcaaaccatatttcaagtgcccagtggccccgtgtggctggtgaccaccatattggacagcacagatatrggacagttccatcatcacagcgagttctgctggacagcgctggtctagattcaccaaacttgggagcagaaatctctgttctttgctgggcttcgggaagctgtgagacatgaaaagaagaaaagaaaagaaagctcagctcttcttcacaaatgggctgtcccttgcaatgtgggaatgtgtcaccacccctcagtgcagtgaccgagggagaggaggcacaaaatggggctgaggtggggacttcgtgttttccccaatattactaagcaaccgcgtcctaaaatctccaaagccagccacagaactttgtttaccagg

SEQ ID NO: 731594 - DNA, 633 bp, Homo sapiens
tgacacaacatctctgggttttgctcttctcagcattggtttaattctcaagcaggttctccctccgggctcctgggctcacagccccatgtccagcagaatgagccacctctctagccatgtgcccattcatgaaccaatccctacagcctgagggatgtgctgactggccaggcatgagtcaggtgccctccggggcaagactgatactgggtcttccagagaaaaatggggacagtggtaccagaagaaaggtgaacatcaaaaccaagatgtccacacaggtctggtgagtccccacctcaatgatagtccccctgcaccaccatggatgaaggttggcctggcagctaaaacccaggctctggaagwccatgcttcctggtcctcaatcacttactataggtaccaccttgagcacataggtgaaactctttaagactcagttttctcacctgtaaatagtaataataatggcacctagtttatcaggttttgcaatgacctgagcaaggctagctggctcttgagggcagcagttgagcaggaaggggaactctacgtggattcctgtgaaccccaggaatgaaagcctaggacacaccaaggtgcctctgatgatcacaattacta

SEQ ID NO: 731595 - DNA, 552 bp, Homo sapiens
tttatattatattttaaataaatttgtgcatgaaacaaagtttgtgtacactgaagcaccaaaaagcaaaagtgtcactatctcagccacccaggtagacaatctgtggttgctgggcatcaccatcattccggactcggaatttacatgctattaatasgcaatcattgtcttacacttgttcacacaaatacttaacagtaaaaaatatgacgtatcaatacagtgaaaaacaatgagttctggggaactaagcagcacagtagcatcgccagaatacctgcatcaactgttaaacagcagctacaacaaacagctacaagctttcaacctccaactacgatgctgtgttttgattaaaaggctattgtacactgtattttatttttttaggtgagaagaaacatcagaagcatttgaggggccagaagtgggtcctctagtaatgaggaggcattctgctagatggctttgtaaaatgtttcctccctagtcaactgcctcattaacaatggtttttgtcttaggagtctctcttcagttttataaact

SEQ ID NO: 731596 - DNA, 638 bp, Homo sapiens
tcacaggccagaggttatgccaagcaggcatgactgtgtcttagtcactgttggccaagtgctggcaacagcatgtatgacatccttcatgctaaacgccttctgaaaaccttccacacccacacctctgttcactgctgctagcatgatgttcaagacagtgtttttatatttacccttcactgatctaaggatatcctggtcacatggctgaattaatgaagtcgcatttgggtgaaagtacatggcataaacattattttttatgagaatttcggttgcagcataagcagaacagttatcaatggataacaaaatctttcactcttctttcagtccagcttccctgcaataagcataaggcactggtacraaatgtttatgaaaccaatcagaaaaggtatcccgagtgatccaggccttttgattagtataataatggactggtaagacattcacttcttgaaaacaggaaggatgcaagcttttgcctcctatagatttatacctatacgggcctactgcattaatacatcccgtcacagtttttctgctcttggcatccttaaatcttgcaggggctgtctcatcagctgtagtgtctttctggggtaatcatgccaaaacagtgatgtttc

SEQ ID NO: 731597 - DNA, 393 bp, Homo sapiens
aaggatttcttcttggtttggatccattgctggtgaactagtgtgatttttttggggtgttgatgagccttgttttgtcatattaccagggttagttttctggttccttctcatttgggtaggctctgtcagagggaaggtctagggctgaaggctgttgttcagattcttttgccccactaastgttcccttgatgtagtactctccccctttacctatggatgtagcttcctgtgaaccgaacagcagtgattattgtctctcttctgggtctagccacccagcgagtctacccagctctggactggtactgggggttgtctgcatagagtcctgtgatgtgaaccatctatgggtctctcagccgcggataccagggcctgttccagtgg

SEQ ID NO: 731598 - DNA, 393 bp, Homo sapiens
aaggatttcttcttggtttggatccattgctggtgaactagtgtgatttttttggggtgttgatgagccttgttttgtcatattaccagggttagttttctggttccttctcatttgggtaggctctgtcagagggaaggtctagggctgaaggctgttgttcagattcttttgccccactaactgttcccttgatgtagtactctccccctttacctatggawgtagcttcctgtgaaccgaacagcagtgattattgtctctcttctgggtctagccacccagcgagtctacccagctctggactggtactgggggttgtctgcatagagtcctgtgatgtgaaccatctatgggtctctcagccgcggataccagggcctgttccagtgg

SEQ ID NO: 731599 - DNA, 635 bp, Homo sapiens
ttgtgggttgctgttttataggggtggtcaggtgaggcctgataagggtcatctgaccatggacctgaagaaatggagggaatgagccatgcagatatctgaagggagagccatttgggcagagagtgggagaatactctgcatgttccagaaacaacaaggaggcccatgtggctggagccaggtgagagagagagagagagaacccaagytcaagagattatgaagtttttcctctatatgagatggagagcccttgatgggtttgagtagtagcgtgtcataatctattgtacattttgaaaggcccactctgatggccgtctagtgaatagactgaatggggtgagagcagaaacgggggggccattgcaagagagacttgacagtgacctggagcagagtgatgagaggcgattggacttgggacatatcttcaaggaggagacaacaggattggggggtggattggacataggatataaaaccaataagtgactcaatgactcttaggcttttggtttctgcaactgaaaagatggatttgctgtttatagaaatggggagaataggttttactgggacagaaacaagagttgaatttaagttatgcaaagtttgagatgagtttttac

SEQ ID NO: 731600 - DNA, 656 bp, Homo sapiens
ataacagtgacaatattcactcctaccacaattttcttccatatacacattgcacaggagccagcaagccaggcccagcgtgagcctccgtcttcagtttctgaatcccatgcatctttattctatctcaccgcagaaatgaatcagagaaggtgtgatggttaatactgatgtcagcttgactggattgaaggatrcaaagtattgatcctggctgtgcctgtgagggcgttgccaaaggagattaacatttgatcagttggctgggaaatgcagacccaccctgggtctgggtgggcacaatctaatcagctgccagcacagctagaatataaaaaggcagaaaaatgtgaaaagagagactggcctagtttcccagcctacatctttctcccgtgctcatgcttcctgccctcgaacgtcggactccaggttcttcagttttggaactcggactggctctccttgctcctcagcctgcagacggctgggaccttgtgatcctgtgagttaataataaacatatatatatatatatatatatatctcccattagttctgtccctctagagaacctgactaatacagaatggcacactgtggaatggggatttttaccagaagctaggatccaccgatcttctatgaccggggag

SEQ ID NO: 731601 - DNA, 591 bp, Homo sapiens
aagctgggaagaaagtgggctgaggtaattgagtttaaaatgagttggctgcggtctttttttttaattgtagtaaaacgtgtagcataaaattgaccattttcataatttattttttaaatttttatatttttggagacgagtcttgctctgtcgcccaggctggagtgcagtggcgtgatctcggctcactgcaagctccgcctcccgggtcacgccattctccttctcggtctccagagtagctgggactacaggcgcctgccactacgcccggcaawtttttttgtatttttagtagagacggggtttcaccatgttagccaggatggtctcgatctccttaccttgtgatccgcctgcctcggcctcccaaagtgctgggattacaggcgtgagccactggcctggcccattttcatcatttttaagggtgcagttcagaggcatgaagttcattcacattgtctggcaaccatcaccaccatccatcttcagatctccagagtaagttgtgttttaggagggcctggccccctgagataaaaagtgggactgaattagtctgctaaagttcccataacaaaatac

SEQ ID NO: 731602 - DNA, 567 bp, Homo sapiens
cctcaactttttggaacagtttcactaagaacagggctaggtcttttttatacatctggtagaatttggctgtgaatttgtctggtcctggcctttttctggtttgtagactttttattactgatgcaattttggaactcattattggtttgttcagtgattcaatttcttcctggtttaatcttgggagtatccaggaatttttccatttcttctagattttctagtttgtgggtgtagtctcttagggtttttggtatttctgaggggttagtggtaatgtctcccttgtcatttctgatgtgtctatttagatcttctctctttttttctttatcagtctagctagtagtctgtygatcttatttattctttaagaaaacaaactcctggattcattgatattttgtatttttttttgcatgtcaattttcttcagttcagctttgattttggttatttcttatcttctgctaactttggcattgctttgctcttgtttctctagttcttctaggtgtgatgttaggttgttaatatgagatctttctttctgatgtggccatt

SEQ ID NO: 731603 - DNA, 602 bp, Homo sapiens
taatctattcaatacaataatatcaagggtcgctacctgacttcaaactacactacaaggctacagtaatgaaaacagcatggtactggtaccaaaacaaatatacagacaaatggaacagaacagaggcctcagaaataaagccacacatctaaaaccatctgatccttgacaaacctgacaaaagcaatggggaaagggtttcctatttaataaatggtgtagggaaaactagctagccatatgcagaaaactgaaactagactccttccttgcaccttatacaaaaattaactcaagatcaaattaacttaagtttaaagacttaaacctaagacctaaaaccatgaaaaccgtagaagaaaacctaggcaataccattcaggacataggcatgggcaaagacttcatgataaaacaccaaaagcaatagcaacaaaagtmaaaattgacaaatgggttctaattaaactaaagagcttctgcacagcagaagaaactatcatcagagtgaacaggcaacctacagaatgggagaagatttttgcaatctaaccatctgacaaagggctaatatccagaatctacaaagaacttaaaca

SEQ ID NO: 731604 - DNA, 665 bp, Homo sapiens
ttcttaagaattcattctgagaaggtcattatacattgaagatgaaatgtgattttttttttcaaagaaaaatgagcccataggggaaaaaacaacaatgaggactgaggtaagcttttctttcattgtctcctctccctttattttatcttttacygagatttaactaggcacctttgcgagccattctccttgctttggttgatggctaatggaaaggaatccactgccatgattttctctgacaactccaaatggcttctgacactttcccgttcacgtaagtgtggacctctcccctccttacacacccatcaccatggctacctttcaatcagcccttcttcattaatattagcaggggaaaccgtttgtgtaatttgtgtccctataatagccggatagaggtaaatcatgcagttacatgtgttttcatcacaggcttctccccatcccaagttatagctgttagcttcccaaaggaggaaagtggaaaaaaaaaaaaaaaaggaacagatgaagaatttcatagatgaaattgtatctgaagaccaggtgtatttatgtctctttagccatcataatgtgatccgaggctatgatgttcaaaatattgtcgagctgagtgcatatttctgaaaaagagcagatttagctatcttcat

SEQ ID NO: 731605 - DNA, 665 bp, Homo sapiens
ttcttaagaattcattctgagaaggtcattatacattgaagatgaaatgtgattttttttttcaaagaaaaatgagcccataggggaaaaaacaacaatgaggactgaggtaagcttttctttcattgtctcctctccctttattttatcttttaccgagatttaactaggcacctttgcgagccattctccttgctttggttgatgrctaatggaaaggaatccactgccatgattttctctgacaactccaaatggcttctgacactttcccgttcacgtaagtgtggacctctcccctccttacacacccatcaccatggctacctttcaatcagcccttcttcattaatattagcaggggaaaccgtttgtgtaatttgtgtccctataatagccggatagaggtaaatcatgcagttacatgtgttttcatcacaggcttctccccatcccaagttatagctgttagcttcccaaaggaggaaagtggaaaaaaaaaaaaaaaaggaacagatgaagaatttcatagatgaaattgtatctgaagaccaggtgtatttatgtctctttagccatcataatgtgatccgaggctatgatgttcaaaatattgtcgagctgagtgcatatttctgaaaaagagcagatttagctatcttcat

SEQ ID NO: 731606 - DNA, 549 bp, Homo sapiens
ggaaaataaagtgactatttgattttaccaataaaaccccttcgtgcaaatcaaggcacactaatttcacaagaatctagcaagagaaccaccacagtgagtctaaactttacctcttcaaagttccctcaaatctatgtatttccaaagattctctcttaggttgtaatactacacaatactatacctcaagtatcaattaaaagtaatggcaaaaactgcaattacttttgcaccaacctaatatatgttgaagacctcagattatttacrtccagcaccagactcctcctagcttcaaaccaaataaccaaatatctactgaacatttcttttacaagccaaatagggaaaagatcaactttcccacaaaagatgggtaaagagcaagagtagaaaggacagaacaaagttgaaaatggccagtaaatttatgaaaaacatcccctcatcagaaatcaaagacatacagttaaaacaaaaattaaaatattaatactattttccccaagctaaattaatgaaatgtgtaaaaaatgataatatcta

SEQ ID NO: 731607 - DNA, 611 bp, Homo sapiens
tggagaaaatactatgttttgagtatagatgtaaaaaagaagaggtgcaaggactgaaccatgagatatggaagtcaggaattaccagtggtgctacgtgctccaattaggtgaagtaagttaggattgaacaaggaccattatgtttagcaacattggggtcatttgatctcaaaatttacaagaataagtacttgagaaaagccaaagaaaatgtgaaaagttgtgactgagacttactagatatcagaacatactatgtacaccctctataattaaatcaatgctgaattgatacagaaatggacaaagagaccacaactgaaaactcagaatgttatgtgaaaattagctggacgtggtggcacgtgcctgtaatcccagctactcgggaggctgaggcaggaaaatcacttgaacccgggaggcgaggttgcagtgagctgagatygtgccgctgcactgtagcctggtgacagagctagaatctgtctcaaaaaaaaaaaaaaaaaaagaaagaaagaaaatgaattctgaaatgtaaaagacttaaatataagaaataaagtaataaccatcatgcaaaaaaataggagactgtatatacaata

SEQ ID NO: 731608 - DNA, 611 bp, Homo sapiens
tggagaaaatactatgttttgagtatagatgtaaaaaagaagaggtgcaaggactgaaccatgagatatggaagtcaggaattaccagtggtgctacgtgctccaattaggtgaagtaagttaggattgaacaaggaccattatgtttagcaacattggggtcatttgatctcaaaatttacaagaataagtacttgagaaaagccaaagaaaatgtgaaaagttgtgactgagacttactagatatcagaacatactatgtacaccctctataattaaatcaatgctgaattgatacagaaatggacaaagagaccacaactgaaaactcagaatgttatgtgaaaattagctggacgtggtggcacgtgcctgtaatcccagctactcgggaggctgaggcaggaaaatcacttgaacccgggaggcgaggttgcagtgagctgagattgtgcygctgcactgtagcctggtgacagagctagaatctgtctcaaaaaaaaaaaaaaaaaaagaaagaaagaaaatgaattctgaaatgtaaaagacttaaatataagaaataaagtaataaccatcatgcaaaaaaataggagactgtatatacaata

SEQ ID NO: 731609 - DNA, 653 bp, Homo sapiens
ctcaagatgtgtttctttatttcacagtttttatttttcagtgaacaagatgcaatcctagcttcagtatgatgaggcgaatgtggaaaaagagagggcttttttttgttttgttttgtttgtttttcatcattttcatggaacactgtgtcttctgagttcaaaaatcatgactgccatgagaaatgatgaagttagtgtcaataattttttctgtactaagacatggcaaatgaaacaacgccactgtaaatatatttcaatttaggaaatgcatatccctcacaaagttcttttaaaaacaaagcgcttatatctcttttcatattcacttataattgaaaatgggataataatttctagaatgtataataataactagcattttaaagaagtcaaggcaaatgaataaataaatagtaattttaaaaatacagaakagtcttgtcactgtccacatatgtccagtagtggaaatgaatggaaaattcaaaaaactaagaagtgaccactctgaatataacaaaacattgtttgttagtgaattttatatttttcataatcaccagggtgttttgtcaccaggaaaataagaaaaattgggctgattaaccttggtttttttttaaccatttttgcagcagctataaagt

SEQ ID NO: 731610 - DNA, 488 bp, Homo sapiens
tattttaacattttcgaagctgaagaaactcagactatttaactcaaaggctgtaacaaaagaacatcgagattgttagaaacctacttgtggaactgaaaaaaatgtgtcccattgtttcacttattttacaaaggagacctcattctwtcctggcataatctctaagggctttcttcacttaagcttcccatcaggtttaatagtgcctagtccctctttcaggtcctcaatatagcccacacatttcccttttatctaccttcatattgacaaattcacacttgtttttaggtttagctgataactttctgttgtttaatgtttgtggtcttgtaactaattgcatatccccattcactcatataatattaaagaagataattatgcctcaatattactttctctattataaaatttggcaaagatatttctgataaaagaaaaatttcatttgtaatttgaatattcttttaaacatgttttta

SEQ ID NO: 731611 - DNA, 523 bp, Homo sapiens
cccagcaatcccattagtggctatatacccaaaggattataaatcgttctactataaagacagatgcacacatatgtttattgcagcactattcacaatagcaaagatttggaaccaacccaaatgcccatcaatgatagattggataaagataatgtggcacaaatataccatggaatactatgcagccataaaaaagaatgagtttggctgggcatgktggctcacgcctgtaataccagcactttgggaggctgaggtgggtgggccacaaggtcaggagattgagaccatcctggccaacatggtgaaaccccgtctctattaaaaatacaaaaattagctgggcatggtggcacacacctgtagtcccagctactcaggagtctgaggcaggataattgcttgaacctgggaggtggaggttgcagtgtgccgagattgtgcctctgcactcaagcctggtgacagagattcttgtctgaaaaaaaaaaaaaaatgagttcatgacctttgcagggac

SEQ ID NO: 731612 - DNA, 523 bp, Homo sapiens
cccagcaatcccattagtggctatatacccaaaggattataaatcgttctactataaagacagatgcacacatatgtttattgcagcactattcacaatagcaaagatttggaaccaacccaaatgcccatcaatgatagattggataaagataatgtggcacaaatataccatggaatactatgcagccataaaaaagaatgagtttggctgggcatggtggctcacgcctgtaataccagcactttgggaggctgagrtgggtgggccacaaggtcaggagattgagaccatcctggccaacatggtgaaaccccgtctctattaaaaatacaaaaattagctgggcatggtggcacacacctgtagtcccagctactcaggagtctgaggcaggataattgcttgaacctgggaggtggaggttgcagtgtgccgagattgtgcctctgcactcaagcctggtgacagagattcttgtctgaaaaaaaaaaaaaaatgagttcatgacctttgcagggac

SEQ ID NO: 731613 - DNA, 607 bp, Homo sapiens
ccaaaaaattagaaaccattcatagtaatgcaatttaggcatgattgctctaataatttactatatatattccagtaatttttctaacatgcatatgatgtatagtctacaaaaatgtagaatagtgatgtatatataatattgcagaacaaaaattttctcttatgtactctgggtatttcctttatgtcrgaaatgtttttaaaaatatgatggcaatggcattacagtattctatcatgtagacatactgtaattgatttaattcatattttatcatgtctttattggttgagaaaatactttttgaaagaagtacaatagcaagaaatattaaactattaaaagatgttggcttgcgtggtgtcgatacaatgtaagaaaatatatagttctgcaatgagaatgatgcatagatttacttgcctttttttagggaatggagagctgtgtggtatcattggaaatttttctgttaccaaatactgaggctgaattcttagcagagcagattacatggaactgtgctaagttgagaataaagcttcagtgatttgcctcatagtgatatgaactttgtaccatctaatttttgaatattaaaagc

SEQ ID NO: 731614 - DNA, 607 bp, Homo sapiens
ccaaaaaattagaaaccattcatagtaatgcaatttaggcatgattgctctaataatttactatatatattccagtaatttttctaacatgcatatgatgtatagtctacaaaaatgtagaatagtgatgtatatataatattgcagaacaaaaattttctcttatgtactctgggtatttcctttatgtcggaaatgtttttaaaaatatgatggcaatggcattacagtattytatcatgtagacatactgtaattgatttaattcatattttatcatgtctttattggttgagaaaatactttttgaaagaagtacaatagcaagaaatattaaactattaaaagatgttggcttgcgtggtgtcgatacaatgtaagaaaatatatagttctgcaatgagaatgatgcatagatttacttgcctttttttagggaatggagagctgtgtggtatcattggaaatttttctgttaccaaatactgaggctgaattcttagcagagcagattacatggaactgtgctaagttgagaataaagcttcagtgatttgcctcatagtgatatgaactttgtaccatctaatttttgaatattaaaagc

SEQ ID NO: 731615 - DNA, 615 bp, Homo sapiens
gcatgagatagtatctcattgtggttttgatttgcatttctctgatgatcagtgatgttgagattttttcacatgttcgctggctatgtaaacgtcttcttttgagaagcgtctgttcatatcctttgcccactttttgatagggttgtctttttcttgtaaatatgtttaagttccctgtaaattctggatattagacctttgtcagatgggtagattgcaaaaattttctcccattctgtaagttgcctgttcactctgatagtttcttttgctgtgcagaagctctttagtttaattagatcccatttgtcaattttggcttttgttgcaattgcttttggcgtttttgtcatgaagtctttgctcatgcctaygtcctgaatgaaactgcctaggttttcttctagggtttttatggtgtgaggttttacatttaagtctttaatccatcttgaattaatttttgtataaggtgtaaggaaggggtccagtttcaattttctgcatatagctagccagttttcccaacgccatttatttaacaggaaatcctttcctcattgcttgtttttgtcagttttgtcaaagatcagatggttgtagatgtgtggt

SEQ ID NO: 731616 - DNA, 676 bp, Homo sapiens
gcacaaggtccagaaagaaacacagagcaaacattttcaatgcaccatatataatgaatttacagcagcaaatgtccataggttaagaatgtggtgtgtgtgtgtgtgtgtgtgtgtgtgtgtgtgtgtgtgtgtgtgtgtrtgtgtcttggggagggtgctcacaagaaatgctggcatgacaaacagtgtaaaaacacatcaaaagatgaagcaaggcaactaaggcgctcactactgggggtaggataaagtaaggagctgacatgtaatttgaaaaggatggcataattctatgtgctcaaaagtgagcaaacctaaagacagagacaaatctggaaattgtgacagagctgggagatgatggttttaggcctcaatctcatcagtgtggagaggcttatagacatgagatttttgtgacattcaaaaaaggatagttacaggtcacggttgagagaaaaaagcacatatttatgtgtgatcattctaaatgaacatgtgatactttactatctcttgtacaattacatcttttatgataccaacataacaaattcatgacatattttccaaatgaggaatctgggacaaagggagatttactaaataaaagatagatgacaggtgtttccagagctgcgtttaagtccttgggcttttactaagaacttca

SEQ ID NO: 731617 - DNA, 642 bp, Homo sapiens
gtttaggccataggggtggatccttcatgaatagattaatgccttctcttgggggtgagtgagttcttggcctttcaagaatggattcattcccctgagagcaggttgttaaaaagagcttggcttcctctgatttgctctcttgcattctctctcaccatgtgatctatgcacatgcctgcttaccttctattttccaccatgagttgaagcagcatgaggacctcaccagatgcagacaattttccagccacttgaattgagagccaaataaaactatttttaaaaataaattatccagcctcaggtaatctgttagagcaacacaaaatgaactaatagaatggctattcactttgattctatttttttaatattatgaacaatcccgaataaatattcctgtacatgtccctttgtatacatatgagaaggtatccctagggattatacttcccatagaatttctgggtccttataaaatatgaaactttactacatatatakgtgaaattttctcccaggtgtcaccaatttacattcctcagaattatgaaatttcctactgctccgtatcttcactaacacctggtgacattgaacttcacaattttgtcaatatgatagatgcgtaaaattgta

SEQ ID NO: 731618 - DNA, 626 bp, Homo sapiens
aataaaactatttttaaaaataaattatccagcctcaggtaatctgttagagcaacacaaaatgaactaatagaatggctattcactttgattctatttttttaatattatgaacaatcccgaataaatattcctgtacatgtccctttgtatacatatgagaaggtatccctagggattatacttcccatagaatttctgggtccttataaaatatgaaactttactacatatataggtgaaattttctcccaggtgtcaccaatttacattcctcagaattatgaaatttcctactgctccgtatcttcactaacacctggtgacattgaacttcacaattttgtcaatatgatagatgcgtaaaattgtataacagtgtagttttgatttgyatttccctaatccttgtcttggctgcttagtagacatttgggtttcattttaggattaactattcttatttgtcccgtcttccactgtgttacttatattatttttggtattctgaatgctaattctttgttatatttaatgttcatcatttttattcataattataatcccttcctttgagattagtgctttttaaaatgttgtttataaactactgtccttccctatat

SEQ ID NO: 731619 - DNA, 633 bp, Homo sapiens
gtgattaatattatctcaatttataacaatgtaggtagaattaataccaagttaatttcaatagtatataaaatcttgcttctaaatagctctgttctctaccctcttctttgtgttattgttacacaaattacttctgaatacactattagccaaacacatagttttatcgttattgctttaatgtcattgtattttaaatcagacagaagaaaaaatgttacaaacaaaaatacagttatactgtcttttatatttacctatgcagttaccttattagtgttatttcttcatgtggatttgaattgtgatctaatacccttttatttcagcctgaaggacttccattggtatttcttgtagaacaggtctactagtggaaaattctctcaggttatgtttatctggaaatgccttaatttctccttaaaaattggaggagtttttctacagatagaacttttgcttgatagcctttccttcakcactttgaatatgtcatgccactgtcttctaacctccatggtctctgaagagaaatcagctgtcagccttattgagactcttttaagtgagataagtcacttttgccactttcaagattatctctcttgttgtttaacttctgtactt

SEQ ID NO: 731620 - DNA, 354 bp, Homo sapiens
tcttatgtataaaaaaaagacagctggctttaaaatatttctttttattgaagtaaatgggactctgagactgtcaccctcttttgtctattggggatcaggtcctgcccactttggggcactggctctacatctgtcactccattcaccaatragtctcaaagtgaggacactacagctgtcctgttcttttcaaccttttctgggatggaagagatgcgatgacttgccggctggtcaaggcttcatcacatattcggcaagtctgtacaagcactatcatgtaattgtattgttctctcttttgtttgtaaagcagaacttttcagtttaaaaggtcactggaatgtttat

SEQ ID NO: 731621 - DNA, 576 bp, Homo sapiens
caaatatatatacgtatgtaaatatatgtgtatgtgtgtatatatattacgcacctgcattcaacacatacacatacacaaatgatagcatgttgcacagtgtcttctacttcgatgtttttcatttaataatgctttttgaagagttttttttatatcattgcacgcagagttgttccatgccttttcttttttttttttttgagacggagtttcactcttgttgcccaggctggagtgcagtggtgygatctcggctcaccacaacctccgtctcccaggttcaagcgattctcctgcctcagcctcccgagtagctgggattacaggcatatgccaccacgcctagctaattttgtatttttagtagagacggggtttctccatgttgttcaggctggactcaaaccacccagacctcaggtgatccgcccaccttggcctcccaaagttctgagattacaggcatgagccaccatgcctggcctgtttcatgcttttaaaaaactgcataatattttatcaatgtagcataatctatttaagcagtcctccattgatggacatttaggtcgt

SEQ ID NO: 731622 - DNA, 532 bp, Homo sapiens
taaaaagtcttctttaatgtttgtagttttgtagttttcagtgtacaagtttttcaccactttggctaaatttattcctgtgtatttcattcttttttgatgctattgtaaatagtattctttctctaatttcctttttggatagtttcttgttagtggatagaagtggaactgatagttgtatgttcattytataatttgcaattttattgaaggaatttacttattcattctaacagaacttttttgtgtagtcatttgagttcttgccatgtgtcatctgccaacagagatcattttacttcttcctttgtgatttgcatgtctttgtttatttttcttgactaattgctgtggctaaagcttccaatactatgtttaatacaagtggtaagagtgggcatccttgctttgttctggatgttagaggaaaagctttcaggttttcaccaacgagtatgatgttagttgttagttgctattcatatatagcctttattatgttaagtaaattccttttttcgggtgagag

SEQ ID NO: 731623 - DNA, 613 bp, Homo sapiens
cacagtcaagaagttaatatctttttcttaaaaaattatttttaagttgacagataaaattatatgtatttatcacatataacatgatgtgtttttaaaagttttatttagtttcagggttacatatgcaggtttgtaaaacaggtaacatgtcatgggggtttagtgtataggttatttcaatacccagtaataaccatagtacgtaataggtgttcgatccttactctcctcccaccttccaccctcaaataggtcccagtatctattctcttgttttcttttttgagayggagtctcgctctgtcacccaagctggagtgcagtggtgcagtcttaactcattgcaacctctgtctctttgttcaagcgaatcttgtgcctcaacttcccgagtagctgggattacaggtaggcaccaccacgcccatctaatttttgtatttttagtagagacagagttttgccatgttggctaggctggtcttgaactcctgacctcaggtgatccgcctgcctcagcctcccaaagtgctgggattacaggcatgagccatgtacctggactattctcttctttgtgttcacgtgcactcaatgtttagctcccaat

SEQ ID NO: 731624 - DNA, 494 bp, Homo sapiens
gatggggaaactgaggctcaggaaggcgatgcggctcacccaggttcatagagccagaaaatggcaaggctgggatcggagacaccaggcctgcgtgagtccagagtcagctcgttttttttttttgattgtttgtttgcttggtttttttttttttttttttttttgagacagggtctctgtcacccaagctggagtgcagtggcaggatcttggctcactgcaacttccgcctcctgggttcaagcgatstcctgcctcagactcctgagtagcggggattgcaagcgcgtgccaccatgcccagctaattttttgcatttttggtagagacagggttttaccatgttggccaggctggtctcgaactcctgacctcaagtgatctgcctgcctcggcctctcatagtgctgttgcccaacctcaaaaaacgaaaacgggaagtttttgtcaacaggagcgtgggaaccggaaatccttgcttccgataccg

SEQ ID NO: 731625 - DNA, 607 bp, Homo sapiens
aacaaaagaattcagaataatttaatgcctcttatttttggacatttgttctgatatttaaaggcagcattcatgtttatttcagataactgtataaaaaatgagactacctattagattcccttctagggagctagaakattttgaaagaacgtgtatgtatttgtagatataaattgtgattctgattcacaagtctctattctccaagccaatgctggttagaaattcaggttcctttgtgagtcatcatttgattataagggttgaagagagttagagtataaaagagacaaatgaactgatgataagttaaatacacacattgttcacttacctacattttaatggctaagacacaatattttaaaaggaagattttaagcaggacaacagaaggagtcttatttgtgtgtagcactgtaaatttttaagcagaaacagtaaaatgatataatgaaattacatagactgtgattccaaatccttcccttggactaacaaacctcattacaaatgggcaccaagcctctataagtagatgtatatcatcagatcaaatctcccaatgcaattcaatgtatgactgatttttttttttgagatg

SEQ ID NO: 731626 - DNA, 559 bp, Homo sapiens
cggactgcttggagctgtttttatcttccagcagtgtgaggtgtaggaaggacccaacacggttcctcctgtgctctccgcagtcaacacagaggagttgcggaaccagatacgggtacccggggattcatcagttctgtgtttcctactgggcagccccgattcaactcacttccagcatgtctacctcgacacaggctcagatcccacggggtaagggctcagtccccaagactcccccactttccatgccagttagaggcctcacgttgtgacctgtgcttctgagtgaccggtcggctgtaaatccaggttcccgtcacccttacctcggcttgattacattgcctcagtggctcacagaactcccgagaaacacttaggtcctytggttaatgataaaggacgatctgtgggatgcccatgaatactgagaaatggatcctcagggcaaggcatgggggaagggcccactccctccaggagtctcccggaacgtgtgtctcccgggacctgtccccctccaggagtctcctggaacctgtccccctccaagagt

SEQ ID NO: 731627 - DNA, 626 bp, Homo sapiens
ttctccgcctcccaggctgaaaggattctcttccttcagcctcctgagtagctgggattacaggcatgagccaccacgcctggctaaattttgtattttttggtggggccttgctgtgttgccccaggctagtggtaactttgataagctttgggcctcagcctcaggctgtgtggtggggtctaaggtacagcaggggccccagaggagtcctccaggggaaggactgcgagaatgctgtggcactggcagagccttttacctggaggatccctgcattgagcccttctggtcccgaattgtactgagccctcttcttcctgcctgtaggctgaaagaatgaattcctggccctggaaggttcaaacagcagttctcaggggtggaggtggctctgcccccaggggacacctggtggcgtctagagacctttgcggttgtcaccaccrgggtgggggaagcccaaggatgctgctcatcactcacagagcttggggcagccccaccaccgagggcgggccaggagacgccaagagctgtgcctttcatcgcctggggtcccgggcaccgaccgccgccgggtgtcgctccgtgttcgtgtacatgccttctcctgggggtagccc

SEQ ID NO: 731628 - DNA, 621 bp, Homo sapiens
cactctgtcgcccaggctggagtgcagtggcgcgatctcggctcattgcaacccccgcctcctgggttcaagcaattctcctgcctcagcctcctgagtagctaggattacaggtgtgcaccaacacgcccagctaatttttgtatttttagtagagacggggtttcaccatgtyggccaggatggtatcgaactcctgacgtcgtgatctaccctcctcagccttccaaagtgctgagattacaggcgtgagccacagcgcctggcttaaccttttattatggaaaattttatacacaaacaaaggcttagagaatcacgtaatgaacccccataaagccatccccaaagtgtgatgcatctggttccataagtccctctccaccctccccaacagactatatcaaagcaaatcccagacacgaagtaatttcatccataaatatttgcatttctaaaatacaatgacttaaaaaacacagccaacaattccattatcattttttaagaaaatggacagtaattccttaatatgctcaaatatccaggcagtgtccagtttccctgactgccttctaaaattttttcacactttgttcagctcagaatccaaataaggtc

SEQ ID NO: 731629 - DNA, 669 bp, Homo sapiens
gtgtttggttttctgttcctgtgttagtttgctgagaatggtcatttccagtttcatccatgtccctgcaaaggacatgaactcatccttttttatggctgcattgaattccatggtgtatatgtaccatattttctttatccagtctatcattgataggcatttgggttggttccaagtctttgctattgtgaatagtgctgcaataaacatatgtgtgcatgtgtctttacagtagaatgatctataatctttgggtatatacccagtaatgggatcactgggtcaaatgatatttcttgttctacatccttgaggaatcgccacactgtctttcacaatggttgaactaatttacattcctaccaacagtgtaaaagcgttcctatttctccacatcctctccagcatctgttgtttcctgaccttttaatggtcaccattctaacyagcatgagacagtatctcattgtggttttgatttgcatttctctaatgaccagtgatgatgagcttttttttgtatgtttgttggtcacaaaaatgtcctattttgagaagtgtctgttcatgtgcttctcccactttttgatgggcttttttttttcttgtaaatttgtttaagtttcttgtagattttggatattagccttttgtcagatggatagg

SEQ ID NO: 731630 - DNA, 552 bp, Homo sapiens
ttttttttttttttttttttttgagacagaggctcgctctgttctggagtacagtgacacagtcttggcttactgcaacctctgcctcccaggttcaagcgattctcctgcctcagcctccctagtagctgggattgcaggcttgtgccaccacacctggctratttttgtatttttagtagagatggggtctcaccatgttggccaggcttgtctcgaattcctgacctcaggtaattcatgtgcctcagcctcccagagtgctgggattacaggcatgaaccaccgtgcccagccttgactattcttgatgaagtgggaaacacggttatattgacctggaaatggaggctcggcgaaatgaaatgaggtccccaaggtcacatagcaggcacacgttgatttcaggaatttggttttaaacctcaggagtctggctcctgagctggggagtttcagtcactttaccatggcatgtaaacctgtcagcatgaggcaggcacacagggaggattggtaagactcagatactgttcctgttattgttgctgg

SEQ ID NO: 731631 - DNA, 440 bp, Homo sapiens
gtaaatggatgaaaacacactgattaaaactgctgcttttatccaacaagatggatgaatttcccaggaaagaatacttgagttcaggcctgttcaagtcccaacctgtttgtggtttgaggttgctctctgcctcrtagagcaaagtggaaaatttatcttctgggaggacagagttttcttctctgaaaaagtttcctacatagttggctttggcatttgcaaggaatgaaaggtcagggattgaggcctcatgagtctggatttctagctgaggttgagagaaaaggtagtgattgtaaccagaaaatccagagtgggtgtatttacctccagaactcatcacttaaaaaaaaattttttttgaactgacatgcttgaggctttttcttttttttttttttgagatggggtcttgctctatcccccaggctggagtg

SEQ ID NO: 731632 - DNA, 661 bp, Homo sapiens
gaagtttagtttggttggatattaaattcttggttcaaatttctttcatttaaaaatgctgaatataggcccccagtctcttccagcttgtaaactttctgaaaggtccacggttagcctgatcgggttccttttgtgggtaacctgccacttctctctagctgcctttaatgtttttcttttgtattgaccttggagaatctgatgactatgtrtcttagggatggtcatcttgtataatatcatctcacaggggttctctgaatgtcctgaatttgcatgtcaacctctctagtgtggttggggaaatgttcatggacagtatcatcaaatatgttttccaagttccttgttgtctctccatctctttctggaatgccaatgtgttataggcttggtctttttacatatcccatatttcttgtaggttttattcattttttaaaattcttttttctttatttttttctgctgtattggttcaaaggagtcgtgtttgagctctgagattattttctttttttttgtgggatagcaaacacttatttgaagaacttttaggataaaatttagtttacctctgataaagctgaagaaaaatgattgcagtttttatgcattaaatgataaacattgcctttgtattcttttcccagttctt

SEQ ID NO: 731633 - DNA, 561 bp, Homo sapiens
ttactttatgtattaaaatgtatttatgtaacttaatcacaatctgctggttgtcaacattatagcaatttgagtgatttgtagaaatgttacttttattaggtccctttatactcattattctttttttttttttttttttttgagacggagtctcgctctgtcgccaggctggagtgcagtggtgcagtctcggctcactgcaacctccacctcccagattcaagcgattctcctgcctcagcctttcagtaactgggactacaggcgcttgccaccaygcctagctaatttttgtatttttagtagaaatggggtttcatcacgttggcctgatctcctgacctcgtgatccacccgcctcaacctcccaaagtgctgggattacaggcgtgagccactgcgcccggccccattattcttttaatacaattgtcttgagcatttactctccatgtgctgagcaccatattgaatgatgttataatttctgcttctgttgtcaaacctatttatttaaaatctctagtcctatgtcataatgtcagactttgttgaaag

SEQ ID NO: 731634 - DNA, 546 bp, Homo sapiens
aggatccctaattagtgagcccaaatcaataaattcagcctgatgcatctgtatgttccttccagcattatcccacacccttaatatccattcccgtgcctgttctccaaatttctgcttatataaattagaaaactcaattcaagtgtagctcacctccccatgggtcacactctgaacctcacttctgtgggcccatcgggactttagttataggtctagaagcaaacaaaggtgttgagggtgctagaggagaatcgatattatcttgcctggcaactgcytcaggggaggccatcactgttgcctcaggcagcacagggtttatctcctcagacaaaggtggaaaggctgatggcagcatgggtcggggagaggatgttgccactattggggatgccattttcctttctctttcttctgcctattaaacctccactcctaaaaaaaaaaaaagaaaaaatgatgaactcagggattctaactcctggcttcagaagcagatactaagcctcaaatctgctaagattgccctgagtgagtctt

SEQ ID NO: 731635 - DNA, 648 bp, Homo sapiens
aaattatccaaagtatgccttctgactacagcaaaatcaaactagaaatcagaaaaggaagagaaaaggaagatgaaagaaagacaacaagaaaatgtctaagcacttggaaattaaataacatacttccaagtaattcatcggtcaatgaggaagcctcaaaggacacggaaattttaaaagatagaactgaatacaaacaaaaatacaacatataaaaataaatgggatgcagctaaagcagtccttagggaaaatttatagcactagattcacacattaaaacagaggaaatgtctcaaatcaataatctgagcaaaataaacccccaaaaagcagaggaaggaaataataaatatcagagcagacatcaatgaaaatgaaaatgggaaaacatacttaatgacaaaagactgagtactttccctctaggggcagaattaaggcaaggttgttgcctgtaccacctttactgagcacagtaaacggragttctagccactgaacaagtaaatgagaagaaacaaaagacatatatattggaaaggaacaaataaagccatccctaataataatttaaattcttttatgtttgttggggtttgctttatgacctatgatttggtttattttggtgaattttccata

SEQ ID NO: 731636 - DNA, 428 bp, Homo sapiens
ccattgttatgaaaaagaagatgctaataagattcacctaatcacttagaaaatgaatagcttcacctgccttagaaactgcaagaaaaattaaatttttaaaaaaaaatttggacaacacatctctaaattattttttaaagtctcraaaaaatctaaaaaaacataaaacacccaagatcattctaacaggctatactggtgaaaaccagaataaactcctctttgaatgggattctatttcaaatgacttctccaaactcaagaaaaatcacctatgagaaaaccttaataaacactctaagctaaactccccagggagttacaggatgaaaaggacttggacattttagagccctgttaacctgtgggaaagtgctatagtatgacttcgtttatatgcctggtagagaagagagcccccaaag

SEQ ID NO: 731637 - DNA, 511 bp, Homo sapiens
atagtagctaaaagtcttataatctcttctatttatagaagtcaaggaagtgaactcagatgagataaaaactgagttatttagccctagagagtctgtctctagttgtcaccctcatttccccgtcttgatcattctttctctttccagtttccgaagtcaaaactgccttttgaaagtgacacaaaattctagcatgatggttctgttagtgaggcagtaactcataaaagtgtgttttcaaggaaagtgctcatggaggtattctacrctgccatctttcttctgaattcttggaaataattatatcttaatgtccttaatgttctgaaggtaatgaacaagtagcttcaatttaactggattttggacacttctccctagagaattcaggaacccactgcctacagttttttactgctattcatggaagaaatgggaggacatgttatcaatctgtattgctaggagactttcaagttatagtgctggagaaatgtatgaaaagctt

SEQ ID NO: 731638 - DNA, 611 bp, Homo sapiens
attggaattccaaacagataaatatgtaaagaaagaaaccaaaaccagcccatagaaatgtcaaatatataacaattcaccatagaaatatctccatccttatttctctctcattcctgtttttgctcctcaaatggaggatgaaatgtaaaatatataattccacttcctgggaatagactgtattgtatatcatttgcatcgaaaatgcctcattcttgccgcwgagattctgctaaatgcctatcacatcacttctgtcatctcttgggccaacagctaagccctgtctctttgtaactgcattctgttcaatgcagtataggcagaagagatgaacaccacgttcaagactgctagtctatattttgagaaataaaagacaggtcagccacagtgatgagattttttcttttttcttttttcctggaaactgtaaatggcagagaaaactcagccttaagcaattctgcattgtgctgtcttcggacatacaagtatctgttcttatgcgcaaggtttgctcaatataaaattctctcaggagtggagaaaaaatatgtgatcagaagcttgagaacctgatgatttggagagtcagaggcagttga

SEQ ID NO: 731639 - DNA, 611 bp, Homo sapiens
attggaattccaaacagataaatatgtaaagaaagaaaccaaaaccagcccatagaaatgtcaaatatataacaattcaccatagaaatatctccatccttatttctctctcattcctgtttttgctcctcaaatggaggatgaaatgtaaaatatataattccacttcctgggaatagactgtattgtatatcatttgcatcgaaaatgcctcattcttgccgcagagattctgctaaatgcctatcacatcacttctgtcatctcttgggccaacagctaagccctgtctctttgtaactgcattctgttcaatgcagtataggcagaagagatgaacaccacgttcaagactgctagtctatattttgagaaataaaagacaggtcagccacagtgatgagattttttcttttttcttttttcctggaaactgtaaatggcagagaaaactcagccttaagcaattckgcattgtgctgtcttcggacatacaagtatctgttcttatgcgcaaggtttgctcaatataaaattctctcaggagtggagaaaaaatatgtgatcagaagcttgagaacctgatgatttggagagtcagaggcagttga

SEQ ID NO: 731640 - DNA, 666 bp, Homo sapiens
accacattttcttgatccacttagttgttgggcatacaggttggttccatatctttgcaattgtgaactgtgctgctatgaatatgcacgtacatgggtctttttcatataatgccttcttttcctttgggtagacacccagtagtgggatttctggattgaatggtagttttaattttagttttttaaggaatgtccatactgtttttcttagtggttttactaatttgcctttccaccaattgccaactcttttatgaagactttgtaaagctccagcttcaaacggtggatcagtctcctatgacatgtggggtgcagtagttataacactagtagagtaattccaaatccactcaactcaatgtagcaacagtctattaagtatcttctggttgcaaggcacttatgataaggaaataaattctaggatgtgccacactaaattgttcatggrgtatttgtagaattgcagctattgctataatggtaatatacaaagtactagagaaacctagtttattctgtttgggaattagggatggtggctcacataaaactacagaaagggggtctctgagccagccttgaatttaattaacatattaaacaatggttaccattagacaattcattacggttaaatgatatccccgtgctgaactc

SEQ ID NO: 731641 - DNA, 600 bp, Homo sapiens
ctaaaattaggtaacttattaagcaagaggaagaggcagaagaagagaaggaagatgaagaggaggagaaaggagaaggagtagtaatagcagcagggtcgggcgcagtggctcacgcctgtaatcccagcactttgggaggccatggcaggtggatcacaaggtcaagggatcgagaccatcctggccaacatggtgaaaccccattgctactaaaaaaaaaaaaaaaaaattagctgggcgtggtggcacacgcctgtagtcccagctacttgggaggctgaggcaggagaatcacttgaacccaggaggcagaggttgcagtgaaccaagatcgcgccactgcactccagycttgtgccacagcaagactctgtctcaaaagaaaaaaaaaaaatagcagaatgcccaaattatccaaacatgttaaaccaggggaaagaatgactagaatatggccatccgttcctcatggccatcacaattctctcttcttgtcaaatgaaggctcacggtaaaaggcaggatcaatttgtgttctgcagaagatgggtctgagccactgtcttaagccatttggattcgtgggggccggagtgg

SEQ ID NO: 731642 - DNA, 538 bp, Homo sapiens
aatagcagcagggtcgggcgcagtggctcacgcctgtaatcccagcactttgggaggccatggcaggtggatcacaaggtcaagggatcgagaccatcctggccaacatggtgaaaccccattgctactaaaaaaaaaaaaaaaaaattagctgggcgtggtggcacacgcctgtagtcccagctacttgggaggctgaggcaggagaatcacttgaacccaggaggcagaggttgcagtgaaccaagatcgcgccactgcactccagccttgtgccacagcaagactctgtctcaaaagaaaaaaaaaaaatagcagaatgcccaaattatccaaacatgttaaaccaggggaaagaatgactagaatatggccakccgttcctcatggccatcacaattctctcttcttgtcaaatgaaggctcacggtaaaaggcaggatcaatttgtgttctgcagaagatgggtctgagccactgtcttaagccatttggattcgtgggggccggagtggagatggtacaggagagaggatcc

SEQ ID NO: 731643 - DNA, 613 bp, Homo sapiens
aatatccctctcccatgaagtgcctgttcatattccttggctatttttgtattaggatctatttatttgaatttatttgtaggaacttcatatacacacgtgtgtgaaggcagattttcactctttttcctatctgctacaaatgtcagtgcccaggtgtgcttttatctttgtatgtctttaatggtgccttttttttttttttttttttttgagacaaaatctcactctatcacccaggctggagtgcagtgacgcgtacttggctcaccacaaactccacctcccgggtgcaagcaattctcytgcttcagcctcccgagtggctgggattacaggtgtgcaccactgcacccagctaattttttatatttttagtagagacagggtttcaccatgttggccaggctagtcttgaactctggacctcaggtaatccacctgcctcggcctcccaaagtgttaggattacaggcgtgagcccaggtaatccacctgcctcggcctcccaaagtgttaggattacaggcgtgagccactgcacccagcttaatggtgtcttatatctgattttctggtatttattccatatttctaatactacttaattaaa

SEQ ID NO: 731644 - DNA, 528 bp, Homo sapiens
aaagataattaacctcattagtcattaggaaaaccccaatcaagacctcactttacactcactaagatggctataataatattaatgcttaacaaagcaaaaaaaaaataaggattggtgagcataaaccttcatgcattactagtagatgtttaaactggtgcagcactgtgaaggtgtacttagtatctcaataagttaagcagaattatcacatggcacagcaattccactcctgggtatatatccaaagtaactgaaaacagatgttcaaaaaagaggtacacaaatgtgaagagcaacactattcacaaaggccaaaaggtgggaacaactcaaatgtccaccaatgaataaatggacagacaaaatgtggtatayccataaaatggaacattatgcagccatgaaaaagggaatgctgcatggtacaacacagatgaatcttgaagacatcatgctaagtgaaataacctagacacaaaaggacacatattatataaatctatttaatgaaatatccagaat

SEQ ID NO: 731645 - DNA, 514 bp, Homo sapiens
ctgctcactgcagccaacaccacagaaaagaactgtgtcctactccacccaagccagcaaaagctgagtagggagccctgacttctactcctaccaggctgtaacaaccacccaagcccgtacccctcatcagtgtgggagcatcagagaacactgagaaacataaagagaacatccatctagggagtggaagcgtctatcactactaggcaactgacaaagcccatcctcctctgctgcaggaccagtggaaatcayatggtcacctggacacccacgcccatgtggtgataacgaagcatctcttcaccttcccattggtgtggtgtcaaaggagtcctagtggacagacaggactcttgccaacacccagcagtaacaaggctgctcccttctgcagtattagtgaaagccaagtagggagcaataatgagacactcataaccccactcccaccagccactgaggtatcagtggaggcccagtagagaaccagaactcccacacccaccaa

SEQ ID NO: 731646 - DNA, 514 bp, Homo sapiens
ctgctcactgcagccaacaccacagaaaagaactgtgtcctactccacccaagccagcaaaagctgagtagggagccctgacttctactcctaccaggctgtaacaaccacccaagcccgtacccctcatcagtgtgggagcatcagagaacactgagaaacataaagagaacatccatctagggagtggaagcgtctatcactactaggcaactgacaaagcccatcctcctctgctgcaggaccagtggaaatcatatggtcacctggacacccacgcccatgtggtgataaygaagcatctcttcaccttcccattggtgtggtgtcaaaggagtcctagtggacagacaggactcttgccaacacccagcagtaacaaggctgctcccttctgcagtattagtgaaagccaagtagggagcaataatgagacactcataaccccactcccaccagccactgaggtatcagtggaggcccagtagagaaccagaactcccacacccaccaa

SEQ ID NO: 731647 - DNA, 589 bp, Homo sapiens
tgagaacaaagccccatgctggtaggaacccttcccgctcttgggcatctcaactgcaaaccagatggagaggtggattggggcactcttcacacatcttagcccatggaggaaaaacatgagtgtacactgccccctagtgttcattgttggtaacacgatgaggctcgggaaatcataaaaaccataaatgtctaatgaacagatgcaagagaagataaaaactacattgattttattttagcttttttcagttaactgaaacacacactcacacgcttatgtataaaacattgagaaaaagccatagccaaggaggagartcaaatctttaaagatcccaaaccagatactgctggccaagaacgaatggatgaattgggaattcaattcaggccccttggataccatccagatgttcaagcagctggtcacaccaagtcccttccagtcaattacttttcttgatgtttctaatcaacagcattatatatgtgatgctataaacttttatatttaatattagctcataactcaggatcccaaaccagatgttttgggtgagaaagaaattgatgacttatcagga

SEQ ID NO: 731648 - DNA, 466 bp, Homo sapiens
agaggaaagaggatgacaacacctttagtcttcactgtgctccagccagatcaattgctgctccctgcttgtgaaagtcaataaatttcctttctgtctaagctagtttaagttatgttcttctcatttgcaggcaaaagcatactrgggaattcaatgttattactcttaagaacagctgtcaataagctgtgcatagctataactgtgcttttcctagggaatccctgcagaggaacacagtgtacgtgagttactaacatctattttctttgaactattcccattgcacccgtggtttacatgggatacagaaatgttccatggtcctgcacggcacacttcgtttttaacctttcctgtcatttaagtaactccgatgcatcaagaatcatgtgaatttgtgttcagagctcagtggttccagaaaattgaagaaaacacaacaactggtgccattgtcacc

SEQ ID NO: 731649 - DNA, 598 bp, Homo sapiens
ttgaaaatgtaaaataaacataagtaaataaaatgaagtaaagacaaaaattctataagtttattgggcaatttgacctgctgtttaactgaggtagtcagcagaatgaacagagctgacaagaaccttcgtagcctcacttttggaaaataaaaacaattctatgttctgaaaacatgccacatatttccaccttcataatcagcttattgattaaagtggtatagaatttttttaatccagcggcattaaacattttctagtcccaccataaccagttagctaatccaaatatgaattcagtacctacaagtgtcagaaaaaaatatgtaaatatatttcatgggttctagaatgtayttaatttttacattttaacatctgtagaaatggaataagtctaatagttcaagtggttatgaaacattgttcaataaattggttgttggcctttaaaaaaagttttagtccgaaattaattaatgatatgttttaacaaatcaatgacatctgagattgaatgaagtttagaaatgggttttaagcaaattgagggaaaaatcttatccacccaccaaaaaaaaaaaaaaaaaaaccc

SEQ ID NO: 731650 - DNA, 621 bp, Homo sapiens
gttcatatcatggcaacacacaggaaagcaatttatatctaatcattttatccatgcataatatatattatgccatatgatattaatcattttaacaacaataacaacaacagtaacaaaaacaatcaacctcaaaggatgtcatcctggaaaaagcctttagtgcatttagtccaaatttattttttcttagaaaaggaaattgccatccaagagattgtgaaacttgctggattcactcatctggttaatgaccgagaagtggtgtctagatcacaggcctcctaattctaagtttagaggtatttcttccatctcatgtcaccttttcatcacctttgagaaacatgctaattccagggatttttaaaagtatatatgtattygcacggaaactttaaaaaatttcgtttaatctctcagtgatcttgttttatttttataaattgtatgtttcatgagttttcttacaatatgcactcatttattagcacttacaaaaatacctttgaaaatatgttggcattacaccactctgtagctgtctggaaatttcttgaaaacagaaaatacaaattaggaaggaaaatgtgaaagtataattgttctggactcctaagc

SEQ ID NO: 731651 - DNA, 646 bp, Homo sapiens
cactttggcatatgacaacatgaatgctatcaacctcaactttaaactcacctacttattttaccttcaaggagtatctgtaaactagtctatggtgtcttaaaaatttttgtaaggatttttgaatggagttgcccacaaaaacaaagaggattcaaaattttaaaatccctgtcataagagaagcctctttgtgtgctaagaccaaatattctatgaaaaaataagattgtctgcgtagacagttgggctgtgtacaagtccagccacatccaaatgcatttctgaggaccagaacttatatgaagcctcatttcacatgtcattaagaacatctgtcagcagaaagaatcatttcactttgaaagttttatgtcctgagggttacccagtgcattaagccctgggtgaaaattgagtaagccgawgatttgaacccattcaaatgaaaaagaaaaaaaataaaaaagcaaagcaccttgattttttcaatgagggatcaagctctgagctttgagattgagtccctatcctaaccttttgcacaatactcctgtgtggttgactaaatccaaaaaagcgtccagtttcttaatgtttcaggtatccaagcttgggtagattaactttccattcatgaaatgtt

SEQ ID NO: 731652 - DNA, 612 bp, Homo sapiens
taatttgtaaggccacttttgctatatgtttcattatatttatgaatctgtcctggactctcaaaactgtccctttgatgaatttgttcatgtgtatgtaaatttttttgtgagagagtgtgtgtgtatatcttcacagaagaggcaattgttattgttgttgttgtcattgtcgttgtgaacacttatcacaggaggccttgccaatacccgaaggtgaagctaccctccccacatgtgtgtttgtgtgtggcttcttttgttgttgttgtttcttttcttttaatatttttgttgccactcacacacaaatgtcactttttaaagaacaactatatactatgtattattattgttattattgaatattttatccgtaagttctrtttgttcacattaaggaacttctctttggttcacaccagggtgttgccaccaatttcatgtttttaaaaaggttctacacttgtattcctagtataaatcctattaagtgtttatagtttaatgtggattaagtttggtaatttttttagatcttcacattatttcataaaagataatttatacttttagtttattttattatcctcatttggttttgatatggag

SEQ ID NO: 731653 - DNA, 662 bp, Homo sapiens
ttggctcagagagacaataaaatgaaagtgctttattttaaagacttttattagattaggagccagaattcacaagtattggtgaaaagaataataatttaggcaggtttgccatatttcattggcactgggttattgacacctagtgttttttgatgatgcattgttactaaagagcaactgcaaacattaaaactggctcttattccagccttccagccttcagtgactttttgctagaatgagtgctttgtaaacaaactgttgattttatgatggcrttagagtctgtcaaattgccaatcttccagatttatacagccttagaaatcatgtgatttaattaagcattccatgattttgttcttattgctatctccaaagtttatgttcttgacctaacaattagttgtcagagttactgctctgaaagaaatggtgaatattgcaattggaatgatagcccccttattttataactcatcttaccttccactacagtgtggtagactggatagctgtctagccttagtcaagccacttaatttctctgtgctttagttttcttacctgtaaaattgggctgctgaaaaccatctcagattattatcaggattaaatgcaatgtgatatataatgtgcacagcactgttcacatagac

SEQ ID NO: 731654 - DNA, 611 bp, Homo sapiens
ggcaccccctaccatgcccaactaatttttgtatttttagtagagatggggtttcccatgttggccaggctggtctcaaactcctgacctcaggtgatctgcctgcctcagcctcccaaagtgctgggattacaggcgcgagccactgtgcccagccaaaatatagtattttttaaacaataaactttactttccctaattcatctcatttttcttgatttttaagcattgcttacctttctcttctttttttttttgttttgaatcaataraattcccttttaaaaaaatcaaaggaaattgacattctttttttaattattattattattatttttagtacagacggggtttcaccatgttagccaggatggtctccatctcctgacctcatgatctgcccgccttggcctcccaaagtgctgggattacaggcgtgagccatcgcgctgggccaggaacttgacattctgaatatagatgctaatcattgttattcagagaaacttctacagaaaagaagatgaatagagccaacaggatgtttaagtgtacatagtatgatttaaagcctatcaggaaagtaccccaaattatctctcccatcaaaa

SEQ ID NO: 731655 - DNA, 611 bp, Homo sapiens
ggcaccccctaccatgcccaactaatttttgtatttttagtagagatggggtttcccatgttggccaggctggtctcaaactcctgacctcaggtgatctgcctgcctcagcctcccaaagtgctgggattacaggcgcgagccactgtgcccagccaaaatatagtattttttaaacaataaactttactttccctaattcatctcatttttcttgatttttaagcattgcttacctttctcttctttttttttttgttttgaatcaatagaattcccttttaaaaaaatcaaaggaaattgacattcttttttwaattattattattattatttttagtacagacggggtttcaccatgttagccaggatggtctccatctcctgacctcatgatctgcccgccttggcctcccaaagtgctgggattacaggcgtgagccatcgcgctgggccaggaacttgacattctgaatatagatgctaatcattgttattcagagaaacttctacagaaaagaagatgaatagagccaacaggatgtttaagtgtacatagtatgatttaaagcctatcaggaaagtaccccaaattatctctcccatcaaaa

SEQ ID NO: 731656 - DNA, 641 bp, Homo sapiens
ctagcccaaaattttgatctggttccctcagtcttcatcacagtatcagacttatgcacggagaatttgtgacttaactgagatcgtatagctcttaagaatgtaaggctggaacttgaacccatattatccacctcagtttttaaaattgttattatttttgccctgtttcaagaattgcasaggccaactctatttttagtgaaacctgtgcattcatttccatatatcgtaaccaactccatcagtccttactcaactatagatgtgaaattttaagtgattgaaaggagatatgtatatttaagattttctttccttgaaaatttcagatttgaggcttaagcaacttcttccggggaagagtgccagtgcagccactgttacaattcaagatcttgatctatatccatagattggaatattggtgggccagcaatcctcagacgcctcacttaggacaagtaagtgaaagagatacttaaggataagcaaagtggattgaaagctaacagtctttcttccagtttgtagttagatgcaaacattttattgcctttacaaatataaccctttgtcctggtaaaatcacttggaatcttaggtgggtagggtgaaacatttccttaattgtaaaatgt

SEQ ID NO: 731657 - DNA, 676 bp, Homo sapiens
tcccctgggagtgttcctctgaggggatgtgtagggatggagggagagtggagggccccttgggaggaagtaacagagcatataggacagtttgaggttatgtctcttagtgaggtgaatagatggggggaggagaaatagggtgaaggagtaggtatgggggcgcacactgatatggaaggattggtgaagagatgtcagaatttctttggtctgctcttaggggaggacgagcttttgatttttgactatccagtccccttgaaaggaggctscttgctgtatagcaaagctttctcggtgggagagttcttgggtaggattgctgggataacaggaaggagaggggcagaggcagaagaaagggaggcttcttttgctgcctcatcggcctttctgttgcctcgagatttcatctgaacctgttcgatgtcctcaacagtgtataactcctgctttagctgggaggtgtgtggcctgaaggagttagtaaataaggtggccattagtgataggggttcctttggcagtaaggagtcctctcttttgccagatagcagcgtgggaacgaggaatgtgataggcatatttggagtctgtataaatgttgactcgtttgcctttggaaagatttagggccctggtgagagctatgagttctgctttttgggaggag

SEQ ID NO: 731658 - DNA, 562 bp, Homo sapiens
taaaatatttcaatcattttaagctaagaattatacgcaacacacttatgattttagtgtagttcttaaattaatgtgaaaattaagtgttcatggctctatagaccctgcatcatttacttaacgattatatgaatcttaggcatttggttgtgaccaaactttgtcttttaagaatattgcagtgactacctaagtrtatatattgtatatattcccttaaataagactgtcagttaaggagtataactatattaagatgtcttcatacgtattcacaaattaatttccatttgttcatacaacaaatatttattgtactcctgcgatgcgccaggcactaaatgtttgcaccagttgctacttccttgtacgagcactgtgttccatcgtgactttacagagccctgtcaaaatctgttgatataatacctttttgaaacttctgcgtttaatagtggtaggtggtatctctgagttttcatttctctgatttcctggaatattatacatattcctccagtaattttagatttgcatttaaatctatctaaaggctatc

SEQ ID NO: 731659 - DNA, 609 bp, Homo sapiens
aaccctatcatctcttgctttaattattacaatagtctccaatctacatgtccactggaggtaacacccacctcagtctatcctcaacacaacagcagacttgtctgtctgactttttttaatgcaatttttatcatattactcttctgcttagaaccctccaatgtctttacatcttaagccaaagttcttctaatgcccttcattatgtagtcctggttatttctttgtgttcatctccaactacccttttccaattactgggcctctccaaataatagagaaacctcatgaaggaagggattttgtcatgtgtttgctgttgtgtcccagtgccaaggagagtagctgatgtacagtagatgcttataaatagttttcaatgaatgacttcactccaatagtctgagagctgtataaaatatagataactyagttattgattcccactctggggagcccacaaaaatcaaagtcatccactagcagttgaagagaaccaagtttgatttctaggtaagcactaacttttatttataaattaacacctctgtggagtcatatgtacttccactgttttgcatctgtcaggaatgttaaaattttaag

SEQ ID NO: 731660 - DNA, 558 bp, Homo sapiens
accccagtgacctcaaatatttgataaatgcttagttgagctcaattttaaagtgatccttagagatgatacctgacaatatatggcatctctctacctctggagttaagcctgtttttgctaaatcccttgggttcaattcccaactatgctgcagtcctttgagaagctaattaaratgcctggctaatatgggaattgtggtctgaaaattaagagttagagtgtgcctcaaatcccagactgggtccgcccactgggaggtttcctaatattagatatgcccttaacacaaactgtttattcctaactatggtcttagttggaggagaattagaaaagtatatgtgaggagatctttgatggctcttacaagctatacatacttctagcaaaagtgtttttttaaaaagcttttggtcacaagtgttttagttttttttttttttttttttgcttgattctatttttagcaaaaaaagaaaaactgcattacaatcatttagcatgtacagtatctaaaacattttattgatcacagtacaaataaaaagatag

SEQ ID NO: 731661 - DNA, 651 bp, Homo sapiens
cctgttgccggaatgcttggctgatcctggagtatggtgagctgtgccctcaataacctccatccatctggctggccacatggtgccatgcagctggatcctgcatttttgtgagctgatcagcccgatgctggcactgaaaggattctgttgggagctgccatccatttagcctgagcggaactcagcacatgtgcgggcatgaagcccatcagctgatagcttctytttcagacctgatggctcccagccgaactttggcaagaaggacctaccagcctgctggagggctgacctgcctgcctttgctgggagccaagcacctcctggcagttctgggatttggttttcagtgggaggaggctctctgcaaggtagagtaagagcagtaattacttgggagaggaagcgtttaacttctgaggctgcaacacaatactatcttgttcgcggaggtggctgagttagaagattagcaattaattttttatcaggtgcaaactactcttcagtttcatggaatcaaacagtcctcccacagcaagggaggggcaggcttccaccccgtgtaatttttcagagcactgctgtttgtctgcttttgagctgataggaattatttacgagtctatttggaggacattttgacac

SEQ ID NO: 731662 - DNA, 571 bp, Homo sapiens
tgtggacagttttttgtttgcctctaatgcttgtctggaagttcggcatgctttaggctagatgctcggtcttaagcaaaggccagtctcagaatgaatattagccagagatttcctgagatacctagaactggtgagtccttgatgaggrgctccggtgcacgctgggccaggtggtggccactctgcctttgccctcatttcctgcttgctcagagcttcaaggtgagcaggagggagaacccagggccttcacaggcctttccgagcctgtgcgcaacatgcacggacatggccccttagaatctcagtccccatggacagctcatttcttagcttttctgtgtcagcgttctggtgagtcttttgtttgccactgctgtcactcaggcatttgtgatgttgaagtggttgacagactcattccccaaccaagtttttgccctgggagagattaggggaggtgaaatcaagacaggactttctttcttttcttttctttttttttttgagacggagttttgctcttgttgcccagtctggagtgcagtggcacgatcttggctcactg

SEQ ID NO: 731663 - DNA, 567 bp, Homo sapiens
tttgggggatggagaggatggtagattgaatacatacacctacctttttctttctgaaacctcatactgcagtgagaagtgtggtgggttttttttttttttttttttttttggcaaaggttcatgtgaataaggagaaagtaaagtcatagcattcctatttcagaagctggaatgtaattggagagttggtgatggacttagctgacttgaraaaaccaaatgctaatttgggagtggggaaagctgagagctagcttgatctgtgctgcagagttttgaccacgcttgggagctgtgactgcttacttccagagtggccacacgaggacataagagtgtgttgtgagccggctgctcagaggccctggtccttgctcagcccagtgcagccggggcgggcattaggcgtgctgagcaggcggtaaagccgatggtcgtgcacttggcgcttttcgggacggggtgccttatggactacggtaagtgaactctgtgtgaccgccgagatgaccagctttgtccccactcagcattgagtctgggctggtggagcgttgtccacta

SEQ ID NO: 731664 - DNA, 544 bp, Homo sapiens
tgctttttactctttggtagagttatggattcactaccagattctactgtatgctcttgacaactatgaccacaatgggtgagttgactgatctaagtggtgaaaaatactgggagcatcaatggcaataacagctttctatcagagactttaagcatctttggtaacattgtttttgaaccagagtggraaaaataagatcaggtcagaagaaggatgcttggtactcaaagattgtttgtgactctaagtaattagcagccaaaaccttaggaaactatcagaatgcctgtgtatgagactctcttcaagagtggtccaagagaggagagaatcctacttggagaaagaaggtggtagcattggacaggcagcagaggagccctcagcagcaagaaaggagctaagagaccctgtatctgtccctcacccttcagagctggtgccccaaactcaaagccatcatcacattggatggagcccctgcctcaggtttagtcacttgatcctatttgaggagaagcaaagatatctgtgactcatg

SEQ ID NO: 731665 - DNA, 612 bp, Homo sapiens
gtctaaagagacaggataacaaatgtgatgtgtgatccctggttggatcctaatctgaaagggaaaaataaagggcatgattgggacaactggggaaatgtaggtgataggggtaggttcttaggagttacatgctgaagtacttagggggaagtgtcccaatgtccacagctttccctccaatggctcaaaaacaacaacaaacatacacacagaggaagaaaacaaatgccgtcagacaacaactggctatcaaggaaaggaaatacaagtgtccactgcatgattcttaaaacttcctattgatttgcaatgtctctaaatgaagagctgggaaagggggaagtgatgctgagggctccatgcacacttttctttttccctcacgtctgctcaggcagcatgggcacatagcccacaggtcckcagcactcacctggctgcagcaccctgatcaccagcaggttggaggtcctctccgccagttgcgtccaggtgttgttgtagttcttccaccacagctctgccacacactggtacttgcctgcttccgtgtcactggctcggctgatgattaggcggacgttgttgctggactcagccttctcggtg

SEQ ID NO: 731666 - DNA, 612 bp, Homo sapiens
gtctaaagagacaggataacaaatgtgatgtgtgatccctggttggatcctaatctgaaagggaaaaataaagggcatgattgggacaactggggaaatgtaggtgataggggtaggttcttaggagttacatgctgaagtacttagggggaagtgtcccaatgtccacagctttccctccaatggctcaaaaacaacaacaaacatacacacagaggaagaaaacaaatgccgtcagacaacaactggctatcaaggaaaggaaatacaagtgtccactgcatgattcttaaaacttcctattgatttgcaatgtctctaaatgaagagctgggaaagggggaagtgatgctgagggctccatgcacacttttctttttccctcacgtctgctcaggcagcatgggcacatagcccacaggtcctcagcactcacctggctgcagcaccctgatcwccagcaggttggaggtcctctccgccagttgcgtccaggtgttgttgtagttcttccaccacagctctgccacacactggtacttgcctgcttccgtgtcactggctcggctgatgattaggcggacgttgttgctggactcagccttctcggtg

SEQ ID NO: 731667 - DNA, 517 bp, Homo sapiens
ctgcagtctgaagaaaggaaaagaatagatgaattgattgaaagtgggaaggaagaaggaatgaagatcgacctcatcgatggcaaaggcaggggtgtgattgccaccaagcagttctcccggggtgcctttgtggtggaataccacggggacctcatcgagatcaccgacgccaagaaacgggaggctctgtaygcacaggacccttccacgggctgctacatgtactattttcagtatctgagcaaaacctactgcgtggatgcaactagagagacaaatcgcctaggaagactgatcaatcacagcaaacgtgggaactgccaaaccaaactgcacgacatcgacggcgtacctcacctcatcctcatcgcctcccgagacatcgcggctggggaggagcccctgtatgactatggggaccgcagcaaggcttccattgaagcccacccatggctgaagcattaaccggtgggccccgcgccctccccgccccactttcccttcttcaaaggac

SEQ ID NO: 731668 - DNA, 517 bp, Homo sapiens
ctgcagtctgaagaaaggaaaagaatagatgaattgattgaaagtgggaaggaagaaggaatgaagatcgacctcatcgatggcaaaggcaggggtgtgattgccaccaagcagttctcccggggtgcctttgtggtggaataccacggggacctcatcgagatcaccgacgccaagaaacgggaggctctgtacgcacaggacccttccacgggctgctacatgtactattttcagtatctgagcaaaacctactgcgtggatgcaactagagagacaaatcgcctaggaagactgatcaatcacagcaaaygtgggaactgccaaaccaaactgcacgacatcgacggcgtacctcacctcatcctcatcgcctcccgagacatcgcggctggggaggagcccctgtatgactatggggaccgcagcaaggcttccattgaagcccacccatggctgaagcattaaccggtgggccccgcgccctccccgccccactttcccttcttcaaaggac

SEQ ID NO: 731669 - DNA, 589 bp, Homo sapiens
tttttcaggggaaagtatcagatcacccacctggtgattgtaacaaaaacaatcactcctgttgatatttaagtcttaattaattcagaaaaatttgcacacaccttaaggtcagatagtattttgtaccctacatataaaaactcctttttttttttttgtttagatggagtctcactctgttgcccaggttggagtgcactggcgtgatctctgctcactgcaaactccgcctcccataacattaatgatcactgatcacagatcaccgtaacraatataataataaggaaatattttaaaaattgtgaagattaccaaagtgtgaaaccaagacacaaagtgagcaaaggctgtttgttaaatggcaccaatagacttgcttcaccagggttgtcacaaacatctcatttgtaaataaaagaaaaaatgttcctatctgtgaagcacaataaagagaagtgcaataaaatatgtttgtattaatttggttaactttattccaacttaatgtaaattagttttaaaacagtttataaaattctaaaatgaacctggcaaatttagagcaataataaaatgatttaaa

SEQ ID NO: 731670 - DNA, 655 bp, Homo sapiens
catgccaggcacccagcactggctcttcccagacatggagtgctcagtaaccgtgagctattagaatacaagtgcccaaccagtgcttgagcaattgtgttctgtgtccaacagaactcaacaaaatcccacgtttgtctttgtatgtgaattcagttccttttgagacagtaagaaattatgcctgtgttggggtaactgaactttcaggaggagggaattgtctgccacaattattctctgaacttaatgtttccatgtctttttcttcattttggaagttgtggraaaattataatgaaagagtatataaacgttttcctctgtattatagcatctctgacagtttcctttattaaaaagtatgttacattagggagagacttgatgaatttaaaattaaagtttgaaaagtgttattgactataagtgatcttcagctgtgcagttttcaacttgaggttgtcagaatgtaatattacacattatattacacacatctacagaatccaaattgtgatgttcctggagtattggaacaatacctatgactttttgtttctattgatttttaactcttctaataaccacttctttaagaaaagtcatacattatcactttggtgtatcagaaacaaattccttacgcaataaa

SEQ ID NO: 731671 - DNA, 493 bp, Homo sapiens
agcatacttctttctcattcacctactgggatctagaaaccctgttaatgcaagaaaaaaatcccaaacctcaataaaataacactctgtttgtctgaagtgtggaaacacaacacatttcctctcaactggtggtcgcagatcgaccatcacagtgtatggatgtgtttggaggtgtaggaatrggactgcactgaggctctagaaggccagcaggtggggcagactgaatggagggaggggactggcattcagtaactactggagcatgggaagagtgaggtagactgtccatctggtgaaggtggctgcttccttgaggtttgttactttctgtaatgttaattccctcaacttttaaaatttgatttttagacaagttatacattcaaatgatttaaaattggaaaataataaaaaggtaaacagtgaagtctctccctttcccctgccttcatgcccccagtttacatctccagaaacctcagaggtt

SEQ ID NO: 731672 - DNA, 539 bp, Homo sapiens
tttgtagataaggtggttatcacacatgctcaagaaagacagagactaccattcaatccagcaatcccactactgggtatttacccaaaggaaaagaagtcattatatgaaaaagacacttacacatgcatgtttatagcagcacamtacacaactgcaaaaatataaaaccagcctaaatgcccatctaccaatgagtggataaagaaagtgtggtatatatacacatagaatactactcagtcataacgaggaatgaaattatgacatttacagcaatgtgaatggagttagagaccattattctaagtgaagtaactcaggaatggaaaaccaactattgtttgttctcacttataagtgggagctaagctatgaggatgcaaagggataagtaatataatggactttggggactcagggggaatgtgggagggagatgagggataaaagactacacattgagtacagcatatactgcccaggtgatgagtgtatcaaaatctcagaaatcaccactaaagaacttatccatgtaa

SEQ ID NO: 731673 - DNA, 539 bp, Homo sapiens
tttgtagataaggtggttatcacacatgctcaagaaagacagagactaccattcaatccagcaatcccactactgggtatttacccaaaggaaaagaagtcattatatgaaaaagacacttacacatgcatgtttatagcagcacactacacaastgcaaaaatataaaaccagcctaaatgcccatctaccaatgagtggataaagaaagtgtggtatatatacacatagaatactactcagtcataacgaggaatgaaattatgacatttacagcaatgtgaatggagttagagaccattattctaagtgaagtaactcaggaatggaaaaccaactattgtttgttctcacttataagtgggagctaagctatgaggatgcaaagggataagtaatataatggactttggggactcagggggaatgtgggagggagatgagggataaaagactacacattgagtacagcatatactgcccaggtgatgagtgtatcaaaatctcagaaatcaccactaaagaacttatccatgtaa

SEQ ID NO: 731674 - DNA, 558 bp, Homo sapiens
gtgtgtctttgcttttaaatgctgcagactaaaaaaacgtttgggttgattcaggccccacagctcactattgaataatcgcagatatgtgatttagacacacaggtgggtattcccgagggaacagccagcctgatgggctggataaaagtcctgtaaggtctgtttaccctgagaaggcagactgctcaactccacccacaaatgccaagtggayaccccaggtaaggcagctggtgagttttgtatccaagccatgtaggactggctaatttataatgacagggatattcacccactgaatgtgcccattctccaggtcatggtaaatgctgtggttaaggggaccccttttgcttcggcacctcattacagccgcaaaaccaaaagacagtccaggaagccttacctaaatttgctgtctcaatttcccatttgctaacttcaatgtccaaaacactgatggagtgaaactcaaaggaaaaaggaaaggagagagtcaatggaaattttgaaaataattattaagaaatgcagtgagtaaaatgaaaattaatg

SEQ ID NO: 731675 - DNA, 612 bp, Homo sapiens
cactcactcattcattccctcaaacattcattcacaaagtatttataaaacacctgtcaggactcttgtggacattaggaattcagcaggggaaaaacaatcaagaacctgccttcctgaggcttacattctggtgaggaggcagggatgaacagacaataaacaagtagatgtgtcacctaatatgtatctggagctgaaaactgcttttaagaaaaataaggcagataaaaggcaaaaaatgattagtttaaatggaggaaagagaaaggccagtctgaggaggtgtcatttaagaaagatcaggaggaagwgagagagcaagccttctaagtactcaagggaagagcttttcagcaggaaggagagcaagtttggaggtcctgagtgagggtgtgtttggccttccaaggaatagcatgaagactcagagtggctggagagaagtgagatgatgggagggcacagagaggactggaaaggaaatcaaagaccaggcattggacctttgggcagtgacatgatgggagcctctgaaggatgaaagctgaggggaggcatgatctgatttccattttaaaaggatccctctggctatggtgttgacaatag

SEQ ID NO: 731676 - DNA, 503 bp, Homo sapiens
tgcagcgagctgagatcgcgtcactgcattccagcctgggcgaccgagtgggactttgtcttcaaaaaaaaaaaaaaaaaaaaaaagatatgattcattgggtttcattacttactttttattgtttttttttttgttttttgttttttttttttttttgagataaagtcttgctctgtcacccaggctggagtacagtggccagatcacagctcattgcagccttcaacttccgggcttaagcaatcctctcacctyttcctcccaagtagctgggactattgacatgtgtcaccatgcccagctagtttttaaaattttttctagaggaggggcctcatcatgttgcccaggctggtctggaattcctggcaatcctcccacctaccttggcctcccaaagtactgggattataggtgtaagccaccttgtttggcccattatttatctgtttgtatagacatgtggcttaatttataaacactcagatatttgtaaagaa

SEQ ID NO: 731677 - DNA, 580 bp, Homo sapiens
agctcttgaaatgaatgcagtttatctcacacggcctcgcccgcacatgaacatagatggacccaatcgcatccctttcccagatgcagttaccttcggtgccgtctggctccgcctgctcctcacgctgcttctgcttgaacttcatgttcccataatgcatcacggctcccgtcagtttgtagatcccgactttctcctctgagctgaagcccaggatgtcaatggcattctggaaagaaaaaaaggacaactgtcatagcaggaatcagggatccatatgcagccttttcttggcaaagaccttacctcttttttgtatagcatatgagacagcatttgcccaaataagtggatgacaggtggggatgtggtaaattagaaaccatttgtttcacgtgtttgtgtgggtgggtgragactatgggaaaaagatgtgaattgtctgtttccttccatcaaataagaactgattacagtcgggcgcggtggctcacgcctgtaatcccagcactttgagaggccagggcaggcagattacgaggtcaggagtttgagaccatcctggccaacatggcga

SEQ ID NO: 731678 - DNA, 616 bp, Homo sapiens
ggtaatatatttaggggaaaaacaatgcaaaccttaaaatcaaaataacaccatcaacaagagcctaatattctctgattgagaagatgccaattcaaaatttaacccaatttcttatttactaataaagggtggcaggcagtatgggaatcacaattgctgaagggctatttcatgtcaggcattgctctaggtgccttgtaaagctaacttcatgccatcctttcaaccagcatgcaaaagtggagttggtattcccatgttatagacgaagcaacagagactcagaaaagttgagtgagttgctgaaggtcacacagttaataggagatagaagtggacattwgatacaggccagttggattccaaatcccaaggccatcgatcctattttatgttaacatggttgggtggagatgttaaccagagcctacacagcttactcatgacatagggaggagctgaagagtgagtccaggttgcagaatatgtgacaagaggagccaaggaatcagtcaactcccaagggcaaaagaatgatgttttcattcattaccattcaggaaagaaaacatatttctccttaggaaatcagagtcagaatccaagatagtga

SEQ ID NO: 731679 - DNA, 630 bp, Homo sapiens
gctgtgtcatatgaggaagaaactgaagagaagaggaggaggttctggcgggacacaaagagtattttcaaagtcgtataatgctgttggaatggaattggcccttgtgttgatctgagggcagaaggatggtcaatggagagattacagtgctttgttgygggtgttgccttgcttcatataaagagggaggaaccggcaacaactagagtctcaacaacagaacagctcgcatgtgcacacccgcacgcctgccccactgccacgctgcaggatactgaagtctttctcctttgggggagagagggtaagtaggtagcctccagcaactcttttcatagttacagccaatagtgaaggcaaccacatatcagcatttctcagtgctccctgccaaaagagtcacccctctaacaaactcggagcgggtgtgaaggattggtcagctccaggggcatgggtttctggtgttttacataaatgccctgaaatatcctgacattgtgtgggcctgttcccaggaagccagaacttcaccctcttgtattacgtgggggaaataaatgaggactattccaggggttctcctagtttacataatcccaaagagcctttatagtctgaacaccc

SEQ ID NO: 731680 - DNA, 557 bp, Homo sapiens
ccaatggttttctatttttcagtcttctcctgttgcaggcaggatttctctctcaaagcccagacaatgctatggataaaacaatcagcctttaaatgcctctggtgaatgctgctgtcactaacacagctcctgcagtgacggctcccaygtgttctgtgctcctgtccctagagagttgatgacaccaggaatgtggacggtaggctgacaggacagcactcgagaagcctgctcatgcaatcggagttgcttctattactgagcggtttctttgctgtcctggacctgacatctttcttcttaccatggatatttttctcccacaaactaagagagggttatacccccaaggcaggaggaccaagaccaaaaggtgatgaagacagagttggctttctaagctcttctctgtttcctcagtcatctctgtggatgtatatgatctgtgatgaagtgattctgatcaaggtgttagccaggtaaagttttctcttcccctggaaactgtggaataatggaagcaaagtaaagctagaatggtgaaatctcaggca

SEQ ID NO: 731681 - DNA, 605 bp, Homo sapiens
actgattatttttatacatgaattttgtatcctgaaactttactgaagtcattgattaggtctagaagtcttttggaggaattttaggggtttctaggtacaggattatatcatcagtaaacagagataatctgatatcctcttttcctatttggatgccttttatctctttctcttgcctaattgctctggctaggatttccattactatattgtattagtccattttcaccctgctgataatgacatacstgagactgggcaacttacaaaagaaagagatttattggacttacaattccacatggctggggaggcctcacaatcatggaggaaggcaaggaggagcaagtcatatcttacatgggtggctgcaggcaaagagagagcttgtgcagagaaacttccattcttaaaaccatcagatctcctgacaccattcactatcatgagaacagcccaggaaagacctgcccccatgattcagtcatctcccactgggtcctcccacaacacgtgggaattatgggtgctactagatgagttttgggttgggacacagagccaaaccataccatatgttgaataggagtggtgagagtgga

SEQ ID NO: 731682 - DNA, 624 bp, Homo sapiens
tgaccatcaaatcactgtaatcctgataataactagagtcaggagtatgaaagtgggaaggttggcccctggttgtattctgactgctcaaatcagtcctgtaaaattgaaataaacctacctgagccagctcctatccacctgataggatacaaagaagactcactggcctgtgggttcttacgtacaagctgctgtttttcccctctaccgatcatgggaatttccagttcaggagttttgttggcatgcygtcctggacagagtgagagcaggaggacctggccacacacgtgcttatatatcgctttcctttctccagttagaggttggaaaggtgcttatagaatcacaaaaataaagaataagaatgaaactaatttgaacttggttgtaagagggtttgtcatttactatatccttcctgtgtctaactcagagttaaaagaaaccacaacatttccccccaaaactgatgaagactaaataaaacactaaacatgaaaaataatcagaaaaaataagagttcattaagtggcttgatacaaaataaataaaaattgatagttttcctctatactagcaataaccagttagaaaacaaatacagaaatatttgtttc

SEQ ID NO: 731683 - DNA, 544 bp, Homo sapiens
ggtgctgttgctcaaaccctccacgtccaaagtgtcaaggatccgtcctgcaaagaacagatgtttttggggccgtcgaaatggaaaaatatcagaaatgcagctctgaagtgtatgctttagcattcgggggctagccacaagaatgaagccttagttttaacgcataatggaagtcagctgttggataattttgatatcctttgttggagattgatgtatgactttatatgcaccccatcctttggtcagaattttaggcaacstacaaggacaaaatatcaaaaacttaaaagtgcagcatgcaggctgggcacagtggctcacacttgtaatcccagcactttaggaggccgaggcaggaggatcatttggggtcaggagttgtagaccagcctggccaacatgatgaaactacatctctactaaaaatacaaaaattagccgggcgtggtggcacatgcttgtagtaccagctacttgggaggctgaggcaggagaatagcttaaacccgggaagtggagattgctgtgagctgagatc

SEQ ID NO: 731684 - DNA, 596 bp, Homo sapiens
aaaaacaacaaaaaaagcaccttccaatcagtccatcatattcacatgttaggagtattaactgttcttctttggtgtgtattcctttgtatgtaggtacacagatgcaaaagtgtatctttttttctttctagtacaaaaatagatttggttcatactttctataaggtatgtactcatctgcaactttctcttgtgttttttcctactactaggtagtacaccacaggaaccattggttttaacagattgcccatgtctgagtacactaaaactcatatgatcatttcctacatgtggtcacttagattctctttgatctttgtgcatctgtcttygcacactacaaatatttccacgggatattcctctacaggtagcatcactggctcaaaggcatacgcaattaaaattctgagacattctaggcaattgcccttcaaataaggctgtaccaagatatactctctcaacattttttgagaacattttcctccacaccttcaataactgtggatagtgttaatattttcaaattttgaggatcaggttggcagaaatacacaaacagaaatataccgtgtttaatttagaaa

SEQ ID NO: 731685 - DNA, 618 bp, Homo sapiens
acaaacattttttaatatattacatcttttccttcttttgcttatagaattgttgactatacatacagaaattgaatctaataaatttttaaaatactttaataaattaactttgacattgatgcagaaaacatatatgcatattgatatttatagatatacagaaaacaatatatatgattcagaatgattcagagagccatcacataggcgcacgatcagatgtgcatgtacatttttacctcttctaaaatatatataaaataaaattttctagtttgactatgtttatatggacaattcagtggcattaactacattcacattgttatccaagtactaagtttttcatagaggtaaccatataaatcattggaaaaaggatggtttactaatggtgccrggaccactgattttctaaatgagaacaaaataatttctttcttatataataaagaaaactaaatcctgtgacttaaagatccaaatgcaaaaagcaaatttttcacattgttaatgagaagaaaatacagaatatctttatgacttcaaattatgaaaggatgtattaaacaaaatacaaaaaatgcaaactttaaataaaaatacacatgaatt

SEQ ID NO: 731686 - DNA, 642 bp, Homo sapiens
gggctcccatggccagatctggaatagtgtaagcatcacaataaatagtgctagtaatggattatagctcattgaatacaacctgaatccctgagtcgtacagctagaaggaaaaaaggggccgggcacagtggctcacgcctataatcccagcactttgggaggccgaggcgtgcggatcgcctgaggtcaggagttygagaccagcctggccaacatggtgaaaccctatctctaccaaaaatacaaaaattagctaggcgtggtggtaggcgcctgaagtctcagctacttgggaggctgacgcaggagaatcacttgaacctgggaggtggaggttgcagtgagccgagactgcaccattgcactctagcttgggcaacaagagcaaaactctgtctcaaaaaaaaaaaaaaggaaaaaaggaagctgggagggaaggaattgttcttccttgcagcaaaatggcaactaatatggaagaaatggtagaattagaaaatcaccattttggccaggcacagtggatcacgcctataatcccaatgctttgggaggctgaggtgagaggattgcttgagcccaggtgtttgagccatattgggcaacatagtgagactttgtttgtatcaaaaaaaaagt

SEQ ID NO: 731687 - DNA, 642 bp, Homo sapiens
gggctcccatggccagatctggaatagtgtaagcatcacaataaatagtgctagtaatggattatagctcattgaatacaacctgaatccctgagtcgtacagctagaaggaaaaaaggggccgggcacagtggctcacgcctataatcccagcactttgggaggccgaggcgtgcggatcgcctgaggtcaggagttcgagaccagcctggccaacatggtgaaaccctrtctctaccaaaaatacaaaaattagctaggcgtggtggtaggcgcctgaagtctcagctacttgggaggctgacgcaggagaatcacttgaacctgggaggtggaggttgcagtgagccgagactgcaccattgcactctagcttgggcaacaagagcaaaactctgtctcaaaaaaaaaaaaaaggaaaaaaggaagctgggagggaaggaattgttcttccttgcagcaaaatggcaactaatatggaagaaatggtagaattagaaaatcaccattttggccaggcacagtggatcacgcctataatcccaatgctttgggaggctgaggtgagaggattgcttgagcccaggtgtttgagccatattgggcaacatagtgagactttgtttgtatcaaaaaaaaagt

SEQ ID NO: 731688 - DNA, 642 bp, Homo sapiens
gggctcccatggccagatctggaatagtgtaagcatcacaataaatagtgctagtaatggattatagctcattgaatacaacctgaatccctgagtcgtacagctagaaggaaaaaaggggccgggcacagtggctcacgcctataatcccagcactttgggaggccgaggcgtgcggatcgcctgaggtcaggagttcgagaccagcctggccaacatggtgaaaccctatctctaccaaaaatacaaaaattagctaggcgtggtggtaggcgcctgaagtctcagctacttgggaggctgacgcaggagaatcacttgaacctgggaggtggaggttgcagtgagccgagactgcaccattgcackctagcttgggcaacaagagcaaaactctgtctcaaaaaaaaaaaaaaggaaaaaaggaagctgggagggaaggaattgttcttccttgcagcaaaatggcaactaatatggaagaaatggtagaattagaaaatcaccattttggccaggcacagtggatcacgcctataatcccaatgctttgggaggctgaggtgagaggattgcttgagcccaggtgtttgagccatattgggcaacatagtgagactttgtttgtatcaaaaaaaaagt

SEQ ID NO: 731689 - DNA, 642 bp, Homo sapiens
gggctcccatggccagatctggaatagtgtaagcatcacaataaatagtgctagtaatggattatagctcattgaatacaacctgaatccctgagtcgtacagctagaaggaaaaaaggggccgggcacagtggctcacgcctataatcccagcactttgggaggccgaggcgtgcggatcgcctgaggtcaggagttcgagaccagcctggccaacatggtgaaaccctatctctaccaaaaatacaaaaattagctaggcgtggtggtaggcgcctgaagtctcagctacttgggaggctgacgcaggagaatcacttgaacctgggaggtggaggttgcagtgagccgagactgcaccattgcactctagcttgggcaacaagagcaaaactctgtctcaaaaaaaaaaaaaaggawaaaaggaagctgggagggaaggaattgttcttccttgcagcaaaatggcaactaatatggaagaaatggtagaattagaaaatcaccattttggccaggcacagtggatcacgcctataatcccaatgctttgggaggctgaggtgagaggattgcttgagcccaggtgtttgagccatattgggcaacatagtgagactttgtttgtatcaaaaaaaaagt

SEQ ID NO: 731690 - DNA, 593 bp, Homo sapiens
atcataaatttgtttgtttgttttgggtttggttttgaaatggagtttcactcttgttgtccaggctggagtgcaatggcaccatctcggctcactgcaacctccgcctcccgggttcaagctattctcctgcctcagcctcccawgtagctaggattacaggcgtgcgccaccatgcctggctaatcttgtatttttagtagagacggggtttccccatgttggtcaggctggtctcaaacttctgacctcaggtgatccgcccgcctcggcctcccaaagtgctgggattaaagatgtgagccaccacgcctggccccataaatttttatttttgtttcaaaccactacgttttgggataatttgctacacagcaataaacggaacagcaaccatgatagtaatagcagatttagacaaaagtcctcagtggatgcaagcactaatgggtaaagttttaaggaggagtgaagacttttacataaagtgtctcctctccaaatatgtgttaattactaagggaaaaatggtaacttcgcaatggcaaattctggcagaaatcaacttaagcgatcaaagtcagtatcatatt

SEQ ID NO: 731691 - DNA, 593 bp, Homo sapiens
atcataaatttgtttgtttgttttgggtttggttttgaaatggagtttcactcttgttgtccaggctggagtgcaatggcaccatctcggctcactgcaacctccgcctcccgggttcaagctattctcctgcctcagcctcccaagtagctaggattacaggcgtgygccaccatgcctggctaatcttgtatttttagtagagacggggtttccccatgttggtcaggctggtctcaaacttctgacctcaggtgatccgcccgcctcggcctcccaaagtgctgggattaaagatgtgagccaccacgcctggccccataaatttttatttttgtttcaaaccactacgttttgggataatttgctacacagcaataaacggaacagcaaccatgatagtaatagcagatttagacaaaagtcctcagtggatgcaagcactaatgggtaaagttttaaggaggagtgaagacttttacataaagtgtctcctctccaaatatgtgttaattactaagggaaaaatggtaacttcgcaatggcaaattctggcagaaatcaacttaagcgatcaaagtcagtatcatatt

SEQ ID NO: 731692 - DNA, 612 bp, Homo sapiens
acactgggagagatcataaatttgtttgtttgttttgggtttggttttgaaatggagtttcactcttgttgtccaggctggagtgcaatggcaccatctcggctcactgcaacctccgcctcccgggttcaagctattctcctgcctcagcctcccaagtagctaggattacaggcgtgcgccaccatgcctggctaatcttgtatttttagtagagacggggtttccccatgttggtcaggctggtctcaaacttctgacctcaggtgatccgcccgcctcggcctcccaaagtgctgggattaaagatgtgagccaccaygcctggccccataaatttttatttttgtttcaaaccactacgttttgggataatttgctacacagcaataaacggaacagcaaccatgatagtaatagcagatttagacaaaagtcctcagtggatgcaagcactaatgggtaaagttttaaggaggagtgaagacttttacataaagtgtctcctctccaaatatgtgttaattactaagggaaaaatggtaacttcgcaatggcaaattctggcagaaatcaacttaagcgatcaaagtcagtatcatattgagacaa

SEQ ID NO: 731693 - DNA, 621 bp, Homo sapiens
atagtcacaaagatcaggatcaatgacgagaacatcatggcaccaagtggacaaaataaggtgccagttgtgagtgacccgaaagagatgggcatggacacatagcctgacaaaaaattcaaatacttattttaagacaatgtagtggacttaaggaaaacacaaacaattcagaaatttatcagagaaccttagcaaggagattgaaataatgggaggaaaaaactaataaaaaagttgaagataaaaacacaataaaataaaaaaaatacagttgagagyattgacagaagtggccaagcagaaaaactcaaggacagatcaattaaaaatatacagtcagaagaaaaaaaaaagaaatctagaaagttcataggatttatgtgataacatccaaagaacaaatgtattagtcactggtgttcaaggaaaagctgggtgcaatggctcacacctgtaatcgcagctatttgggaggcggaggcgggtggatcacatgtggtcaggagtttcagagcagagtgcccaacatggtgaaactgtgtctctactaaaaatacaaaaattagtcaggtgtggttggtggacgcctgtaatcccagccactcaagaggctgaggc

SEQ ID NO: 731694 - DNA, 621 bp, Homo sapiens
atagtcacaaagatcaggatcaatgacgagaacatcatggcaccaagtggacaaaataaggtgccagttgtgagtgacccgaaagagatgggcatggacacatagcctgacaaaaaattcaaatacttattttaagacaatgtagtggacttaaggaaaacacaaacaattcagaaatttatcagagaaccttagcaaggagattgaaataatgggaggaaaaaactaataaaaaagttgaagataaaaacacaataaaataaaaaaaatacagttgagagtattgacagaagtggccaagcagaaaaactcaaggacagatcaattaaaaatatacagtcagaagaaaaaaaaaagaaatctagaaagttcataggatttatgtgataacatccaaagaacaaatgtattagtcactggtgttcaaggaaaagctgggtgcaatggctcacacctgtaatcgcagctatttgggaggcsgaggcgggtggatcacatgtggtcaggagtttcagagcagagtgcccaacatggtgaaactgtgtctctactaaaaatacaaaaattagtcaggtgtggttggtggacgcctgtaatcccagccactcaagaggctgaggc

SEQ ID NO: 731695 - DNA, 558 bp, Homo sapiens
agatgcaaagggagaaaaaaactacaaggtactaatagaaaacttcagcaccttactttcagaaatgaatagatcatgcagacagaaaatcagtaagtaaacatcagattaaaatgcactgtagggcaaatggacaaaacagttacagaactatccatccaagagttatagaatacacattctttactgcatacatggaacattttcctggatatatcatacattaggccaaaaaacacatcttgatgaattcgaagagatcaaagtcatacagggtatctcttctaatatcactaattcataagtacatgaaaattaaattacatactcytgaacaaccagtgagtcaatgaagacattacacagaaaataccatatttcttgagacaaaaatagaaacagaacacatcaaaacctactggatatgaccaaagcagttttaaagggaaagttatggcaataaatgtcttcatcaaaaagaagatacgaaatacaccaaaccaaagaattagaaaaacaaaaagctaaaatcaaaagtaaaaaaagtcactaataaat

SEQ ID NO: 731696 - DNA, 628 bp, Homo sapiens
aaatgtcttcatcaaaaagaagatacgaaatacaccaaaccaaagaattagaaaaacaaaaagctaaaatcaaaagtaaaaaaagtcactaataaatataatcagagacaaaaaaggagatgtcataactgacacccagaaacaaattaatggtaagaaatcaaatcagcaataaaaagttacccattaaagaaaagcccaggacctgatagattaactgctgcattctacctaccactaaaaaataactactatcaattctttttaacctagtggaaaaaaataaaaaaaagaagatatgtgaactgttccagttcattctgtggggccagcaatatgctcaatacaaaaccagacaaggatacaacaaagaagagaaaactacaggctaatatacctgattaacataatgtaaaaatcctcaacagaatactgggaaactgagttataaygcacatttagaaaatcattcatgattttccatgatcaagtgagattacaggaatacaggaatggtttaatacacaagaatcattaagtgtcatacattacatcaacaaaataaataacaaaatctaggtggtcatttcaataaataaaaaagccatttgacaaaattcaacatctt

SEQ ID NO: 731697 - DNA, 630 bp, Homo sapiens
tttatttataaacaactttaaaagactatgaacaaggtataacaaacttctactttataaatactactacttctactgaacacaaagatatataattatagttttctccctatttaaaatatctattgattctggcataataatgtcatactcatccctcaataatcagtgtacatgtaaccagaaatcttttttattcatctagccaatgtaagtatctctgtgttttgcatgttaacactctatttattctgtgtttctagtgcttatcctcaaaatttttatagttctgttcacatatgaattctaccaatcagcactgtataaataatgaaacatataaaatgtgttaaataaatggatgtaaggtttatgctaaatttttcacatagtaagtgcttcaaaacccttattatttttccttaagcttttatgtgtkcatattttatctctccaactaaagaataaacttctaaataagaatagttttgtctataaattttatgcattttaacacattattaatctaaaaccttggactagagtttggaaattcttttatgtattcatttattgattcaaaaaataggtttccatgccattttttctaaaccttgtgcaagatgtagg

SEQ ID NO: 731698 - DNA, 519 bp, Homo sapiens
tcgcatattcagtatgttacttttctttagatcttgcttattcaatttttaatcaaaggcatgaatgaagatatagactgcaaacagatgttggcttatttaataccagactcaaaaataatatgcctaagtatataaaaccaaawgtagtagaaacaagtatcaagttttattttagttttatgaaatgtattttttaagatgtttaaacttgaaacgcatgtcacagtgttatgtaagttttggttcatttgtctcgctctgcttctgtataataggtataagatgatctttcagaattcttagcaactgtatagtacttatctcctagaacttgttcaataataattgttagatggattcatagactaaagaattaatagatatagattgaaaactaaagcattttattttacaaagatcagaattaatttactaaaatctaaatttctgctagtaatattaaatacatgtggataaactacaagaatgataaaaatattgcattgtaagagtcat

SEQ ID NO: 731699 - DNA, 519 bp, Homo sapiens
tcgcatattcagtatgttacttttctttagatcttgcttattcaatttttaatcaaaggcatgaatgaagatatagactgcaaacagatgttggcttatttaataccagactcaaaaataatatgcctaagtatataaaaccaaatgtagtagaaacaagtatcaagttttattttagttttatgaaatgtattttttaagatgtttaaacttgaaacrcatgtcacagtgttatgtaagttttggttcatttgtctcgctctgcttctgtataataggtataagatgatctttcagaattcttagcaactgtatagtacttatctcctagaacttgttcaataataattgttagatggattcatagactaaagaattaatagatatagattgaaaactaaagcattttattttacaaagatcagaattaatttactaaaatctaaatttctgctagtaatattaaatacatgtggataaactacaagaatgataaaaatattgcattgtaagagtcat

SEQ ID NO: 731700 - DNA, 608 bp, Homo sapiens
ggtttctgctctttgggagaatgaccctcgggtgagacagtagtccttgggcacacaggcagacctgtcctcgagatcacggggggcacggctttgggggaactcacccgaacaccgtacgggcaggcctgaggctgggatgccgcactgctttccccggactccgtctgctgtttctgcatcctggtaggccctgcgtgtagcatggtgtcccgaatctgttttgtcgaccccctggattggtcaggctggagcctcgaccccgacgcactgccacggagggctcctgctttgtcaaggctcrgggaatcgtcctcagccaaccgttggagtcaccgtcacgggagaatgggctcgtgcctcccgcatgcgcattgcccaggccgactcctgctttgctcttcaaactccggctgtggcccctttaaacaggttcggcgacacgtggcgggggttctgtggcagtcgcagtggcggctggagtggggatgtagtagggggcgtttatgggactgggggcttcgggtcctccagggccggacccccgggagtcctgttctcagaacctccttgagccgacttctaccggtgcaggggaccccgcttca

SEQ ID NO: 731701 - DNA, 620 bp, Homo sapiens
gacattatcctaagtgaaataagccagtcaaggccaagcatggtggttcacggctgtaatttcagcactttgggaggatgcggctgacggatcacgaggtcaggagttcgagaccagcctggccaacatagtgaaacgctgtctctactaaaaatacaaaaattagtcaggcgtggtggtgcatgcctgtaatcccagctactcaggaggctgaggcaggagaattgtttgaaccccgggaggcagaggttgtagtgaaccgagatccttctcagaaaaaaaaaaaaaaaaagccactcaaaaaaaggacaaatactctgatttcacttatatgaggtatttagaggagtcamttcatagagacaaaaagcagaatgatgggtgccaggtgctaatgggtggggggaatggggagttagagtttaacgaacatagggtttcagttttggaagatgaaaagagttttacagatggagggtggtgatagaggcacaacactgtgaatacacttaatgcacttaaaaatggttaaaacgttaaattttatgttgcatatattttctacaattaaagaaaaaaaaagcgttgtggaagtcaaggatccagcccagccttctggc

SEQ ID NO: 731702 - DNA, 606 bp, Homo sapiens
gatccgcccaccttggcctcccaaagtgctgggattacaggcatgagccaccgtgctcagcccaggtcttagcttttcatctgaacatgagaataccatgtatctgggttcttttgaaaaagtgaatgagatgtcatgattaagcattattagtattattgttagcacagtaagtgctaagtaaatagtgcatttttgcaacgtacattgacatttatttcaaaaaaagaaatcagcagtttcatctgctattgactgtcttaaaggtacaaatgcctttggtaggccgaggcgggtggatcacaaggtcaggagattgagaccatcctggctaacatagtgaaaccccgtctctactaaggrtacaaaaaattagccaggcgtggtggtgggcgcctgttgtcccagttactcacgaggctgaggcaggagaatggtgtgaacccgggaggtggagcttgcagtgagctgagatcaagccactgcactccagcctgggcgacagagcgagactcagtctcgggaaaaaaaaaaaaaaaaaaagatacaaatgcagggagaaagaaggatcatagattagaaatagtggctgattttagaaaagaa

SEQ ID NO: 731703 - DNA, 632 bp, Homo sapiens
ttcaagtcaacagaaatatcaaaccaaaagggaccgattcctcattaggaagacaacccaagccatgatgggaattttaaccaccaaactacaaaatggactagcctccatgttaatcctgaatggagttcaaagtgggcagtttgagtgtaactgttttaggtcagatttttgatctttgacttagtcaagataatttttaagggtagccatgacactattatagctccttcttttaatttgatcttcccaccaattgttaagaataagagatctctaaaatccctttctttattgttaagaataagagatmtctaaaatccctttctttaaaaaggattcaggtgtccaaaggatcaatcttttggtcattgacaattagaattttcagtggtatatttaatcccaatagcagctcaattcagtagctcactcaatttcagtgagtgacatcaatgaacagccacatgcttctaatagtgtacacaccatactctggggaacatggcctccatatagaccaacttggtatccaaaaaggaaacgaagtctgtttgtatgatcccttcttaggggatgcttgtcattgtctgaccattgctgaattctttaattttccattgttatatagc

SEQ ID NO: 731704 - DNA, 604 bp, Homo sapiens
gtctttaatgacctctaattttctgactctaaaaaatcttttttaaagaaaaggatcagattaatgtcactctacatttaattttttaaaaggcattttcaaatgaaagaagccagacatagtttaggatttacgcttgacaaaaccaagcccaactcaagagaactgaaagcagagactcaaacctgtgtttgcacaccggcatttacagcagcattattcattgcaggcaaaaggtggaaacagccsaaattgatggaagaatggataatcagaatgtggtacacgaatacgacagaatattattcacctaaaacaggaatgaaattttgacacatgctacaaaatggatgagcctggaaaacattatactaagtgaaatgtcagacacggaaaaatactgtatcattgcattcacatgacctacctaaatagtctaataaaaaacacagaaaggagtggggtggttgccaggggctggggcaaaggaaataaggagctattgtttaatggcatggacttccagttgggatgatgaaaaggttctatagatgggtaatactggtggttgtacgacaatgtgagtatacttaatgccatagaa

SEQ ID NO: 731705 - DNA, 604 bp, Homo sapiens
gtctttaatgacctctaattttctgactctaaaaaatcttttttaaagaaaaggatcagattaatgtcactctacatttaattttttaaaaggcattttcaaatgaaagaagccagacatagtttaggatttacgcttgacaaaaccaagcccaactcaagagaactgaaagcagagactcaaacctgtgtttgcacaccggcatttacagcagcattattcattgcaggcaaaaggtggaaacagcccaaattgatggaagaatggataatcagaatgtggtacacgaataygacagaatattattcacctaaaacaggaatgaaattttgacacatgctacaaaatggatgagcctggaaaacattatactaagtgaaatgtcagacacggaaaaatactgtatcattgcattcacatgacctacctaaatagtctaataaaaaacacagaaaggagtggggtggttgccaggggctggggcaaaggaaataaggagctattgtttaatggcatggacttccagttgggatgatgaaaaggttctatagatgggtaatactggtggttgtacgacaatgtgagtatacttaatgccatagaa

SEQ ID NO: 731706 - DNA, 596 bp, Homo sapiens
gagttagaggcttccgtccaagtcctttccaaaggcaaattaccatgcctctccttgaggcctgtgttcttgtcaagcccaggagccctgcaggatgtgatcccccaaagcaggccacctgccaccatgcacgcccacctccagagtccctgcttttcctagaaaggcatccaggacttctgtacatgaacctcagcctgcctggctcacagcatccctcctctcccctcctatcaacaaggctgttatcaaaataatttttttgtttttgaggctgagtctctctctgttgctcagactggagtacagtggagctatctcggctcactgcaacctccgcctcccgggttcaatctattctcctgcctcaacctcccgagtagctgggactacaggtgccyaccaccatgcctggctaatttttatatttttagtggagatggggttttgccatggtggccaggctggtctcgaatttctggcctcaagtgatctgcccacctcggcctcccaaaatgctgggattacaggcgtgagccaccgtgtctggcccaaaataaatttttaaaaaattttcatcaattatttatttatcc

SEQ ID NO: 731707 - DNA, 596 bp, Homo sapiens
gagttagaggcttccgtccaagtcctttccaaaggcaaattaccatgcctctccttgaggcctgtgttcttgtcaagcccaggagccctgcaggatgtgatcccccaaagcaggccacctgccaccatgcacgcccacctccagagtccctgcttttcctagaaaggcatccaggacttctgtacatgaacctcagcctgcctggctcacagcatccctcctctcccctcctatcaacaaggctgttatcaaaataatttttttgtttttgaggctgagtctctctctgttgctcagactggagtacagtggagctatctcggctcactgcaacctccgcctcccgggttcaatctattctcctgcctcaacctcccgagtagctgggactacaggtgcccaccaccatgcctggctaatttttatayttttagtggagatggggttttgccatggtggccaggctggtctcgaatttctggcctcaagtgatctgcccacctcggcctcccaaaatgctgggattacaggcgtgagccaccgtgtctggcccaaaataaatttttaaaaaattttcatcaattatttatttatcc

SEQ ID NO: 731708 - DNA, 697 bp, Homo sapiens
tggctcacactgacatgtgaaaactcaggaaaatactatagaaccaacatgacattacagtgtttccatattttctggccagcctctcccagacactcattaccagacatgcaagggagttttgaggataagcccccactcagctacacactgtgctatgaactcagcccccaagtgggctgggttctctggggctcagttgggtctcctgtgtcctttggggagaagagatctcccttttcaagattggaccatgctccaaggacagaagccaggtgtctggctgtctggtacaatcagtagcttttttcaggattcaggaaaggctcagagggtgataactaggtctgggagtctgcagacaggagaactcacctgctaactgacgcacagggatgcagtcccatggagaaatagctagtgcctcatctctaggaggattccartaggggcagcatgatagccaagcagagatgttgtgggataattcatttatttagttcagctcctactctctatcagaccctgtgcccagtgcttggaatacagtggtgagtaacatacaagcctgtcttcaaaggatcttagagtcttaaatgggaaagctagacacacacagttaatagataggcctgggccaggggacagagataaggctggggcagagaggaaagtgatgtaatgggtctctagtttc

SEQ ID NO: 731709 - DNA, 637 bp, Homo sapiens
ctgtgcccaaggcacagttgtggcaccttggaagtttttttttgttgttgttgttgttgttgtttttgagacagagtctcgctctatcgcccaggatggagttcagtggcatgatctcggctcactgcaacctctgcctcccaggctcaaacaattcttgtgcctcagcctcccaagtacctgggattacaggtgtgtgccaccacacctggctaatttttgtattttttagtagagatggggttttgccatgttggccaggctggtcttgaactcctggtctcaagtgatctgcctgcttcagcatctcaaactgctgggattataggcgtgagccacygcatctggccctgcatcttgcaagtctttgagctggataagtgatgcattagctggcctctaagggctctctccattctaaaattcttgtactcctggtctagatccatggctttctcaccgtggcccccttcccaaggtgggtggtctcaccctaactcactctgcacagtgtacctttaccatggcacttatcacctccaccaaagttgcgcccaggctcttagtgaggggagtggctggacccattcagggtctctgggaacaaaggagaggctcataaagagtgtgattaatt

SEQ ID NO: 731710 - DNA, 632 bp, Homo sapiens
ttgcccgtgatgaccttaagctgtcgtttagcctcagctagaactgtaattctctagattgcattgtttctgtatagaattgtgacatttcagtttccctttcttcatttaaaaagacaccttttttttttttttttttttttatgagacaaggtcttgcyctgtcagccaggctggagtacagtggcctgatcatagctcactataacctcgaacttctggctcaagcaattcccctgcctcagcctccagagtagctgggactacaggcatgtgccaccacagccagacttttatatttattttataaaaataaaaaaatatgttttattttgtagagacagggtctttgttgcccaggctggcctcaaactcctggcatcaagcgatcctcccacctgggcctcccaaagtgttgagattacagcatgagccaccacacccagactaaaaggcagtttgattttacaaatcaaaatagcagtaacctatggagatttacttgtgagattggtaggaaacatcttaaatgtaatcaaacaataacttacatcttgatgaattcacgtgtaggtttctcttcctcagaagaaatcagatgctgttcagagcacgaaggctagaattttacc

SEQ ID NO: 731711 - DNA, 632 bp, Homo sapiens
ttgcccgtgatgaccttaagctgtcgtttagcctcagctagaactgtaattctctagattgcattgtttctgtatagaattgtgacatttcagtttccctttcttcatttaaaaagacaccttttttttttttttttttttttatgagacaaggtcttgccctgtcagccaggctggagtacagtggcctgatcatagctcactataacctcgaacttctggctcaagcaattcccctgcctcagcctccagagtagctgggactacaggcatgtgccaccacagccagacttttatatttattttataaaaataaaaaaatatgttttattttgtagagacagggtctttgttgcccaggctggcctcaaactcctggcatcaagcgatcctcccacctgggcctcccaaagtgttgagattacagcatgagccaccacacccagactaaaaggcagtttgattttacaaatcaaaatagcagtaayctatggagatttacttgtgagattggtaggaaacatcttaaatgtaatcaaacaataacttacatcttgatgaattcacgtgtaggtttctcttcctcagaagaaatcagatgctgttcagagcacgaaggctagaattttacc

SEQ ID NO: 731712 - DNA, 664 bp, Homo sapiens
tctgaagcatgttctttttcactttcttagccataaactctattacctattgatgaggaaaataaattaagactagaccgtgctatggaagtataatagatctagtcagtggaatgcttctgcctcctttcaagtaatttatatttattttatttattcagtgcttattctgtgccagccattgttttaggcactgggtatacagcagagaacaaaacagaaaagcccctgccctcagggagctgacgtgtgtgtgtgtgtgtgtgtgtgtgtgtgtgtgtgtgtgtgtgtgtgtgtaaggagaacaaaaacatcagaaattctgtgctgtacctgcctctgacaggattcctcatgagtgggactggtcagcttggtctccctcactctctcaccccttaaagccaaggacacgtgttttcacacagctgtctccacttgggsgtattattaaggaaagagacagagacaggctcaatttctctctatatccaaaaataagtaacaggctgaggtaaaaaggttactcaggcaaggtacccatcaagcaggcaatacaccggtgcctgccttcttcatcccattcctgaccagatgctagatccaggcaaggctgaaatcctggcagtggaacaggggcagaaatggtgacagtccatggcag

SEQ ID NO: 731713 - DNA, 501 bp, Homo sapiens
ttaaggtgccttatatagagattcttcatgcccgctgagacgtatttgttttcttgtcttgaacaagggctagtttaaattgttgcagattgtgatttatagtggttttataaattctggtaggataaaattttacaaggcaaaaattaaaagtgtctttggactcttaattaggtatgttaacttggtttatttttcttcccccaaktaaattagatctctgctgcaagggtacaaaaacacatcttcctattcatgaaagaactttcaagattggttgagtcaacctgtatggaaacttgctaaatattttatagaaatatcagagaaaaggaaataattaaagatcaatagcaactgcctacgtacactactactaaatggaagagcaattctatggcttttagtatattcagagttgtgtatccattaccacaattgattttaaaacaatttccttacccctgaaagaaggtttgcatctcttagatgtcacctctc

SEQ ID NO: 731714 - DNA, 639 bp, Homo sapiens
gctaaagaaggaggtactcactaaccaggaaattcctggaaagcttcccatcttctggaaatctcaactgtcataggacttgaaagcatctccatgtataattagcctggagtgggtacttgccactgggtgggaccaaacctcagctgggagagatttggatagccttattagatcctctaaaataactggctggttagttacacatgcttgccccagtcagttaatgaacctttaaataatgcattctccattttatgkaattgaatttttggctcttcagagtatgaatattgttaactctgttaaagtcttataatttatccataactgtctacttcattctgtagtgctgcattataatttgttgcaatttaacaggtagatataatggataaaggttatattcacattatttccactgtggggtataacattaagtggtataaaaccaccaatgattctactcttttacaaaagattatttgtagttttagcttatgctgttgataccagatcactcatccatttatagtataaatatctactgagtgtcttttatatgccacccttgtgctaagcaatgtgggtaaaaatatgactatactatgacctctctcctagagaatctctgtcttt

SEQ ID NO: 731715 - DNA, 634 bp, Homo sapiens
cccaggatatccacgggcatctgggagatatagaccaggtactataatgagccttcagtacaataccctgtgtggggatgggggtcaagggaacaaccttactgtcattaggtctcacctctcttcttttccccaggatgtagaggtggagaaaacaaaccactttgcaatagtgaatttgagaacggctgcccccactgtctgtgtaagtgttgtacctgagccatggggaatagctttgtcattctttccattctactccatgtgaagtgacttgtgtcctatagcggcttgtgtsctgaggcctgtaacccacctgtaggtggccaggtgaccacagttattatattacccccacagctgtgtgtagtgaatcacaccaggcactcttttctttcagttacttgttctgagtcaggccgagaaggttctagaagaagtggactggctaatcaccaagcttaagggacaagtgagccaagaaaccttatcaggtaagataagttcaactgggattccaggaattgacatgagcaaggtcaaaattcatattgggtcggtgcataaaaatggagcccctgagctaaatttcttatttgcctttaagctagattttttcctatgtgatgaaaga

SEQ ID NO: 731716 - DNA, 624 bp, Homo sapiens
ggataatttcaaagaaaaaaaaaatcaaagagcaacactgcatcaattcctagttagtatgtcagataacacacactaagatgcaccttccttcaataactacaacattaacacaaagaaattcccttaaaaacataatactcatcaattgacagaaaaaggaaaaaaatcccatgatactcaatgtctttacttgtttgtacatataccttgaagagggattcttttccaggcagggacctggataggatgagatcacttayggaaaaaggagcagtatatcagctgagaaagaacattagggagaagaaacagcctaacatataaggcaattactatcccattttataatcctacacttatagtgaaaacagaggccctaatttttactaataatttcaaaatattttgccgcttataaacttaatttctttacggaaaaatacagagaagcatcaaaatgcaaaactaatgtctcaatcagtaactatagtctggatattatcatcaaataggattgttctgaggaccataaaagtatactaattgcttttataaatacagttgtaaaagcattctattcttaaactatttcaggtttaaacttggtcacaaatgccctca

SEQ ID NO: 731717 - DNA, 609 bp, Homo sapiens
ccttaggaacaacagaacatacatattttatggagtggttggagaaccatctcccctttagtagttaacgtactgatgagtgtccccattttcataagcaaggacatactaacactaagcagttgaaaggcctgtctcagaagcatcctgccccaggtagctgatcacggtggccccataccacgacacagcttttcttttggttggtcttgctgagtgccttctctagatttgggctgtcattcaagcctcttcatttacaatgttcattaaaaattcagtaccatacctgtcccactcccaaccattttttamttcctgattcttttgtttgccttgtgggtaaaatgcaaatgtgtccaaggtgaaaaagcaaaccaatcaatcaacctttgagttttttttccagcgccaggaatgtgacatgaacaaaggtcactgaagcagcatgaggagtaagttagcagggccctttgttgtgtgtgtatgagtgtgtgcctttacctaagctctgtccccttacggaaatggccgtagaaggcctagtgtgctggttgcgagaggttttccaacgtgattcttaccccaaatcataacaggttcattctc

SEQ ID NO: 731718 - DNA, 611 bp, Homo sapiens
ccccaaggcagcactgagtagcaatgcccctggccttgtccctgaaaccagtctgtcctcttaggcctctgggcttgcaatgggaggagtagcctttttctcattgtcttgactagtagcacctgcttccctttctgtcatgctaatctctccagcaagtggttgttcctcatgcctcttggattcttatcctttgggttcctctcctgaaatgttcttcccttctccaccatgagccaggctgcagactttccaagtttttacactctacttccctttaaattggaagtcccaaatttaagtcattcctttgtccyatatctgatcttagattggtagaagcagccttgccacttcttgaatacttggctgcatagaaatttttttttcctccagataccctaagtcatcactctgaagctcagccttccacaaagccctaggacattggcacaatgcagccaaattctttgctaaggtgtaacgagggtgacctgtgctccagctcccaataagttcttcattttcatctgagacctcatcaacctggccttcactgcccatatttctatcagcattttggtcataatcatttaacgaatctccagtac

SEQ ID NO: 731719 - DNA, 607 bp, Homo sapiens
atcccagctactcaggaggctgaggcaggagaatcacttgaaccagggaggtggaggttgcagtgagctgagatcgcaccactgcactccagcctgagcgagagagcgagactccacctaaaaaaaaaaaaaagaaagaaagaaagaaaggaaaagcaaatatggctgggcgcggtggctcacacttgtaatcccagcactttgggaggctgaggcgggtggattgcctgagctcaggagttcaagaccaccctgggcaacatggtgaaaccccgtctctactaatacacaaaaaattagccgggcttggtggcgcatgcctgtattcccagctacttgggaggctgaggcacgagaattacttgagcctyggaggcagaggctgcagtgagccgagatcatgccactacactccagcttgggctatagagtaagactccgtctcaaaaaaaaaaaaaaaaagaaaaaaaagaaaaaaagaaaagaaaacatgcatatatatacataatggaacactagtctgcctttaaaaagaagaaagtcctatcatttgaaacaacatggttaaacctggaggaatttatgttgtaaagcaagcaaagcacaa

SEQ ID NO: 731720 - DNA, 632 bp, Homo sapiens
cataagattataatactgtatttttcctgtaccttttctatatttagatatgtttagatacacaaataccattctgctacagttacctacagtattctgtacggcaacatactgtccaggtttgtagtctaggagcagtaggctataccacatagcccaggtgtgtagtaggctatactgtctaggtttgtgtaagtacactctgtgatatttgtacaatgaggaaattgtctaatgatgcatatttcagaacatatccccattggtaagcaacacacgaytgtattgttagacgttgttggatttgacttgccaaaattttgttaaggatttttgcatctattagggatattggactataattttctatattgtttttctattctcgatttcattaatttctcctctagcctctattatgtcctttcttctacttgctttagatttcatttgtttttcccacctgctgtgccttaggtggaaaattaggttattatttgagctctttcttctctctttatatagacatttacaactgtaaagttctgtctaagcactgctttagctgcatcccatatgtttttgtatattgtatattgtatcttcatgttcattcatctcagagtactttc

SEQ ID NO: 731721 - DNA, 599 bp, Homo sapiens
tcctctacttcattctgtagcctctgctttgtcttttcaagagaagcacatttggaattcacagcttctacatgttcttctgcatcctgcagacgctgggctagcttcttcctgaaaattgggtcagtatgagtgaccaagagcagactcagagtcaccacagtgccctttataaagctgctgactaggaaagcatatttccccaagagttgtctacaagttgttgaatttttctaaacattttcactctcttagaattctgttttccctgttgagttcttatttttatccatctcaggtattgccaaacatatttacgaagcacstgtgtgtgtgtatgtgtgtgtatgagagaaagagaatataagttagcactagagctgagtgagcaatgtgaaaatttgctcctctttctttgtttttatttcactaagctggccctctatagtgtggcacattttcttgaactttgcctggggtgagaagtagaaaacaggaagagacagtacatttctcttttgaaacctgggatttagagatctgtaactacttgtggaaaagggctgagttttatttactttgaggaagaaatggcaacc

SEQ ID NO: 731722 - DNA, 655 bp, Homo sapiens
tttgtgaattttaacctgagtattttaagttttcctaggtggcaattgcatttacgcttcctttcccactgcttagggtagggttcacacatacactttattgatatcaataagtatatgacaagctcccaagatacttttggaagtgtttaacgattgcttgatgagtgttaacatatctagatctgatgtaactattgcttcacccccttagtaatggggaattcagggcccattttctaggtaagtgatacagaggtttggtgtttattcagtagttatcatgaacggggaaagacttaatgactgcaacagttgaaggactaaccttccaatctttaagacgtgttgacatagcctgccttgttacacatgagggatgatgataaatgcacaatacactgtcatgggtacaccagggttaattacacaacccagaggaatagytgtaatttcatccctttctcccatatgcatgaaatagtgtaggaagaaaagtgagggagaattaagtttttagagggataaatgcgaatccatatgtgtgtgagtgataaacatttttctacaaactgctctacttattaataacagatcacttggaacatacctcacaaccaatcagaatatacgagtgtgtcaggaaacagcactg

SEQ ID NO: 731723 - DNA, 596 bp, Homo sapiens
caatacccaatggcaggggcggtgctccatccctgcagacgtcatcgagagcacacctggggtcgtctagggtcatggacctggccacagagcagaaactgggtcaacaggagtgcacacacgcacacaggtgcacactcacacactggaataaaacgaatttcgtagcaagtggtcacgtgcgcgtgggagcgcgcgcacacacacacacacacacacacacacmacacttgttgctgatctgctgacttatctcactgccatgaaacagcagctaagcctgtaattgctctgcctttccttggatttttcctttagtttctctgactgctgggttactggcctgtgtttagcttcatgaacatgggtttcactttatttttatggggttccagctcttgctcatggaatccctccctgcctgttctgcagtcttcccttgtttactgcctgtggacttcaagtatcagacacagagaaagatttgtagatactgtttactcagcccccacaatttccatagcaggtctcttaattcccatcacctccagggagggtcattgctgggatcctaggaatcaagtgccttgtcttga

SEQ ID NO: 731724 - DNA, 596 bp, Homo sapiens
caatacccaatggcaggggcggtgctccatccctgcagacgtcatcgagagcacacctggggtcgtctagggtcatggacctggccacagagcagaaactgggtcaacaggagtgcacacacgcacacaggtgcacactcacacactggaataaaacgaatttcgtagcaagtggtcacgtgcgcgtgggagcgcgcgcacacacacacacacacacacacacaccmcacttgttgctgatctgctgacttatctcactgccatgaaacagcagctaagcctgtaattgctctgcctttccttggatttttcctttagtttctctgactgctgggttactggcctgtgtttagcttcatgaacatgggtttcactttatttttatggggttccagctcttgctcatggaatccctccctgcctgttctgcagtcttcccttgtttactgcctgtggacttcaagtatcagacacagagaaagatttgtagatactgtttactcagcccccacaatttccatagcaggtctcttaattcccatcacctccagggagggtcattgctgggatcctaggaatcaagtgccttgtcttga

SEQ ID NO: 731725 - DNA, 566 bp, Homo sapiens
tcatggttgtattatgattatgtaggagagtacacacaagtattatttgtatgtttgtgtgtacctggagttgccagtggtgatgggacatcatgccagccatttactctcacatggttaaaggaaaaaagttctttgttactattcttacaaaatttgtttgtaaatttgacattattttaaaataaaaaatatcttagcattaaaaaaagcaagctgttcatmatgaccaaaaagtagaaacagcccaaaagtccatcaacaggtgagtggataaataaaatgtggaatattatttggcaataaaaaagaatgaagcaatgatccacgctacaagatgaatgacccttgaaaacattatatacgagtaaaagaagccagtcacaaagaagcacatattgtatgatttcatttatatgaaacgtccagaacagatatatctatggagaccagaaaatagatgagtgattaccagggaatgggggaagggggtaaatggagaatgaatgctgatgggtatgagtttctttttgaggagatgaaaatgttctaaacttgattgtggt

SEQ ID NO: 731726 - DNA, 557 bp, Homo sapiens
taaaaacatgttttaatgcccccttttctatcttgaaagaaaatccacaaataacttatgtatacatgtattttcaaaaaaatcagtataataatccttaatataaaggagaaatgtaaagtaaattatttaataaaataatattttttttgttttttgttttgttttttgagatagggtctcacgctgttgcccaggctgcagtgcagtggcaygatcacatgcaacctctgcctcctgggttcaagcgatcctcccacctcagcctcctgagtagctaggaccacaggtgcgctccaccatgcccagctaatttttgtattctttgtggagacagggtttcactgtgttgcccaggctggtctcaaactcctgggctcaagcgatccacctgcctcgatttcccaaagtgctgggattacaagcatgagccactgcacccggcttaataaaataatatgtattttaatatgtaaatatttgggaatgactgtgctagaggacataataaaatagtcagatgcctcctcctacatgtgcagtcatagtgaatgtgg

SEQ ID NO: 731727 - DNA, 594 bp, Homo sapiens
catgcatatttactacagcctttactgttctaaagatgttttgctttcaatcaaaagtcatgagacaccaaacacaagaccaataactcactgtcaagaaacaaagcagtcaacaaaaccagattcaaatatgacccagatgttgaagccatcacataggaaacttaaagtaactatgcttactatatattaaaggctagagtggaaaagatgaacaacatacatgaatagatgtagagttttagtagagagagggaaactacaagaaagagtcaaacagaaatgctaggagaaaaaagtgacagagacaaatacttttaactagctgatcygtaaacttgatacaatttaagaaggaatcagtgaacttgaaaataggtcaacagactttgggaggcagaggcagaggcaggtgggccaggagtgtgagaccagcctggccaacatggtgaaatcccatctctactaaaaatacaaaatttcgccaggtgtggtgcacacacttgcaatcccagctactcgggaggctgaggtgggatgattgcttgaacccaggaggtgaagtttgcagtgagccaagatcgcgccactgca

SEQ ID NO: 731728 - DNA, 650 bp, Homo sapiens
attgtagaattctactagctaaaatcatatttcaaatttttacatctgagctcctaagtctgtagatatattttttgttttattactgtattgggttttgacagcaaagccatgtgtttcataaaacaggagagctttctttccatatttctctatcatctggaatagtttaaatggtsctggaattattagttagataaaactcatttggatccagtctatttttcagtattatatctttatttatcatttcagtatcttttgtgatattaagtttatcctggttttccacttcttactagttttggtaatttatatttgctaagaaattttctgattcccctgaattttttggtttgttgccaatattcattcttttctctgttaactcctttcatattcttcatattgtatatttttgctcatttcccctttattcaggggcacttgtccattttattactgtttataaaaatacagcctttggacttatgttttctattctattgctttcagcttctatttatcaatttctttttttctagtttttttggttgctatttgctaccttattaaggagaaaaagtaatatattccttcacctcccccaaaaaaaattccatctgaaggcatttaaagcttacattttg

SEQ ID NO: 731729 - DNA, 606 bp, Homo sapiens
caatagaggcacacttgctgtagcatgactgaaatccttcccgttaagatccacaaatttccttccaaccaaattaaagctttccataggacttacacttttttttgaaatcacagaagtaatccatgctcattgtataaaacccccgaaataaatataaacaaagagaagaaagaaaaacataattaatctcagcctcaataaccaatagcattttagggaatgtcctttattaccaatttatttatacatgtgattgacttggtatactcttagtacatactctgttccaggcaccatgccaggttttgagtttgcaaagaagaayaagattttctctacaagacaaatatagccccctctctctgattatataaacacatgcatatataagttttataaaaaggtcatattttacaaacagtgggccctctgtgtctgccattctgcattcatgagttcaaccaaccacagatcaaaaatgtttggaaaaaatttttacagtacaatagaaagtaatacaaataaaaaccaatgtagtataacaactacttacatagcgattgcaatgtattaggtattatgagtaatttagagaagatctga

SEQ ID NO: 731730 - DNA, 623 bp, Homo sapiens
ctttgaatatatcatctcattttcttctggcctgtaagacttctgctgagaaatccaatgttagtctggtaaggttcccttctaagtgactatatgcttttctctcactgttttagaattctgtctttattactgacttttgacagtttggctataatgtacctcagagaaggcctttttgcttgattctatttggggtatatttgagctttctgtatctggatatctatttctcttgtaagacatggagacatgggaagttttccgctattacttcattaaatagcttttctatgtctttgctcatctcttctccttctggaaaacccaaaatttgaatatttggtcacttgattgtatcccacatgttcattcttttttattcttttttttttggtgggggagggtgsggttatttaaaagacctgcctttaagtttagaaattatttcttctgctacatctagtctattgttaaagttcttgattgcattcattgatttcttcagttccaggatttcagtgtggttctttcttaatgatatttatctctttactgaatttctcattcagatcatgaatttctaatttctaattttatgtttttctaacttatttgtattg

SEQ ID NO: 731731 - DNA, 495 bp, Homo sapiens
agatggggaaactgaggctcaggaaggcgatgcggctcacccaggttcatagagccagaaaatggcaaggctgggatcggagacaccaggcctgcgtgagtccagagtcagctcgttttttttttttgattgtttgtttgcttggtttttttttttttttttttttttgagacagggtctctgtcacccaagctggagtgcagtggcaggatcttggctcactgcaacttccgcctcctgggttcaagcgatstcctgcctcagactcctgagtagcggggattgcaagcgcgtgccaccatgcccagctaattttttgcatttttggtagagacagggttttaccatgttggccaggctggtctcgaactcctgacctcaagtgatctgcctgcctcggcctctcatagtgctgttgcccaacctcaaaaaacgaaaacgggaagtttttgtcaacaggagcgtgggaaccggaaatccttgcttccgataccg

SEQ ID NO: 731732 - DNA, 590 bp, Homo sapiens
tagctgggattacaggcacgtgtcactaagcccagctaatttttgtatttttaatagccagggtttcaccatattggccaggctgggctcaaactcctgatgtcaggtgatctgcctgccttgacctcccaaagtgctaggattacgggtgtgagccaccaagccagccacctctccgcttattaagcagatttttttttttttttttttttgagacggagtctcactctgtcacccaggctggagtgcagtggcaccatcttggctcactgcaagcttcrcctcccaggttcacgccattctcctgcctcagtctcccgagtagctgggactacaggcacccgccaccacgcctggctaattttttgtatttttagtagagatggggtttcaccctgttagccaggatggtgtcgatctcctgacctcgtgatcctcccacctcggcctcccaaagtgctgggattacaggcgtgagccaccgtgcccggcccaagttctattgtttgacagcagagcagagtgactataattaacaagactgtatgatgtatttcaaagtagttacaaaagaggacttcaattgttcc

SEQ ID NO: 731733 - DNA, 607 bp, Homo sapiens
tgcaaggtgctgagcggcatccctggccgccgcccctccctgccaggagctcccccaagttatgacaaccacagatgtgcccagacatcacccagtgtccctttgggttaagattagatcgccctgggtgagatcgtggctcagatgattatgactgattctacagcagtgtctcacgccacagagctagtgggtggatcggctggggctcgaaccctggactctgtgggtggatcggccgggtctcgaaccctggactctgtgggtgaagccaccgctctttctgccccacaactccctaaattcagcaactctcagggatgcaggcagccgtctgatcacaagcctagtgacacacgcttcccgggccagygctgctccaccacggggcccctccactgcctagcagagccacgtggatgctccaagtccagggactgctgacccatcttggttttgctcggcggggcacaaccccagggtcaccacacaggtccccccgcttgcttctcttccatttttagagacaggttctcgctctgctgctcaggctagagtgcagtggcaggatcatggctcacacttcagcctcgacctcctagctcaa

SEQ ID NO: 731734 - DNA, 515 bp, Homo sapiens
acgcactcataaactaaccctacaggggttcatgccgcagccctgtgaggctggcagggcaggctgaaagcgaatgctctcattcctgctaagtgatggtggacctttgctgtcattagtaaacaggcctggcatttgctggggccctggaggacctgctctcgtgaaactcatcatttcctggctggcgrgaggggctcacccgtgctgcacgtccagaagctgaggccagttgcctcgcctgagggtgggaggtaaaaggtacaagtctgggcttgaactcagatccttcaattctgaatctgctgcgtctgccactagggcagcgtttccactctctgcactgtggacatcggcgtgggtcactctctggggaggggccatcctgggcactgcagggtgctgagcagcgtccctggcctccacccactccatgccaggagcacccccagtcatgagaaaaacacaaatgtcccagacttggcccagtgtcccctgggggcagaattaccctc

SEQ ID NO: 731735 - DNA, 565 bp, Homo sapiens
cctgcctcactaatgcggaactcttctttcttcatttacctccaagcaaccctaaacataatgaaaatataaataatgaaattgtaaataaaaatcattatgtttcaaaatgctttccaaacacaaaaactaaattaacagtagaatgctctacagtccatgccctaattaaaccttagtgagttttatgagctaaattgtgcccacccacccccgccaaattcatgtgttgaagtcctaaccctcaatatcacggagtatctatwcttggagacaaggtctttagagaagtacacaattaaggttaaataaggtcagtagggtgcgtcctaatccaatgtgactggcgtgcttctaagaggagaacatttacacacagacacatacagagaaatgacgatgtaaagacacggggagacgatagcagtctatggaccaattgaataggtctcagaagaaaccaaacctaccaatacctttaatcttggacttttggcatctaaaactgtgagaaagtaagtttctgtttaagccatccagtccatggcactttgttacgacagct

SEQ ID NO: 731736 - DNA, 407 bp, Homo sapiens
ttcagagatgacacctcagctcagacctggaaggttctgcaggcaggttgtataagccacgttagctgctctaaagcctccatttcctcatctagaaaatggggacagggaggccctccctaacgggttgttctgaggatgaagggaggatgtggtcaagttcctgrcccaatgttttgcaaatagtaggtgctcgattattggcactggtattaggatcagggccaagagtagaaccttcaactccctgtcagctgggagagactgagatggatcacttatctgcacatggaacccggcgttgctgctggtgtgagccaagggggctcagggaagcctgttgttgagctgtgtctgatctgtggcttcctgtgcctggggcctgactcagcacattacctggttcc

SEQ ID NO: 731737 - DNA, 594 bp, Homo sapiens
gatgagagatgtataatctccaccctcacggagttgtcatcaccctggagaggaaggagacagccaaaagagagaagtattgtctggtagatttattagagtcacaaagtatcatccttctccagtgtgtaaggcgttgtctaaataggtccagttaaagcactgcagggtaaccatcttttaaaaaaattgttggccacatttttaagttcacaagggaggggaaatgtctcatactgtagccctcctgagtctaggccctctgtgagatgtgyccatttcttggacaccatatgagacattccccctcggattagagatgctcaacctgcattaacatatctaaagtctacatctggccactctagggtgagtcctgtttacagtgcccattcctggagcttgcctctgtttgccttttgtttgattacatgatgcattacttttcccaataggccagtgctagcatattggaagagtgatttaataagctggcaaccttgatgctatcctaccaatccaaccttatttgcctcatttaccatttccactattgtggcagccagccctccattccagccagagcagcccctc

SEQ ID NO: 731738 - DNA, 594 bp, Homo sapiens
gatgagagatgtataatctccaccctcacggagttgtcatcaccctggagaggaaggagacagccaaaagagagaagtattgtctggtagatttattagagtcacaaagtatcatccttctccagtgtgtaaggcgttgtctaaataggtccagttaaagcactgcagggtaaccatcttttaaaaaaattgttggccacatttttaagttcacaagggaggggaaatgtctcatactgtagccctcctgagtctaggccctctgtgagatgtgcccatttcttggacaccatatgagacattccccctcggattagagatgctcaacctgcattaacatatctaaagtctacatctggccactctagggtgagtcctgtttacagtgcccattcctggagcttgcctctgtttgccttttgtttgattacatgaygcattacttttcccaataggccagtgctagcatattggaagagtgatttaataagctggcaaccttgatgctatcctaccaatccaaccttatttgcctcatttaccatttccactattgtggcagccagccctccattccagccagagcagcccctc

SEQ ID NO: 731739 - DNA, 629 bp, Homo sapiens
actcaactctacttgctgtgtgaccctgcacaagtcacatcccctctctgagcctcggtttccttatctgcgaaagtggggcagtggttgcaggcttctcacagggctgtgcagattcaacaggaccacgaggcactcagctagaggtgggatccgtgtcagcacccatcaygcttggtcgttcaccatcatccccatcctcacactgtttgcaaaacttcgagtctggggtctctggagcacaggggcaagaagagccacatccccaggagagccacatccccagaaggtgtcccaaggttcatgttctgccaccgtttggatccagttgaattgcaaatgccagaaaaagcacaaataaggaatgatttctcttttcacctaagggaagctgccaggttggccattcagggttattttcccctccccgacaatcactggggcccaggccccttccacctctttgatcccccattcttatctatgacacctgcctcatggtccaaaatggctgcctgagcacctgccatcatctccatattccagctgacaggtagagaggagcatgtgccacttctcttgaaaggcatttccagaaaatcctgcttatttacgccatgggtcagcat

SEQ ID NO: 731740 - DNA, 496 bp, Homo sapiens
tgatttggaatgattttatattttggccggtttgtgtgtttcctgcgtgtctccctactctagctgtgcctcagtttgcctgtctgtaaatggggataataataatcgtggtccctgccgggcgtggtggctcacgcctataatcccagcactttgggaggccgaggcgggcggatcaggaggtcaggagatcgagaccatcctagctaacatggtgaaaccccatctytactaaaaatacaaaaaattagcgggcgaggtggcaggtgcctgtagtcccagctactcgggaggctgaggcaggagaatggcgtgaacccgggaggtggagcttgcagtgaactgagatcacaccactgcactcctgcctgggcgacagagcaagagtccgtctcaaaaaaataaaaaataaaaaataaataatattggtcccttagggctgtctggagggtgaaatgaatcacactatgtcaaccacctgccaccaggtgcagac

SEQ ID NO: 731741 - DNA, 496 bp, Homo sapiens
tgatttggaatgattttatattttggccggtttgtgtgtttcctgcgtgtctccctactctagctgtgcctcagtttgcctgtctgtaaatggggataataataatcgtggtccctgccgggcgtggtggctcacgcctataatcccagcactttgggaggccgaggcgggcggatcaggaggtcaggagatcgagaccatcctagctaacatggtgaaaccccatctctactaaaaatacaaaaaattagygggcgaggtggcaggtgcctgtagtcccagctactcgggaggctgaggcaggagaatggcgtgaacccgggaggtggagcttgcagtgaactgagatcacaccactgcactcctgcctgggcgacagagcaagagtccgtctcaaaaaaataaaaaataaaaaataaataatattggtcccttagggctgtctggagggtgaaatgaatcacactatgtcaaccacctgccaccaggtgcagac

SEQ ID NO: 731742 - DNA, 613 bp, Homo sapiens
cttttcctataaactccagaggaggtgagggaaagagagctggaacttggaccatctacaatgtcccccttttccccactgtcatgcccagacccctgcacccatcaacccgttcccacctcagacacaggccgcccttacctgggccctgccgagaagggaataaaagccagaggtgacctctccttgatgttctctgggtcaaagcgaaaggggtcgtagacctggaggtgagaccaagaagggttgttgggtggggtctcccagtccgccagccttggagagacagacagttgtgtgtgtctttgagggaggtgatgttggatactcctgatcaaaaccctgccccctcctctaggagccttggaatggacaaaaacagagagaggggccccgcacctcagggtccggccacayagctgggttgtgatgggttccgaaaacactgatgaggcagataatgcctgtgggagagaagggagcagtcaggagaaggcctccttcactgaggggcccctcttcctacccaggagactcctccccgtgaggctgtgagcacctttggggatgacccggccgtctgggagcacaatgtcctgggtgacatggcggg

SEQ ID NO: 731743 - DNA, 635 bp, Homo sapiens
attttttggaacagtttgaaaagaatgggtattaagtattttttttaatgtttggtagaattcagcattgaagccatcaggtcctgggcttttctttgatgagagagtttttattactggttatatttcattacttgtaattagtctgtttagactctctatttctttttggttcaatcttgataggttgtatrtgcctgagaaattatacatttttactaggctttccaatttgttgactcatggttgattgtaatagactccaatgattctttgtatttctgtggtatcaattgtcatgtctcctttttcatgtctgatttcatttatttgagtctttcttttttcttactttgtttagctaaacatttgttaattttgtttatttttttacaaacaaaactctttgttttattgatcttttgtattttatttttactttcaatttcatttatttttgctctgatcttcattagttcatttttcctactaattttgagtttggtttgcttttgtttttcttgttccttgaggtgcatcattagattgtttatttgaaatatttctacttttttcgatgtaggtgtttattgctataaaattccttcttaatactgcttttgctgtatcccata

SEQ ID NO: 731744 - DNA, 635 bp, Homo sapiens
attttttggaacagtttgaaaagaatgggtattaagtattttttttaatgtttggtagaattcagcattgaagccatcaggtcctgggcttttctttgatgagagagtttttattactggttatatttcattacttgtaattagtctgtttagactctctatttctttttggttcaatcttgataggttgtatgtgcctgagaaattatacatttttactaggctttccaatttgttgactcatggttgattgtaatagactccaatgattctttgtatttctgtggtatcaattgtcatgtctcctttttcatktctgatttcatttatttgagtctttcttttttcttactttgtttagctaaacatttgttaattttgtttatttttttacaaacaaaactctttgttttattgatcttttgtattttatttttactttcaatttcatttatttttgctctgatcttcattagttcatttttcctactaattttgagtttggtttgcttttgtttttcttgttccttgaggtgcatcattagattgtttatttgaaatatttctacttttttcgatgtaggtgtttattgctataaaattccttcttaatactgcttttgctgtatcccata

SEQ ID NO: 731745 - DNA, 569 bp, Homo sapiens
aagggggatgggaaggttgtgggggtctacccaccctgttcctggaagggagagatcccggtcccctctctagccccacactggggccctcaccctcaaacataaaggtgtcagcttctgctcttatgtcctcatcagataacttcttcccgtcttcatcctggagagaaggcagtaaccccccccaacccccacccccataaaaagtcacactagctctaagggctcttgagtctaatctgagacagtctctgaagattcatcctttttccagaaatccaagtmcatcttgcactcctagacccctcttggtcaccatggccagagccctcacctcatggccttcctctctggcttccttgcctcctcttgggttcctactgggaagactcaatgacccatgaatattttaatgaaaagtttctgagaaaaagttactggcaacctgagttacaggagaattaaatggcaatttcccttggaaattagagattaagtattgcttcaaagatttgcccacattctagagtgataaatctagagaatcttatccccctggagacgtttgg

SEQ ID NO: 731746 - DNA, 607 bp, Homo sapiens
caggtcctcaccagcaattgcacaggttctttaaatagtctctccaagacagagagtgaaccagtttccccttctcatgtttctgccagagtaaacatcacttagaggaaaccagtcctagacgaagtgaacctcggtccctggraaaggctgaggtggccccagggcaatttagtcccaccaagccggctgattggcaccaaaggctcacctgtctgcctggaacaggtagggccagggggtcacttcctccaaagtgaccctgacactgctcccggcagcagcagcatcctggcacatccctgcaggcagagagctagagcagtcctggctaagaggtggctgtgaggccagggagcaaggaccctgtgcactttggcttcctagaatcccacgggcacaaagacccacttcaaggaaacctcccccaagctgggaaaggaagggagggagggtgggaaggaagaagggagggaaggaaaaagagaaggaaataaagaagaagggaaggaggaggagaaagacagaggaagaatgaattttaaaaaaagagaaagaaagagaaaagaggaggagaaagggagggaaagagagaggaagaatgaat

SEQ ID NO: 731747 - DNA, 607 bp, Homo sapiens
caggtcctcaccagcaattgcacaggttctttaaatagtctctccaagacagagagtgaaccagtttccccttctcatgtttctgccagagtaaacatcacttagaggaaaccagtcctagacgaagtgaacctcggtccctgggaaaggctgaggtggccccagggcaatttagtcccaccaagccggctgattggcaccaaaggctcacctgtctgcctggaacaggtagggccagggggtcacttcctccaaagtgaccctgacactgctcccggcagcagcagcatcctggcacatccctgcaggcagagagctagagcagtcctggctaagaggtggctgtgaggycagggagcaaggaccctgtgcactttggcttcctagaatcccacgggcacaaagacccacttcaaggaaacctcccccaagctgggaaaggaagggagggagggtgggaaggaagaagggagggaaggaaaaagagaaggaaataaagaagaagggaaggaggaggagaaagacagaggaagaatgaattttaaaaaaagagaaagaaagagaaaagaggaggagaaagggagggaaagagagaggaagaatgaat

SEQ ID NO: 731748 - DNA, 641 bp, Homo sapiens
agaatgatcagagcatgaataatttgctatttgctattaatgggagtagaaagaaacaaggggaaatgatgaaatacttttaagaacctcatcatggcttatatgacaaattagaattccatggaacttcatacataaaacaattctagactcattcactgattattccatgagtcttcaccaattgcattggggtaatattacacaggctgggatgcagaacaggaaagctaaaaaagatatctccaggttttcatggcctcccacaactacaaagaaactgcctttctgaagatgtggacagagctgrattcctgagataataaatccaaccacactgaaataggcacactgaaattaacctggcaaggactagagctaaaactactttttcctagtttggaaagtttgaaggaggctttgagaccaaataaaatttcccagaaactgaaaaacccatttgtcttggtagaaggcagagagaagtattccacaaattggaaagctgatagctcagctataaagcacaaaggtgtctctagaacctcacaagttctcagaggtgaagcttcacagaacagagatacctgagctcaatctctaaatatataaaaccagtaatgaactgagagaaattaaag

SEQ ID NO: 731749 - DNA, 549 bp, Homo sapiens
attattgccaaaattattattaataataatacaatacaaagtatctgacactggctggattctatgtataaaccatctaggctgaaggcaacaaattatgagtttagggtgattattctttaaatggtgcctaagagcttggcacatgccattagcaagcataggtaggagtcaataatagttcaytagcaacaaggcttactggtgagacttatcctttaacatccacaactgaaaaatatagtttttaaattaatagaagacaaagattgcatatggaactcaatacacagctgcccgaatattatacgtatgaaatgcatatatatttaatacattttgattttcaaataaatattttgtttattttcttatatttggatgggtttggagtttgagtggcaaagatctgaaaagtcgtaggacaccataagattcacaccattgatgagttactctaggcagagctgcagctgctgcaaacataggttcagtgagaaacaaggatatcaagccaaaggtaaaagtaaaaaagtacagtttcttttt

SEQ ID NO: 731750 - DNA, 548 bp, Homo sapiens
tctgttggtgaaaactaaggttgggctcttactttggctattgtgaagcatgctatagtaaatatgggaattggataactcccaatagaaagatactgctttcaatttgtttgtatatatatccacaagtgagattactggatcccactggtagttacatttttaaatttttgaggaacctccaaactcttttccataatggctataacaatttaccttcccaccaacagtgtaaaatggttgccttttctttacctcctcaccaaaatttatctattgtctttttgataatagccatttttacaggtgtgaggtgatatctcactgtggttttgatatgcatttccctgaggattagtgatgttgagmatcttttcatatacatggccatttctgtcttctttgaaaactgttcaggttctttgtcaattttgtaatcaagttttttttgttatttaattgtatgcattctttatatattttggatataaaccccttatcagatatgctctgcaaatatttttccagtatgtagattgcctttttat

SEQ ID NO: 731751 - DNA, 612 bp, Homo sapiens
acaccattcagaatggctattactaaacagtcaacaaacaacagatgctggtgaggctgcagagaaaagagaacatttatacactgttggcaggaatgtaaattagttcagccactgtggaaaatagttgaagatttctcagagaactttatacagaactgctatttgatccagcaattccattactaggtatatatatccaaaagaaaacaaactattcaatcaagacacacacatttgcatgttctttgtaacagtatttgcaatagcaaagacatggattcaacctargtgcctatcaatggtggattgaataaagaaaatgttacatatatacaccatagaatactatccagccatgaaaaagaacaaattcatatcctttgcagttacatcaatgtagctggaggccatcactctaagcgaactaatgcaggaacagaaaaccaaatactccatgttctcacttataagtgggagctaaaaattgggtactcatggacataaggacaggaaaaataggaattggggagtactagagggaaggaggaggaagggggcaagggttgaaaagtattgggttctgtgctccgtacctgggtgatgggatca

SEQ ID NO: 731752 - DNA, 504 bp, Homo sapiens
tgaacctccttcctgacaatgttataacttttgctttcaacagtcacatgtattttaaagaatttgagaggagaaaaaataaatcttttgtaattacccgtatatttactatttctgttgttcctacttcatcctgcaattccagctttccctttgatattattccttccagcctgaagaatttcttttagcatttattctacagtgggtcttctggtraaaaaaaaaaaaaaaaaaaaaaggttctttttatgtttcctttatcagagtatatgtctttatttcaccttcattcctgaatgatatttttgctggaaatagaattctaggttaatagctcttttatttccaaacttgaaaatgttgctccactgtcttctggcctacataatttctgataagaaatctgcagtcattcaaaacattattatcctagatgtaacacaatggttttctctggtttgctttcaagattaaaaaaaaaaaaaaatctttgtttttcag

SEQ ID NO: 731753 - DNA, 633 bp, Homo sapiens
gaatggccaaataccaaacacaaactaggtaggtatgagaagaacacataatacaaagaacatacaagaaatgaccaggaatgaagaaacagccttgcaaatatgaagctttcggagatgaaaaaatgtataggttgaaaaaaataaattaaatggatagtgctttattcatgggtaaaaagaaaatgcatacatttgtggatgtatccagagttctactgaggctggaatgagaaggtttaatacacatctgattggagtcacagaaagagaaaagggagagcatggaggaaaggtgatggttraagagatgatactggcaaatattctagaactgattaaaaatccaattccacagatctaggaagcacagcgtatcccaaacagcatgaataaaaagatatccacatatagacacatagtattggaactgcagaacttcgaaggcaaataaataaataaacaaataccacgaaggcagccagaaagcccacgacacctacaaaggaagagcagttaaactggtagattttcccaacatcaatgaaagccagaagacagtggataaacagttttaagatgttgagagaatagaattattgatttagaattgcattgtcagcaaaactatca

SEQ ID NO: 731754 - DNA, 649 bp, Homo sapiens
agtgacttggctctttgtgaattatctgcagcatattttgcaatcatttcaccctgttcatctccctgcagccctgcccccaccagctcacccacacttcacccctcagaagaatgagtaagataatagtagagactgagtttggtgtcagatatgcctgggctaagtccaggctccacatttactcagctgggtgaccctggacattgtaattcaagtctcgaagtctcagtttccatatctrtaaaatggggataatcatgacgataacacatagcttattggatcgcagtgaggattaaataagataaaggctgtaaagggcctatcacagtacctggcacagagcactcagtagtgttagctattattattattcctgcacttgtgtgtaaaggggatgcaaaccaattttactattcatttaaacaaattatcagctacagcagcctctgaaacacaggcctataatgcatcctaaagtaaatgcgaaatatttgaatttgtgtcatttctaattttctctattaagttgaaaattgagtatgaacacaccagaatggcaaagaggccagatttctcttgtaaccaacaaaattgagatcgctattaacattagaatgaagatgaccgaaacagcttaatactt

SEQ ID NO: 731755 - DNA, 649 bp, Homo sapiens
agtgacttggctctttgtgaattatctgcagcatattttgcaatcatttcaccctgttcatctccctgcagccctgcccccaccagctcacccacacttcacccctcagaagaatgagtaagataatagtagagactgagtttggtgtcagatatgcctgggctaagtccaggctccacatttactcagctgggtgaccctggacattgtaattcaagtctcgaagtctcagtttccatatctgtaaaatggggataatcatgacgataacacatagcttattggrtcgcagtgaggattaaataagataaaggctgtaaagggcctatcacagtacctggcacagagcactcagtagtgttagctattattattattcctgcacttgtgtgtaaaggggatgcaaaccaattttactattcatttaaacaaattatcagctacagcagcctctgaaacacaggcctataatgcatcctaaagtaaatgcgaaatatttgaatttgtgtcatttctaattttctctattaagttgaaaattgagtatgaacacaccagaatggcaaagaggccagatttctcttgtaaccaacaaaattgagatcgctattaacattagaatgaagatgaccgaaacagcttaatactt

SEQ ID NO: 731756 - DNA, 649 bp, Homo sapiens
agtgacttggctctttgtgaattatctgcagcatattttgcaatcatttcaccctgttcatctccctgcagccctgcccccaccagctcacccacacttcacccctcagaagaatgagtaagataatagtagagactgagtttggtgtcagatatgcctgggctaagtccaggctccacatttactcagctgggtgaccctggacattgtaattcaagtctcgaagtctcagtttccatatctgtaaaatggggataatcatgacgataacacatagcttattggatcgcagtgaggattaaataagataaaggctgtaaagkgcctatcacagtacctggcacagagcactcagtagtgttagctattattattattcctgcacttgtgtgtaaaggggatgcaaaccaattttactattcatttaaacaaattatcagctacagcagcctctgaaacacaggcctataatgcatcctaaagtaaatgcgaaatatttgaatttgtgtcatttctaattttctctattaagttgaaaattgagtatgaacacaccagaatggcaaagaggccagatttctcttgtaaccaacaaaattgagatcgctattaacattagaatgaagatgaccgaaacagcttaatactt

SEQ ID NO: 731757 - DNA, 634 bp, Homo sapiens
tcccattggctatggagagactgaggctgccctgaagggtagaagaggaaagttatatgaaactttggggaaatggctcctgggcaccagctaattcaaaggaggacaggaatagcaggaatgaagggcgcgaaggcactgctttattgcccgcctccttccyccagcccctacataaagcatccttggaacaaacaaatggaaatactgcacaccctgtaagcctaattgggtcatacataacttgtacagtgatttcctatgaaacttcaattagccccctcttccagttcaaacctgataagctcaaatatttgtaaactgccagccagatggaagatgtgtctccttgtggcttggatatcctgtaactcaatatgtgtggtgactggcatgggcatccgtattcaaggaagggaaggagcctcgcaccctggacgtggcattgaggggcaagaaaaggtgttgtttgttctctttgggacaggtggcccgactctcctctggagcaggctgggagaagttgccaaggacagttggcgtccttcagtggctggggaaggagagggtgactcttgggtccttgtgtcattcttcatcacttccaactcaagggagaatgttgacttgaaat

SEQ ID NO: 731758 - DNA, 506 bp, Homo sapiens
tttcaatgataaacaaatatagaaaccattccttaaataacatgtctggacaatttaagcagttgacttaaaattggagagtagttgagtacatttcatcaaagtaactaaatcttttttggtctacaaaccaaaaagctgactcaaaccactgatttaaaaattactaacatcatctttatttaataaatgacttcttgcataaacagagtaattcaaatctgagcgttctgagctacttactacaaattagaattttgtagagaaagagacaagagacaaatctcatcatttccaacactgactcattatyatacattaatctaaccaaccatgcaattgctaacacagtaggattcataacaaaaagagcatggcaatgatactggtgtctagtttgctaaaacactaaataaaacaatataaaatgctgctttctgtactacagactctctgaagcatcatttgtttccactgtacagccaaggcctcaggccccaaaatat

SEQ ID NO: 731759 - DNA, 590 bp, Homo sapiens
gagacagaggcacactttctggcaaacatttctcaaatgtgcttcatcaaatgggatgttcatcttgcagcatttgccatacacggcagagtaactatggaaatgacggtgttaattttgctaactgggttaaatattttgccaactggttaaacattcgtatttaccaaaatagaactctaagggacggtggtagtgcttctcaacattggcactggctccattgtcattcgactttaaaatgtccggggttggtttcctcattctttgctgcactcagatttaagccttacaaagggaragtctccggccttcacgcttaggagcctgaaggtcggctcaccgttaggctgacatgctcatgaaattacaaacagtagagagggaaaatcctaagacagaagaactccaaagataaacgggcctggccgccttttaaagatgagcggaagcactccagacatttgtctttggacgggatgggcccggccactcacggctggcggccacgttccagcgaaggcacctggtggcatgtcctcccgcatttccgaaactctgctgctcaagggctggcactttttaaaata

SEQ ID NO: 731760 - DNA, 590 bp, Homo sapiens
gagacagaggcacactttctggcaaacatttctcaaatgtgcttcatcaaatgggatgttcatcttgcagcatttgccatacacggcagagtaactatggaaatgacggtgttaattttgctaactgggttaaatattttgccaactggttaaacattcgtatttaccaaaatagaactctaagggacggtggtagtgcttctcaacattggcactggctccattgtcattcgactttaaaatgtccggggttggtttcctcattctttgctgcactcagatttaagccttacaaagggagagtctccggccttcacgcttaggagcctgaaggtckgctcaccgttaggctgacatgctcatgaaattacaaacagtagagagggaaaatcctaagacagaagaactccaaagataaacgggcctggccgccttttaaagatgagcggaagcactccagacatttgtctttggacgggatgggcccggccactcacggctggcggccacgttccagcgaaggcacctggtggcatgtcctcccgcatttccgaaactctgctgctcaagggctggcactttttaaaata

SEQ ID NO: 731761 - DNA, 590 bp, Homo sapiens
gagacagaggcacactttctggcaaacatttctcaaatgtgcttcatcaaatgggatgttcatcttgcagcatttgccatacacggcagagtaactatggaaatgacggtgttaattttgctaactgggttaaatattttgccaactggttaaacattcgtatttaccaaaatagaactctaagggacggtggtagtgcttctcaacattggcactggctccattgtcattcgactttaaaatgtccggggttggtttcctcattctttgctgcactcagatttaagccttacaaagggagagtctccggccttcacgcttaggagcctgaaggtcggctcaccgttaggctgacrtgctcatgaaattacaaacagtagagagggaaaatcctaagacagaagaactccaaagataaacgggcctggccgccttttaaagatgagcggaagcactccagacatttgtctttggacgggatgggcccggccactcacggctggcggccacgttccagcgaaggcacctggtggcatgtcctcccgcatttccgaaactctgctgctcaagggctggcactttttaaaata

SEQ ID NO: 731762 - DNA, 639 bp, Homo sapiens
gtccgaactcatataacctaccctgctggattcatggatgtcatcagcattgacaagacgggggagaatttccgtctcatctatgacaccaagggtcgctttgctgtacatcctattacacctgaggaggccaaatacaaagtgagaaaaatctctgkgggcacaaaaggaatccctcatctggtgactcatgatgcccggcaccatccgctaccctgattccctcatcaaggtgaatgataccattcagacagatttggagattggcaagattaccaatttcatcaagtttgacaatggtaacctatgcatggtgactgtaggtgctaacctgggaagaactggtgtgataaccaacagagagaggcactctggatcttttgatgtggttcacatgaaagatgccaatggaaacagctttgccactcaactttccaacatttttgttattggcaagggcaacaaaccacagacttctcttccctgaggaaaagggtatctgcctcaccattgctgaaaagaaagacaaaagactggcgaccaaacagagcagtgggtgaaatggtccctgggtgacatgttagatctttgtacgtaattaaaaataatgtagcatgataaacagaattttattgccat

SEQ ID NO: 731763 - DNA, 559 bp, Homo sapiens
ctagcaaaatacattcttgtcctcacaaaacccttgtatacattctatacaccaggggttcccaacccctgggaagctgaccataagggtctgtggcctgttaggaacagggctgcacagcagaagataactggcaggtgagttagcataactgcctgagctccgcctcctgtcacaacagtggtggcattagattctcataggaccatgaaccctatggtgaactgtgcatgtaagggatctacatcgcacaatccttatgagaatmtaatgcctgatgatctgaggtggaagagtttcatcccgaaaacaacaaccctccatccatgaaaaaattgtcttccacaaaacctgtccctggtgccaaaaaggttggggactgctactatacactctcagaaaaaaattacttaattgcatgcatagtcttgaaaactatttaaagagtttttcaccatctaaaggtgtttttgatgatgccctccttaggcaaaacttcacctttgcactgaaacttcttaatagataggcccccagagactttacctactagagtcta

SEQ ID NO: 731764 - DNA, 590 bp, Homo sapiens
agtcaccgtgctcagctgagttttgcttttattctgaaagaaacaatgggactttaggaagaaaaggcttgttaagtaggggaatactgggaactcagttttcaacaggttaagtttgaaatgcccattagacattcgaatccagatgtcaaatgagtagttaaataaatgagcctgacattcagggaatatttgagttatcagcctgagtctacttgagarcacctagaacagagacagaagcagtccaatgactgaacactaaaacacaggataggaagataaaaaagaattggcaaacacaactaagagtaggcagaagagagaaggaaaacccagagtgagtagtgtccttgaagtgaagaaagcatttgacaaaggagggtgtcaacaatggtgtcaaatgctactgaaaagtctggtaatttaaaaattgagaattgaccaatcagtttggcaaaactgaggtcaattgtgatcttgtcaaaaacaggttttgctgcagcaatcgaaaagcctgtttggcatgaaacaaaaaaataattagaggaaaggaagcataagcaataagcataggcaattttgtagaa

SEQ ID NO: 731765 - DNA, 562 bp, Homo sapiens
gcacttggtatataataggcatccccatatttgaagaatgaataagtgaaaggctcctagcagtcctacatataaaggtcagctcccatcttataggcaaaagagtgaccaggactcacctactagaatggccatctgaacttgtgtttgaatagtgtaaggtcccccactatccagaggtaggtcatactcctgaggctccccagtatatcctccccatccagatgctctggagctatgtgrcagctggcttggtcttttaaagagggagaagaccatgtgaggcaacatgagcctaggctttgggcaccaggagaatcctgcatctcatctatctctagattctccctaggccctgcaaagcttctgtcaaacaagctcactttccctaggcacgctgcaccactggatcaatttccaccaatgttaccatgctaaggctatagggaaacgagtccacaggtaaaataggtccaatgtacacataacaatatcccaaggagtcattgagatgaagcaagtgcttgctccaagacctgaacaaggtaaatatatttaaaaa

SEQ ID NO: 731766 - DNA, 603 bp, Homo sapiens
cagcttacattcctattcacaatgtacgagggctccaatgtctccaaatcctcaccaacatttgttattttctgtttctttgattgtagacattctagtgggtatgcagtagcacctcattgtgattttgatttgtattttcctagtgactaaygatgttgagcatcttgttcatgcgttcatttggagaaatatctgtaagtcctttggtcatttttaaattgggttatttgtctttttgttgttgaattgtaaaggttttttaaatgtattatagataataaaacctgatcagatatatgatttgcaaatacttttcccattccgtaggttttctttttaccttctttataatgtcttttgatatacacaatattttaattttgatgcagtcagatatatccatttttttcttttttttgtttttctgctcatgcttttggtggcatagctaaaaatacattgccaaatctaaggtcataaagatttaccactatgtcttctcattattttatggatttagctcttagatttaggtcattgatccatattgaagctaacatttttgagcctggtacttattatgtagcagaaacttgacct

SEQ ID NO: 731767 - DNA, 626 bp, Homo sapiens
atttagctcttagatttaggtcattgatccatattgaagctaacatttttgagcctggtacttattatgtagcagaaacttgacctaaattttctcatttaattctctcaaaaacactttgagtgaggtacttttatgatccccattgtatagacaaagaaactgtgatctgcatttgaccttaggcccaggacagagtccagctgagaaaagaactgtacagctaagcctagcctgaattactcaccyacaatattatgaactaattaatttaaatggtggttgtctcaagtgactaagttttggagtgttatttttgcagcccaagctgatacaaagaaacaggtacttgcagacataactggtaggagtataaaacttttctctgaaggaaatctggcaatatctaacaaaattagaccagcagtaccacttctagaaatctatactaaaggtatacctgtaaaagtattaaatgaattatgtttgggttatttttttgtgacattataatagcaagtgactgaaaacaaacaaatgcttatcaatttgttagcacagatcagaattttatgcagttgtaaaaagaacgaggaagatttctatgtactgacagagtgaactct

SEQ ID NO: 731768 - DNA, 596 bp, Homo sapiens
atctcggctcactgcaagctcagcctcctgggttcacgccagtctcctgcctcagcttcccgaatagctgtgactacaggcacccgccacaatgcccggttaatttttttgtatttttagtagagacggggtttcaccgtgttagccaggatggtctcaatctcctgacctcgtgatccgcccacctcggcctcccaaagtgctgggattacaggcgtgagccaccgcgccyggccataaattatttttatttataccaaactgcttatctgccgagcctttttaagtatttgagtttgtaacctgatgtgttgcatccctctttgaaatttcccagaaaagacacagatgagacagttaacaaaatgcttgaaagaaatttcatttccctttaggaagtcttgtgctgcaggtgagctagtattcaaagaaccttccctctggtgcctggcaggcatgatgcaaattacttctccctgtctctcttcccagaaagtcattctaaggcctagacaattagaccaccatagagattgcctctaaaactcacttactgtttaagggctaaatctgtacattaacatatacttttttcc

SEQ ID NO: 731769 - DNA, 493 bp, Homo sapiens
acaaagttagtgggggagactcctttctgggagattttgagtataaagttgatgtgagctggagctaccgcaacctttgttcccaccagcaagggaaaaagtagagtcaaaggaaggaaagaaaaataattctgatgatggtgtttgaatcattagacctagccaagcctatacctcacttcccaggatgtgagtagacacatcccattatttatttattttttacgttattttaaattcaattacgattacttctaaaagcgaaataawtctaacacaggaatattcaaataaattgtcccaatagtgtcactttttttctaataaacaattgtatctctgaggaaaatcattgtagtcaatgggaaatctagccagttattaaagaaaaacaattgtcaaaaataagttgtatagcaatctataactctatgcctttgtcttaactctgcaagtccttattgattcaatctttttttttcccaagcctgct

SEQ ID NO: 731770 - DNA, 631 bp, Homo sapiens
ccatggttgttttcttttcttatgatgtctttggtatgaggatcagggtaatgctggcctcatagaatgagttgtcaatgttatcttttctattttttggaggagtttgccaatgattggggttaagtctactttatttatttattagttattaatttgttgagacaaagcctggctctattgcccaggccagagtgcagtggtgccatctccacttccatgcactgcaacctcctcctcccaggctcaaggcatcctcccatctcagcctcctgactagctgggactacaggcatgcaacactatgcctggcttttggtatcttttgtagagacagggtttcgccatcytgtctcaaactcatgagctcaagcaatcctcctgtcatggcctcccaaaatgctgggattataggcatgagctatcacctgtggccaagtctacattgaacatttggtagtcttttgtcagtaaagccatctggatctgaattttcctttgtggagaatttttggattagtaactcaatttctttacttgttataattttatttaaatttcctatttcgttttgagtcaattttggcatttctttttttgtaggaatttgttcatttcatctacattttct

SEQ ID NO: 731771 - DNA, 631 bp, Homo sapiens
ccatggttgttttcttttcttatgatgtctttggtatgaggatcagggtaatgctggcctcatagaatgagttgtcaatgttatcttttctattttttggaggagtttgccaatgattggggttaagtctactttatttatttattagttattaatttgttgagacaaagcctggctctattgcccaggccagagtgcagtggtgccatctccacttccatgcactgcaacctcctcctcccaggctcaaggcatcctcccatctcagcctcctgactagctgggactacaggcatgcaacactatgcctggcttttggtatcttttgtagagacagggtttcgccatcctgtctcaaactcatgagctcaagcaatcctcctgtcatggcctcccaaaatgctgggattataggcatgagctatcacctgtggccaagtctacrttgaacatttggtagtcttttgtcagtaaagccatctggatctgaattttcctttgtggagaatttttggattagtaactcaatttctttacttgttataattttatttaaatttcctatttcgttttgagtcaattttggcatttctttttttgtaggaatttgttcatttcatctacattttct

SEQ ID NO: 731772 - DNA, 631 bp, Homo sapiens
ttaaaagtaattacttcctactgataagctagttcctctcctttggaaaaatgctttctcagtggtaactgttttacatttggcatggcttgcgtattacatttactttcgcctagaagcacagctctagatatcttgtagaagatgagataccaaaaaatagaggaagaaagggagagagaaagcaagacatctggcatcccgaagggctctggaggaacaacatatcccatatgagctaccagaatattgagaaggctcatttctgaactttggtctctctcatattcctcatgtcttcatgtcttaactaaaatttgacagtagtcactgagcaaatttcaccatttgaaatttgatgcagattctaattttccctcaggtttgctstaaatacacccaatattctgccaaaacacagtctcttgtggagataaatttaataagaagaaagagaaaggaggaaattgaacttactctagctttggcttgatttgcagtagacctctgagtctaatcattctttaatactagttgactaagtcaattcactacaaaaagttaataatataatacttctgaatcagtgtttgacataataactataacccaattgattacttggttaaat

SEQ ID NO: 731773 - DNA, 418 bp, Homo sapiens
aggagcaatgcagaatcaaatggaggaggaggaagcaggcgatgtggtagtttcagaaagggagacactcccagcacctgactacatggtaaagcttttcatgtgaatttgatattcattttcaatttcgtatagtgctttcccaggattcaaatgccatgtaacattgtgaacttgaaacagttttttctttcaatraaacaacataaaggcagtttgtaaatttgcttttaccaccatgaaacctaaaagaataaaatccgtcacagaatattatccatttaaaagtccttattctgaggcattagccagattttccactggtttcattagaagaaactgacaatgattgtagagcacattggagaaagttccccagctcgcttacgagaagctttcaacttttcaattgcgtttt

SEQ ID NO: 731774 - DNA, 537 bp, Homo sapiens
tctactcatgacatcccacctgtggtctctgatgagaatttgtagattcccaataagaaaacaataaaagtttattaagtgtcatccaggtaaagtctgataccaaatagtctcctaggtgacaaactcaagttcaagttcatgtgtttgaatgtatactatcatgttcgtattggaaggaaacaaaaaaaaggaaatgttcaagagcaaacactgaatgtttcccctttggacagtaatagtcacgtaaaccacgcagctgtagaatactatgtttttagacattcctggtagcagtgggggagggaagaaaacaaaactagacagatggtgaaagaacttagcattatcctcttagcagagatttgtcwcactgcaagggaggggtggcaccaaccccgtttagtatgcagctctattgtgaacagaaagctgtcgcggagggccagcttcaaactcgtgaatgcgcgggtactaaagagcaggagctaaagagcaggagccgtcagcagagtaaatagccatgaggtctgtcct

SEQ ID NO: 731775 - DNA, 615 bp, Homo sapiens
aaagaagaatacatattcttctttcttttttttttttgagaaggggcctcgctctgtcgcccaggctggagtgcagtggcgcaatctcagctcattgcaacctccgcctcccgcgttcaagcgattctcctgcctcagcctcctgagtagctggaaatagaggcgcacgccatcacgcccagctaatttttgtatttttagtagagacaggtttcaccatgttggccaggatggtcttcatcttttgaccycatgatccacctatcttggcctcccgaagtgctgggattacaggcgtgagccactgcacctggccataatacacattcttcttatgtgcccatggaacatataccaagataaaccacattttgggccataaaacaattgcaaaaaatttaaaagaactgaaatcatatagatagtgttctctgaccactatgggattaaactagaaatcaattaaagaacaataataggaaaatctccaacttggaagctaaacaatatacataagccatgggataaagaagtcccaagaaaaattttaaaagtacattgaactaaatgaaaatgaaaatactactattaaaatttgtgggacatttctatagc

SEQ ID NO: 731776 - DNA, 625 bp, Homo sapiens
actttgtcacatgggctggagcacagtggcgcaacctcagctcactgcagcctcagcctcctgggatcaagcaatcctcccacctcagccctccaagtagctgggactacaggcatgggccaccacagccagctaatttttttgtattttttgtagggacagggcttcaccatgttgcccaggctggtcttgaactcctgagctcaagtgatccccacctcagtctcccaaagtgctagggttacaggcatgagccaccrtacccaaccaatctatttttcctttgtttgcttgtgactttggtttcatagcttagaaaccattgatgaatccagataaagatttacatctatgttttcttctaagaatttgtattagtccattttcacgctgctgataaagacatacccaggactgggcaatttacaaaagaaagaggtttattggacttacagtccaacgtggctggggaggcctcacaatcatggtcaaaggaaggaggagcaagtcacatcttacgtggatggcagcaggcaaagagagagcttgtgcagggaaactctgccttataaagccatcaaatctcatgagacttattcactatcatgagaacagcatgggaaag

SEQ ID NO: 731777 - DNA, 653 bp, Homo sapiens
tggggtccctgattcaggccttggctcttggatggcatctctgggctttccctgggccagaagggagcccactgctctgacgagtgagttccaggccaggcagcattcaccacaagctgactgagagcccttgggccttagtgaacatcagtggtgacctggcagtacaccccaggggattgtgatgctggtgaacatggggacagactactctgcctgggtaatggggarggaagagtggaaaggtgtttgatggttttagtgccagctcagtcacagtaaaacagagcaccaggtggatttctaaggtttataaccccagccctagcccccagacagcacctctgaacccatccaggggccgggggaacttactacacttaagtgaaggacagaaggttctctggcttcactacctgctaattgtagagccttggggcttactgcaaaatagctggcagccagggagttgttacagtagaggccttgggcagtaacagtgctgtgtgggcttcagatcagacccagtgctgtcctaggtgtagtggccacaggggtgcttgtatcactcatcttcgaactccagaaagctcagcacagagagactctttttgtttgggggaaagtaagagaagaaatgagtctctggctgc

SEQ ID NO: 731778 - DNA, 640 bp, Homo sapiens
acgcagatatagttgcatacatcaagtagctgtatttcttgcaacatatccaaagatcccagactaacaacctcttgaaagatagtaatatatatttctttttttttttttaccttttttttttttttttttgagatggagtcttgctcttgtcacccaggctggagtgcaatggcacaatctcggctcactgcaacctmtgcctcccagttcaagcaattctcctgcctcagcctcccgagtagctgggaccacaggcgcccaccaccaggcctggctaatttttttgtatttttagtagagacggggttttgtcatgttggccaggctggtcttggactcctgacctcgtgatccactcaccttggcctcccaaaatgctgggattacaggcgtgagccaccacaaccagtcaataagcatatatttctatcctccttcatgtccccaaactcttctaattctttttgttcaaagtgtttttaatattttcgtcttttgtttccatttccactgcctttgtccagctcaatctaagtcaaaatggcttaatatctagagaactgaaagagtcttctaattggctaactctagcaatgggagaatttttttttttttttttttttttttttttgagatg

SEQ ID NO: 731779 - DNA, 536 bp, Homo sapiens
tcaccgctgggggctgtgaaaagcccacagcacatcagtttgcccccatcacccaacaaccctcactttctgccctcatcctccggggcccagggagaagggcacagggtctcctcgcccatcagcagccaggtgtgcactgcacaggtaagagcaccttgcgccatgcctggtgcacacttctttctggaagtgggttacaaattttcaactgctaaagagctaatgtcagaattttcaatgggaagggtttaccaaaagcatagcagaatctcccagacactacaatccttgaatmctcatggtagaccaaactcactcatcctctaaggcaggggttggcaaacttactctgtaaagggcgagatggtaaatattttttgctttgcaggtcacactgtctgtgtcatacctacccaattttgcctttgtttcacaaaagcagccatagatatcatgtgagcaaatgcacatggctctgtcccaataaaactttattttaaaaaatagtcagtgagcaagacttggcttgtggg

SEQ ID NO: 731780 - DNA, 645 bp, Homo sapiens
gattttaaaacatagagttttaacattttgtgagaggtttcgcttttgttgttcacctccatgctatttttttttctttccgtgtaagatttttagctaaaaaacactacactttcagtaatatgttttaaaaaaaatttgaaaccacctatttctaaccgagtccttcccttcatgagtaaagagtctggagcccagagagatgaatttcttgcattattattattttgatgtgttgctagaaaaagacatgtgggtttactcagtaaaatctggggagttattttcaccttcccacatagkcaaggcagagccattcctagagggactagaattcgtggactatttagaagaaatagaggaagatggctttgtgggtgagggatgtatggctggtacagtgactcctcatcttttatttttgttttattgatcactcttttgaaataaatgtatattttcttctttccccaaatgataacttattaagtatataataaacagaaaccattttatcattttgttaaaagtttaaatataaattaatttatgttcgaaaaaattatctggtcaaaccatgtattctggtgttcttttagaaaatacgaccattctttggcgctgaagaggttgcagcaagtaggg

SEQ ID NO: 731781 - DNA, 645 bp, Homo sapiens
gattttaaaacatagagttttaacattttgtgagaggtttcgcttttgttgttcacctccatgctatttttttttctttccgtgtaagatttttagctaaaaaacactacactttcagtaatatgttttaaaaaaaatttgaaaccacctatttctaaccgagtccttcccttcatgagtaaagagtctggagcccagagagatgaatttcttgcattattattattttgatgtgttgctagaaaaagacatgtgggtttactcagtaaaatctggggagttattttcaccttcccacataggcaagrcagagccattcctagagggactagaattcgtggactatttagaagaaatagaggaagatggctttgtgggtgagggatgtatggctggtacagtgactcctcatcttttatttttgttttattgatcactcttttgaaataaatgtatattttcttctttccccaaatgataacttattaagtatataataaacagaaaccattttatcattttgttaaaagtttaaatataaattaatttatgttcgaaaaaattatctggtcaaaccatgtattctggtgttcttttagaaaatacgaccattctttggcgctgaagaggttgcagcaagtaggg

SEQ ID NO: 731782 - DNA, 621 bp, Homo sapiens
tcaccatgttggccaggctggtctcgaactcctgacctcaaatgagccacccgccttggcctcccaaagtgctgggactactacagtcgtgagccaccacaagccgcccaaattagccttttaattaaccctgaggattagaatatttgtttcctctttttcctccatcctgatttcatctccagccttctagtactcatgttttttgttttttgtgtttttcttgagattgagacagggtttcactctgccacccaggctgcagtgcagtggcacgatctcagctcactgcaaccttcacctcccagttcaagtgattctcccacctcagcctcctgagtagctggactacaggtgcgcaccaccmcagccagctaatttttgtattttttggtagagatggggtttcaccatgttggccaagctggtctcaaactcctgacctcaagtgatccacccgcctcggcctcccaaagtgctgggattacaggcgtgagccagcacgcccagcctactcatcttttattgaaatgaaggcaaccacacaacacacacacacacacacacagacactcctacctcccacagacggttgagacttcgcttcctactcacccacac

SEQ ID NO: 731783 - DNA, 498 bp, Homo sapiens
ctattggatccccagcccctcctgcaggacccattgtgtaatgtactaaatgcaaaataaatatttgctggatatattagggttctccagaaaacagaaccaatagaacacacacacatatacatacatatttatatatatacacacatgcatgcatatacacgtgtgtgtgaatatatatacatatatatagagagagagagagaaakaaagagagagaaacacagagagagggagagatttattataaggtatgacacttaaagaattatggagattaagaagttccacaatctgtcatccacaaactggaaacccagaaaaaccaatgggatacatcctagtctgggtccaaaggcctgagaaccagaacactgaaggcataagaagattgacgtcccagctcaagcagtcagagctaactctcccctcctccaccttttgttctattcagacctttgacggattggatggcactcacccacactggggtagagt

SEQ ID NO: 731784 - DNA, 470 bp, Homo sapiens
atgggtttccctatcccccaggtatgcacaacagcatctgtgcacagaataggggttcagggctctgtgatgaactcagagctaacgtgggaaccatcaggtgaagaaaggagccaatgggtgagaaaccagctctgaagatacagctatcctctgtcctcagcccagttaccttcacactcaatttgcatataaatgacttcctgagacctacaargtgcagtccacagagatcactgatcgggagaaactttctctaagtgacagtggcctctcagatttgaagacatcaaagacagagctcctcctccctccctagccttcaggggattcatcatttggagggactcctgctaattcgataaggttcaatgctcccagaaggttggcacttcttttaaaaggtgtgcaaatgtatggggtacacgtgcaattgtattacatgcacagattgcatagtggtcaagtca

SEQ ID NO: 731785 - DNA, 370 bp, Homo sapiens
ttaacatatttttatatcctgtttgatattgcaatttccttaccaaaacttcttcagggttaaaacaaaaaaaaaaaaaaaaaaaaagggcagcaaaaatgggaaaatttaatttagcactcatccttttagagakttttaagagtgtacttgttagtagatcttcagtgttcattttcattttgatataattattaattaaattacagagaaagcaaaaactacattacttcttaaaaacttaaatgccaatttttatatgcctatttttttcaatagaaaaaagttagttattattttaacagaaataactcacctggttatttaacagaaataggtcttccattgccagaatatgtacttgcaaatg

SEQ ID NO: 731786 - DNA, 608 bp, Homo sapiens
atatctgttatttttttatttttaattatagctgttatgactggtgtaagatggtatctcattgtggttttaatttgcactttgttgatgattagtggtattgagcattattttaatatgttttctggctgcttgtatgtgttcttttgagaaatgtctgttcttttgtccactatttaaattgggttatttgttgttttcttgttaagttgttggaattacttgcatatcctggatattagttctttgccggatgcacagtttgctgtattttctttctttttctaacacctttgtaaaaaaaawaaaaagaaaagaaatgtgccacatacacactatggaatactaagcagccataaaaaagaatgagttcatgtcctttgcagggacgtggatgaagcagtttgcagtattttctcccattctgtagtttctctgtttactctgttgctagtttctttcatgtgcggaagctttttagtttaattaagtcccatttgtttattttgttttgctatatttcctcttgaggttttggtcataaattctttgcctagagcaatgttcagaagtttttcctagttttatttcaggattttatagtttca

SEQ ID NO: 731787 - DNA, 645 bp, Homo sapiens
tccatttcatacagttctgaaactcagaatagttgcattataactgagttcaggtatcaaatgataacaggtaaataaatgctttgtgaggacactctagtgacagccttgaattcctccttaaaatgcagtctttcactcttctagcctcctgtgccaccttatcagtcctcttgactggcatttatcacttgctttcttgagatatatgtaattgtacacaagaagattcttggcatcttgtgaatttaaaatttccagtttcaactcttcttaagtgaccctgaagagtctataattcatatcatttgtcaggttgttatatgaatttaaatcatatatattttgggctggtttaaagatgagtgacttagctactgcaatagcctgaatatcatccaacatmtcctttcaacacagctctgtgatttcctgttagtgaaaactgaaatagtagttaataggtggtgtgaggctgtttgtagaaaatctttgagttttcatagaaatgagactcagaagaaataataaccagcgacaatatttagtgcttactgtatgcctggtgctatacaaagagctttgcattcatatcattggatcccttaggaaatgatattgaactagaactgaaagggaatgcag

SEQ ID NO: 731788 - DNA, 639 bp, Homo sapiens
ctactttccccagagctatggaggctttggctcgcaggatcctcagtaaacctattgaagtacaagttggaggcaggagtgtggtttgctcagatgtggagcaacaagtggtgggtaccatctttaggaaattcccagtttccttgatacttaggtggtatgtatgattcttctatgatcactgtttgtgaggtaggcaaggtaatttctaaaatcaagtcgtataccactactctagccttcagtattttaccagataaacctaactgtgctgttccacggagctatttaaaatgcttatttttttttttttttttkttttttttttgctgggtgcagtggtgcatgcctgaagtcgcagctttgcagtccccggagttctgggctgtagtgcactatgcctatctttgtccatgctaagttcagcatcagtgtggtgacctcccggtaacaggggaccaccagattgcctaaagaatgggatattctgtccagggcagaaaaacagaacaggtcaaaacttttgtgctgattgtagttggagcacatctgtgaatagcaccctaggcatagtgagccctgtctgtttaaagacaagtaaaataaaacgttgttttagtttctgtcaccaaaagtggt

SEQ ID NO: 731789 - DNA, 665 bp, Homo sapiens
agttctgggctgtagtgcactatgcctatctttgtccatgctaagttcagcatcagtgtggtgacctcccggtaacaggggaccaccagattgcctaaagaatgggatattctgtccagggcagaaaaacagaacaggtcaaaacttttgtgctgattgtagttggagcacatctgtgaatagcaccctaggcatagtgagccctgtctgtttaaagacaagtaaaataaaacgttgttttagtttctgtcaccaaaagtggtgagtggtgaatggtgagctgatatatagaaatgtcacataccagatgggcatggtgactcatgcctgtaatcccagtattttgggagaccatggtaggaggatcacttgaggccaggagctggagactagcttgggcaatatagtgagacccctgtctctacaaaggaaaaagaaatgttacatayctattttatttcttggttactaggatatgaaattaagagccagagagaacagatgatcatttgccctcatttgcaagcctgttaaaccctgaaagtttacaatttttatcatttacaattaaaatcaacatcttcctagcccttggtaaagatatagcaagatattgtcattcattcactacaaataaaatgaatatttctgtccaggggatccat

SEQ ID NO: 731790 - DNA, 554 bp, Homo sapiens
attattatttatgtaaggtttcttttagcatatgccttttgagattgatccatgttgttgcatgtatcagtagttcttccccttttattgctgaataacattctattatatgactatgccacagtttagtcatttctgttggacactggggatgggggctgcttccagtattttggttgctttagccacatcccgcagaatataccataatcaggttgcagaacagttccatcacttcctaaaaaactccctcatcgtgtccctataaaggtaattaattataaaggtacctttccctatccataaycgctggcaaccactcgtgtgtgtttttgtttgtttgtttgtttgtttttgaggcagagttttgctcttgttgcccaggctgtagtgcaatgatgccatctcggctcactgcaacctccgcctcccgggttcaagcgattctcctgcctcagcctcctaagtagctgggattaccggcatgtgccacctcgtctcactaatttttgtatttttagtagagatgggttgtcgtcatgttggtcagggta

SEQ ID NO: 731791 - DNA, 689 bp, Homo sapiens
agccttgaactcctgggctaaagggatcctcccaactcagcctcccaagtagctgggactacaggcatgtgccaccatgtccagctaattttcttcagattttgtagagatgaggtcttaatatgttgcccaggctggtcttgaacccctgcactcaagtgatcctcctacctcccccaaaatrctgggattacaggtgtgagccactgtaccaggctgatttttaaattccaaacttccttaaaattatgtagaaagcttttattacttcaaccattgttaccctttctctctgtttcctaatttataaagacatagacatcactaaaatatgtattaagagaaactttcacatttttaaacatttcaaatgtgatcactatgcatttaatcctcattattacattgtttatatctgttaaaatgtagcctcataagtttcaaaattaagcaatatttttaaatgatcaaaaaaggaaaatttaatgacctgaacattttatagtattttatagtcactctctctctttgcttatttctctctttctctttcactaaatattatctttacacaattgggatacccttttagagaaaacaaccattgcttttatcgttttctcagtttatatgttgactagtgctaagtaacctaagtaacgtgtggcttcctggtcacttttggtgtc

SEQ ID NO: 731792 - DNA, 647 bp, Homo sapiens
tcctataaataaatgtcttactgttttcaaacttacgtttagttcattttatttgatggttaaagtattttgaatgccttatcttgtgtctgtatctgataacttttttattgtctctatgtctgtataggtacgtttgtgtgcttgggaatatggtccatgcaattcaaataaaaacgaaactgtgtcagttggttgaagtaacgatggcaaggagagatgacctctcattttgccgagagrtgaaatttaggtgagttctcaaaagagcaatgtagggtcttgtaaatcttaatttgttgaatgaagtacagaaatagagtagatatctggttattggtaggaagaaagacataaaaagagagcagtttacatgtttgtttttctctgtgtctctcctcaaatttccctaagctttgtgcctgtggcaagcctccctttttctaaaactctgctgtacttgagctaagaatttgattctgtttccaatctgatagcataactaaaggccatgatggaggatcagtatccacgttgcttgttccttctggcttttacatctatgatagcagtatctcttttataaagtcgtcatgtcacctgggttatctgccaaattatttgcaccataagtaatcttacatcac

SEQ ID NO: 731793 - DNA, 622 bp, Homo sapiens
tacaaaacctggcagagacacaaagaaaaaaatttcaagccaatatccctgatgagcatagatacaaaagtcctcaacagaatactagcaaactgaatccagcagtacatcaaaaaagctagtctgctatgatcaagtaggctttattcctgagatgcaagtctggttcagcatacacaaatcattaaatctgatttatgacataaacagaacaacaaacaaaaatcacataatcatctcaatagattcagaaaaaggcttttgataaaattcaacatcctttcatgttaaaaaccctcaacaaactaggcactgaagaaatataccttaaaataaaagccatttatgacaagcccacagccaatgtcctactgaataggcaaaagttggaagcatttcccttgagaascagaacaagacaagattgcctactctcaccacttctattcaacatagtactggaggtcctagccagagcaatcaggcaagagagataaataaaaggaacccagatgggaagagaggaaatcaaactatctctcttcacagatgagttaagtctatagctggaaaaacctcatattctctacccgaaggatcctagatctgataaacaacttca

SEQ ID NO: 731794 - DNA, 461 bp, Homo sapiens
tgactatactgcccaagcaatttacagattcagtgctattcctaccaaactaccaacaacatttcttcagagaagtagaaaaaactattccaaaattcatatggaaccaaaaaaaaaaaaaaaaaaaaaaaagcccaagtccccaaagcaatcctaagcaaaagcaacaaagccaraggcatcacattattcaacttcaaactatactacaaggctgcagtaaccaaaacagcatggtactggtataaaaacagacacatagaccataatggaacagattagataacccagaaataaagctgcacacctacaaccacctgatcttcaacaatgttgacaaaaacaagcaatggggaaaggacttataattcaataaatgatgctgggataactgactagtcatatgaagacaactgaaactggaccccttcctttcaccatatacaaaaatcaactgaagg

SEQ ID NO: 731795 - DNA, 585 bp, Homo sapiens
ggaggaaaaagttagagatacctattgtttaacatgatgactatagttaagagcagtgtaattgctaagagagtagagtttaaatgttttcaccacaaaaaaccctatgcatgtgaggtaatacatatgctaattagcttaatttagtcattccacaatgtttacatattttaaaacagcatgttgtacacaataagtatatactatttttatttgttaatttaaaaatctgtacaaataatgcttatctaatagggttgctgtgagtgagaagggaaagaaagcagtgcctgacagccaggagctggcctggctctatcatctagawcatggcgttcctggaaactggacagacactggcagctaggttgccatgtttgcctgctgagtgtaaataagctcttagaacatcaacatcagacaaggccactctgtgattgtggtgagtgaagacaaaaatgagaccagaccactgtataattatgtctgaacatagacaaaaacaagagctacaaaaatgaccaagcatccccgtatcttggctagaatgagtgacgataactgctttcccaattataaatctag

SEQ ID NO: 731796 - DNA, 585 bp, Homo sapiens
ggaggaaaaagttagagatacctattgtttaacatgatgactatagttaagagcagtgtaattgctaagagagtagagtttaaatgttttcaccacaaaaaaccctatgcatgtgaggtaatacatatgctaattagcttaatttagtcattccacaatgtttacatattttaaaacagcatgttgtacacaataagtatatactatttttatttgttaatttaaaaatctgtacaaataatgcttatctaatagggttgctgtgagtgagaagggaaagaaagcagtgcctgacagccaggagctggcctggctctatcatctagatcatggcgttcctggaaactggacagacactggcagctaggttrccatgtttgcctgctgagtgtaaataagctcttagaacatcaacatcagacaaggccactctgtgattgtggtgagtgaagacaaaaatgagaccagaccactgtataattatgtctgaacatagacaaaaacaagagctacaaaaatgaccaagcatccccgtatcttggctagaatgagtgacgataactgctttcccaattataaatctag

SEQ ID NO: 731797 - DNA, 637 bp, Homo sapiens
ggtctagcacagccctgctttgctctggacatgattcaatgaaagaagataaaaagtaacacctggtaatagtaaaatagtaacaaatggtatttattaaatacctactgtgttctaggcactgtgctaggagattcacatgctttatgtcatgtaagcctatgatgtgggttactattattagtcccactttacaggtagggaaacagccacagggaggttaagttgtccattacccaactagkaagtggccccatgagcagaggactcaagcttctagtgtactcagccactggaggatgatccttttgtgctgagattcagtttacgagttctattatgggggaagttgggggcttcctggtctcaatctatctaaggccagcttgtccagcccatgggctgtctgcggcccaggacagctttgaatgtggcccaacacaaatttgttaactttctttaaatgtcatgagacttttttgtgtgattttatttatttattttagttcatcagctattgttaatatattttatgtgtggtccaagacaattcttctttttccagtatggcccagggaagccaaaagatcggacacccctgatctaagaagaaggaggaaaggactggctggatcaa

SEQ ID NO: 731798 - DNA, 477 bp, Homo sapiens
agagattaacaagcttctttcccagtaaaggtgatgtgctgggtgggattatattgagtaagtaacagacattaagtgtttggagctaacctggcaaactattataacacagaatggaagacagaaaaaaacaggcagttgaaataattttataattaaatctgttaatgcaattaatactgatcgaccatagtgggggtctgggcaatgagtgtccacaaagagcagctgggggcttactccggaggctgaggcaggagaatggcgtgaacctgggaggcggagcttgtagygagccgagatcgcaccactgcactccagcctgggcgacagagcaagactccgtctcaaaaaaaaaaaaaaaaaaaaaaaaaaaaaaaaagcagctggcggctgatgcatgaagtggatttcctttatttggattctgtaagtcaggaatcactatgattaaccctaaggataataatagcaaca

SEQ ID NO: 731799 - DNA, 531 bp, Homo sapiens
agagattgatctctcatttcctcagctgtagcacctgattatcgccttcttccttggcaagaatggtcatctcagtgattggctttctgtgcagggaacagcaggacctagacggaacccctggtgttttggtgatagacttaagagcatagggtcccaaagagtgccagtgatacacctgaggtgtcaacctcacccctttttagagttggtggcatggaggacagcyggttggtttctacagggccctgtccctcagagcttctgttcgtgactgtgtctagagatggccaatgcagcaatccacgtgtttccgagtcactttgtcgcatgacccaatggctgctatttgctcctcctcctcaatcgtcgcagaataatagttgtcttcttgagaagattaagtgaatattttctcccaacccaattgcataatgcagcacagatgtcaaggcaaataactttgattcagaacaagttcagctatctgctttgctctgtctgctggtttcatgttttcaagatgattca

SEQ ID NO: 731800 - DNA, 641 bp, Homo sapiens
ctccttggcatagggaagaaagactcccttgagctggatttctctcctgccccttccttcctggggtcacttttccaactcaacattctaggtataggtgatatggacaggaggcagggaaatactgggtagaagagggtggagtccctggcaagggttccacacacaaacctgagcccacagccctaaatgagaaattcacagccctgttttcccacccaaatgctgctttttccaaaaccascctggcctgccatgccccccagtcctgtaaccataaaaaccccaagctccactggcagaggagcagagcagtgtggcagaggagagaagagaacaagcggctgaacatcaagaggagaagcagcatctgaatgttgaagaggtaactggacagttggaaagcagtttcgctgaggatgactgaagagaattatcttcccatttcatccctttccagctccccatcccactgagagccacctccatcactcaataaaactgtgtgacctgattcttcctggatgccagacaaggacctgggtaccaagagggcagggggtaaaagtctgtcaccctgtctccaatgagctggttaacacttagccatccccagacagtaactgttaaaacagcattaa

SEQ ID NO: 731801 - DNA, 516 bp, Homo sapiens
tccccagagggaacggatggatgaggccgtccccagagggaacggatggatgaggccgtccccagagggaacggatggatgaggccgtccccagagggaacggatggatgaggccgtccccagagggaatggatggatgaggccgtccccagagtgaatggatgagcacccagcctgagcccgggaaggtgctgagggttagcacaggccgcctgctgctgcaggagtgagaggggcccactcagggaaagaggggttcagggggagcagccaggtgtgtacagatggctgtagccatgtggaggygcgcgtggggaccggcaggcaggcagggagttgggctttcttctgggagcagtagggagccacggttgaccgtggagcaggggagagacctggtttgatcttggtcttgacttccaagccccttggtccctccgaccttggaggctgctggaaggagagggcatctcatttaccatcctggctgcttcatggggatttgggagataaaaa

SEQ ID NO: 731802 - DNA, 585 bp, Homo sapiens
tatataaaactgcagattgtttgagagtactaagatgcaaataaatattccacacaaagagcaagcctaagaaaaacaactatttgtttgaataacattattagccaattttactgggttaacaataaacattgcatccatacactataaatatgtaacttgtttatgtgcacatgaaacatatattttagatacaatatgctgggacacaaaataagtctcaatgtttttaaaggattgagatcttacatagtakgttctctgaccacaacagaattaaattagaaatcaataaaaataacatgcctggaattatgcaaaatatttagaaattaaacaactactacctaatgcataggtcaaaaaaaaaatctcaaaggaaattgtcaagaaccatgaagggtctgagttcgtattctgtttgcaagctaacaagtttgcctgccacaatttcacagatggtggcagaggacacaaaactcctgagtcagaggtaaagaaattaattgtccatagcacagcaagcagcatgagtttcgtatttacccaagtccctcttacccctccagtcccagtgagagatgt

SEQ ID NO: 731803 - DNA, 524 bp, Homo sapiens
acacacacaacctcctcactatcaaaattccccaccataggggtgcatctgtgttaattgatggacctacactgacacatcattatcacctaaagtccatgtttacattagggtttctcttggtggtgtacattctgtgggttttgacaaaagtatgatgacatgtatccaccactgtagtatcacacagaatagttacactgccctaaaaatcctgggttcgtctattcattcttccctccctcctaactcctggatatcactgatctttttactgactccaragttttttctttttcagaatatcatatagttaagtgatgcagtatgttgccttttcagatttgcctttttcatttagtaatgtgcattctcttagtaatattcacttagtaatatccacgccttttcatggtctgatagctcatttcattttggcaccgaataatattccattttctgaatgtaccacacagtttatttgtccattcacctactgaaggacattcttgattgcttccatg

SEQ ID NO: 731804 - DNA, 604 bp, Homo sapiens
atttaaaatttgttttccccattgctaaacaacctcttatgaaaattcaaagtacgattaattatatatgaatttttttataaacaacaaatggccaggcacagtggctcacacctctaatcccagcactttgagaggctgaggcaggtggatcacctgaggtcaggagtttgagaccagcctggccaacatggtgaaacctcgtctctactaaaaatacaaagattaaccaggcatgatggctcatgcctgtaktcccagctacttgggaggctgaggcaggaagaatcgcttgaacctgggaggtggaggatgcagtgagatgaggttgtgctattgcactccagcctgggtgacagagagagactccatctcaaaaaaataaaaataaaaatatataaactcaatttgcattacttctccttctctgatttttgtctcttcttttccatcaagtgcttgccttttgagccagctttctgtggctgcttttcttctgccagaaaaggtgctgccctgagcagctctgtactctctctttctttgattttctctgtttttcctgtccctgaaaccccatactttattcattcagtggggatgc

SEQ ID NO: 731805 - DNA, 604 bp, Homo sapiens
atttaaaatttgttttccccattgctaaacaacctcttatgaaaattcaaagtacgattaattatatatgaatttttttataaacaacaaatggccaggcacagtggctcacacctctaatcccagcactttgagaggctgaggcaggtggatcacctgaggtcaggagtttgagaccagcctggccaacatggtgaaacctcgtctctactaaaaatacaaagattaaccaggcatgatggctcatgcctgtagtcccagctacttgggaggctgaggcaggaagaatcgcttgaacctgggaggtggaggatgcagtgagatgaggtygtgctattgcactccagcctgggtgacagagagagactccatctcaaaaaaataaaaataaaaatatataaactcaatttgcattacttctccttctctgatttttgtctcttcttttccatcaagtgcttgccttttgagccagctttctgtggctgcttttcttctgccagaaaaggtgctgccctgagcagctctgtactctctctttctttgattttctctgtttttcctgtccctgaaaccccatactttattcattcagtggggatgc

SEQ ID NO: 731806 - DNA, 604 bp, Homo sapiens
atttaaaatttgttttccccattgctaaacaacctcttatgaaaattcaaagtacgattaattatatatgaatttttttataaacaacaaatggccaggcacagtggctcacacctctaatcccagcactttgagaggctgaggcaggtggatcacctgaggtcaggagtttgagaccagcctggccaacatggtgaaacctcgtctctactaaaaatacaaagattaaccaggcatgatggctcatgcctgtagtcccagctacttgggaggctgaggcaggaagaatcgcttgaacctgggaggtggaggatgcagtgagatgaggttgtgctattgcactccagcctgggtgacagagagagactccatctcaaaaaaataaaaataaaaatawataaactcaatttgcattacttctccttctctgatttttgtctcttcttttccatcaagtgcttgccttttgagccagctttctgtggctgcttttcttctgccagaaaaggtgctgccctgagcagctctgtactctctctttctttgattttctctgtttttcctgtccctgaaaccccatactttattcattcagtggggatgc

SEQ ID NO: 731807 - DNA, 604 bp, Homo sapiens
atttaaaatttgttttccccattgctaaacaacctcttatgaaaattcaaagtacgattaattatatatgaatttttttataaacaacaaatggccaggcacagtggctcacacctctaatcccagcactttgagaggctgaggcaggtggatcacctgaggtcaggagtttgagaccagcctggccaacatggtgaaacctcgtctctactaaaaatacaaagattaaccaggcatgatggctcatgcctgtagtcccagctacttgggaggctgaggcaggaagaatcgcttgaacctgggaggtggaggatgcagtgagatgaggttgtgctattgcactccagcctgggtgacagagagagactccatctcaaaaaaataaaaataaaaatatataaactcaatttgcattacttctccttctctgatttttgyctcttcttttccatcaagtgcttgccttttgagccagctttctgtggctgcttttcttctgccagaaaaggtgctgccctgagcagctctgtactctctctttctttgattttctctgtttttcctgtccctgaaaccccatactttattcattcagtggggatgc

SEQ ID NO: 731808 - DNA, 598 bp, Homo sapiens
ccataaaatggaatatcatctcaccattaaaatgtatcttgtagaaatgtatttactgacatacacactgactgacataaccagtctaaaaaatcacgtatatgtaatctaggtaaaataatcccaattatagcttattataacactattatgtcaaatcctcaaaataatgttatagttttttgataattcttatctttttaaatttgttaattcagctattcagtttgtcacttgtttctcaagacttgatcagttaaaccatccacaatattttatctttcagctgcaaaattcaaaacattttatggatttttccatcctttgaaggcatatgtgctttaaagccacactacggtttcaaatgaagcatgtgtacrtattacaaaatatgtacgtaatttactctaacattttaatgttagtggtttcttacacaaatctctttatgcactagtcacttcttcataattcagaagctgaatttcattttctctccttaaaacaaaagtaaaaacagctttccaaagctttattttttctactttcacagagatcacagaaatagagtacaaagaatactgaaaactaaatgaat

SEQ ID NO: 731809 - DNA, 504 bp, Homo sapiens
tcccaacagaagtaagcaggaaacagggccagtcaaaagggcccggagccaatgcaaatccagctgcagtggtacttacaaccagagctgcgatacagaaacagagcagacacactgttaccaacaggagtcccarctgtaaaggccagaacgacaaaaaacaagccatccttcatataaactaattgattatattaataacacaaagtacaggctgatctttggcttaaaaaagatccacatttttctgattataaaaactacatgtactaattatataaaaatgttaattttcttttaattccatactcaagagaaaaaaaataaggtcagtcttccagattcaatcattcacttattcattcaacagacatttactaaataccaaatttgtaatcagtacgcactgccagggataaagatgtatatggtcttattcttgctcttgactaatttgaaagggagacggcagatatgccttaataactgtaacacaagacagca

SEQ ID NO: 731810 - DNA, 544 bp, Homo sapiens
ggatcacttgagcccaggagtttgtacccagcctgggcaacatagcaagaccccatctctacaaaaaaaagttaaaactgggcatggtggtgtgtgcctggggtcccaactactccagaggctgaggcaggaggatcacttgagcctgagaggctgaggctgcagtgagctgtgatcgtgccagtgcactccagcctgggccacagagcragaccctgtctcaaaaaaaaaaaaaaaaaaaaaaaaaaggaaagaaaatttctcttcttctgacatctctctgccaagtctcgggccaaccctcctggaggctcagtcaggccaaccctcctggaggctcagggctcggcagtccccaaacgctagacacttggattctttcttggatttccctgaattctgtggccaaagagagcgtctgaagggctgcagctgaccaggtgcctcccagctcctgcacccctcccacccctgccgtggcctcatccccaggtggggcctcatggactttggagcctcctgggagactggagggggcctgggg

SEQ ID NO: 731811 - DNA, 516 bp, Homo sapiens
atgatttgtcctttctttattgagttgtagctagttcttgatattatctggacatgaaaactgcctatatgtggtttgcaagtattttctctcattcggtgtctattaaatattttcttgataatttcctttgatgcacaaaaggctcacatcttgataaagcccaatttatctttttttcttgttactcatgcttttgtatcatatctaagaatccatggcacatttgaggtcatcagtatgtacctctgtgtctattttaagatgtttttatggttataggtcttatatttaactcactgatcaattttttagagaattgtttcatatggtgggaggtagagttatytaaattaactgttttgcatgtggttatctagtttctgcactatcatttgaaagaagaattgttaatccattaaattgtcttgacaccctcttcaaagagtaattgatcataagtgtgagggtttatttctagactctcaattctatcccatttgtctttatgtccat

SEQ ID NO: 731812 - DNA, 651 bp, Homo sapiens
cacccagtcacattccagcacacacactcacagtcacacagagccgtgccactcactgagtcacacacacctgctcactgtgcatataaagatgctcatgcactggtccggctgtgctcacacacacactcacatcacagtcatgaagacaaaacacagtcacctgattacaatcacttacacacccacccatatcctggagggccatacacatcccgtctaaagtcacatcatttttagcagagtttactctcatcagacaccatcacatgctcacagagggtcacaatgttccagcatccacaccccctacccccctaccccaggagcatctcagataccatagstctagggtctctcttccacacacccacaactctcagtaaagcattcacagtagaaattttcatattttcatcccataaaatctccctcttcccttttctgtgtgacctgagattattgaaggctgtgcctttttaactcacgggtagcagggacattgttgtctccttctgggtggctcttctgaattgtgtccagacttctgtgtgaatctctgagctgcagaatttaaatggcccctatcagccctgcctctggctttattcctgattccaagcccctcccaggaaggtttcctcacacagt

SEQ ID NO: 731813 - DNA, 651 bp, Homo sapiens
cacccagtcacattccagcacacacactcacagtcacacagagccgtgccactcactgagtcacacacacctgctcactgtgcatataaagatgctcatgcactggtccggctgtgctcacacacacactcacatcacagtcatgaagacaaaacacagtcacctgattacaatcacttacacacccacccatatcctggagggccatacacatcccgtctaaagtcacatcatttttagcagagtttactctcatcagacaccatcacatgctcacagagggtcacaatgttccagcatccacaccccctacccccctaccccaggagcatctcagataccataggyctagggtctctcttccacacacccacaactctcagtaaagcattcacagtagaaattttcatattttcatcccataaaatctccctcttcccttttctgtgtgacctgagattattgaaggctgtgcctttttaactcacgggtagcagggacattgttgtctccttctgggtggctcttctgaattgtgtccagacttctgtgtgaatctctgagctgcagaatttaaatggcccctatcagccctgcctctggctttattcctgattccaagcccctcccaggaaggtttcctcacacagt

SEQ ID NO: 731814 - DNA, 627 bp, Homo sapiens
agccctgcctctggctttattcctgattccaagcccctcccaggaaggtttcctcacacagtgagaaggggtggggtgtcagaaacagactcagtcacaaccacacctgtttggaggcctgtgtctgtgatgcagcagaaacgacagtgagggaggtactggaggaggaaggggtcaccagggaaatgcacagataaagacgatggagtgaggatgagtggtgtgagttccagcctccatgcttctcatgaagccttttctccactgtgcagaatctaccaggaaggtgtgcrttctcctaacctgtgcaatggtaaaaagctggagatcctgggggcaaggcacttggccttgaaagaaaatcctcctcctccttctccagtggttctgggagagcatagatcttgatcattcgcaggacctggggacagaagtagagaaaacacttgtgtcttctttacccaccctcagatcccttggctctgccaggtgagagccactcccactctgtctctcagacacctgggctttaggtacgccctcttatttccctatttcttttcatgtgaatcaaaatctgaggctgtcgttctcctgcagattcttggagaaaggtgagatttctca

SEQ ID NO: 731815 - DNA, 627 bp, Homo sapiens
agccctgcctctggctttattcctgattccaagcccctcccaggaaggtttcctcacacagtgagaaggggtggggtgtcagaaacagactcagtcacaaccacacctgtttggaggcctgtgtctgtgatgcagcagaaacgacagtgagggaggtactggaggaggaaggggtcaccagggaaatgcacagataaagacgatggagtgaggatgagtggtgtgagttccagcctccatgcttctcatgaagccttttctccactgtgcagaatctaccaggaaggtgtgcattctcctaacctgtgcaatggtaaaaagctggagatcctgggggcaaggcacttggcyttgaaagaaaatcctcctcctccttctccagtggttctgggagagcatagatcttgatcattcgcaggacctggggacagaagtagagaaaacacttgtgtcttctttacccaccctcagatcccttggctctgccaggtgagagccactcccactctgtctctcagacacctgggctttaggtacgccctcttatttccctatttcttttcatgtgaatcaaaatctgaggctgtcgttctcctgcagattcttggagaaaggtgagatttctca

SEQ ID NO: 731816 - DNA, 574 bp, Homo sapiens
gacaattcatttccaagcatgcactccaagattctgctcatataaatcagcacaatcacacagttcttttggtatataacgtatttccttaagattaatttgtaatgtcatcccactgcattccttgggttttgactctgggtatggacatggaagcaatgaaaagggtcagaggccacaattaaggagctttggaaaccccgttctaggcaaccaccctyacaccctgcccagtactgtagcttgtaagaaattaccacagaagggaaagaggaactgcttttccttgcaacagatatgcaatagaattttgagtaatatcccagctattcatctgaactggggaagaaatatcagttcagggcgtctggccacctagtaagctgtggataaagatgttgatgttatttacttctcaggcattccagcaatcctttcagtgatgcagagagattgatcttctttaacttccatatcctctgcacaatagcccatacttctgctggttgcaactatttcttcagaaatccattatgccctacgacttgctttcagtctttcttttcaactacat

SEQ ID NO: 731817 - DNA, 574 bp, Homo sapiens
gacaattcatttccaagcatgcactccaagattctgctcatataaatcagcacaatcacacagttcttttggtatataacgtatttccttaagattaatttgtaatgtcatcccactgcattccttgggttttgactctgggtatggacatggaagcaatgaaaagggtcagaggccacaattaaggagctttggaaaccccgttctaggcaaccaccctcacaccctgcccagwactgtagcttgtaagaaattaccacagaagggaaagaggaactgcttttccttgcaacagatatgcaatagaattttgagtaatatcccagctattcatctgaactggggaagaaatatcagttcagggcgtctggccacctagtaagctgtggataaagatgttgatgttatttacttctcaggcattccagcaatcctttcagtgatgcagagagattgatcttctttaacttccatatcctctgcacaatagcccatacttctgctggttgcaactatttcttcagaaatccattatgccctacgacttgctttcagtctttcttttcaactacat

SEQ ID NO: 731818 - DNA, 563 bp, Homo sapiens
aaattaccacagaagggaaagaggaactgcttttccttgcaacagatatgcaatagaattttgagtaatatcccagctattcatctgaactggggaagaaatatcagttcagggcgtctggccacctagtaagctgtggataaagatgttgatgttatttacttctcaggcattccagcaatcctttcagtgatgcagagagattgatcttctttaacttccatatcctctgcacaatagcccatacttctgctggttgcaactatttcttcagaaatccattatgccctacgacttgctttcagtctttcttttcaactacatctttccaagcacacactgttccccygaaaaactttaggttttgtgtatgaaattatataatatctgggatttgctctaaaataatctggggatgacagttctctccttttgcaaacatttgaaattttttacagtacagtttttaattaagtagccagtacatagactatatataaaagaaaaacaaaattatcagtactggcatggctatatcttcaagaaatgctgtagtatgaaaa

SEQ ID NO: 731819 - DNA, 601 bp, Homo sapiens
gagttccttgtagattctggatattagttctttgttggatgtaaaggttgcaaagattttctgccactctgtgagttgtgtgtttactctcctgattgtttcttctgctgtgcagaagctttttagtttaattaagtcccatctatttatctttttgcttttgttgcatttattttagagttattggtcatgaggcctttgcctaagccaatgtccagaaaggtttttctgatgttatcttctagaatttttatagtttcaggtcttagatttaagtccttcatccaccttgagctgatttttctatgagytgggagatgaggatccagtttcattcttctacatgtggcttgccaattatcccagcaccatttgttgaatagggtgtcctttccccactttatatttttgtttactttgtcaaagatcagctggcagtaactatttgactttatttctggggtttctattctgttctattggtctatgtgcctatctttgtaccagtaccatattgttttggtgactatgaccttatattaacagtatagcttgaagtcaggcaatgcgatgcctccagatttgctctttttgctgagtc

SEQ ID NO: 731820 - DNA, 554 bp, Homo sapiens
atattagtcatttgtcaaatgtatagattgtgaagattttcttctagactgtgggttgtctagaactctgctgttccttttgccatgcaaaatctctttagtttaataaagtcctagctatttatctttgtttttattgcatttgcttttgggttcttggtcattgtgttgctgtctatctcatttcttaggtctagtggataaaagggcgtccattgtctcctaaagtttttattattttttatttatgctctctatttcactgaagatttctcccctcatttcttgtatctttttttttaatttccttaaattgggcttcacttttctctggtgcctccttgattagcttaataactgaccttcagaattctttttcaggtatatcacrgatttcttcttggtttggatccattgctgatgaactaatgtgattttttggggatgttaaagaaccttgtgttgtcatattaccagatttggttttctggttccttctcatttgtgtaggctctgtcagagggacggtctagggctcaaggctgttgttcaga

SEQ ID NO: 731821 - DNA, 664 bp, Homo sapiens
attctgttttgtttactgttgtatctccagagtcttgaatagcacctgccacaaaggaagctatttcctgaggaaatgagggaataaatgaagggatggataaatgaatgaatgaatgagacagactatgcctcgtggtaggatttatataaaataagaataatataaaaataatgcaattttatatttgcatatcactcattccatatatgtgattgtgagatgtatcccatctgtgtggtgtgtgtctgtgggtatgtatgtgtgagtggtgagtttgtgcatgctgtttatgtggatctagccaattgaccactgtgcaggaggaagaactcagaccttggagtcagaggaatctggcttcacatccctgcttgctcacttgttaactatatgacagtaagtatgtttctcgacttttccaaacctgggtttattcacgttaacatggggataaaagtacctctttcatagatttgttatgggggtgaaatgagacaacatacaacatamttaagacactctacaaatgagaaatgcttagaaaaaacttttttatatgtatgcttttcttttgatttcctaatttttaatttacataaggtaatattcactgattttagtgtatagttgtatgattttggatcccaatcaagttttgttt

SEQ ID NO: 731822 - DNA, 664 bp, Homo sapiens
attctgttttgtttactgttgtatctccagagtcttgaatagcacctgccacaaaggaagctatttcctgaggaaatgagggaataaatgaagggatggataaatgaatgaatgaatgagacagactatgcctcgtggtaggatttatataaaataagaataatataaaaataatgcaattttatatttgcatatcactcattccatatatgtgattgtgagatgtatcccatctgtgtggtgtgtgtctgtgggtatgtatgtgtgagtggtgagtttgtgcatgctgtttatgtggatctagccaattgaccactgtgcaggaggaagaactcagaccttggagtcagaggaatctggcttcacatccctgcttgctcacttgttaactatatgacagtaagtatgtttctcgacttttccaaacctgggtttattcacgttaacatggggataaaagtacctctttcatagatttgttatgggggtgaaatgagacaacatacaacatacttaagacactytacaaatgagaaatgcttagaaaaaacttttttatatgtatgcttttcttttgatttcctaatttttaatttacataaggtaatattcactgattttagtgtatagttgtatgattttggatcccaatcaagttttgttt

SEQ ID NO: 731823 - DNA, 620 bp, Homo sapiens
ttgtacttaatgataaataggccaatgacaactcattttcgttcttaaatcctttccactataaacatttatacacagcaacatttgcaagacattgagccttggcagtgagtgtaacaagacgcatagcaatggtgggcaaccttattttgatcaagagaaaattaggaaaaagcaaaaattacttacaggctatatttctctctcattcaaaatggctttattgttgatcttatggggaaaattgtatttttgcaactcaggtgatttatttattgaagagaagaatgccaacaagaaaactttttcggcctctgaaagattataacatgttccggtttaagaatttgaaactycagacagctctaattgtccatctcttatgtttggactgcaccttaattttcaccacacgagttcatctgcattagccccaagtatcattccatcccccccaccaaaaaaaactggcccatgaggtattattatcctcatttagaggatatggagaaattaagtctctgtttcaaagcaagtctgtaaattctttaacattcttcccatcaagaagagagacctatctcctgccctggaacatgggtagcacttttgactgtcgg

SEQ ID NO: 731824 - DNA, 634 bp, Homo sapiens
caaatgtccactagtctcttaaacctgctaccatgttacccactcccactcccctaaacatggccttgcctcctactcaatggagaaactgggcaccatcagaaggagctgccacataccctcagactcaccaaacagtytgcttcttaccccagtgtaagcactgaacaggcaggtgggtgtatgggtctgagactgaggagagctggcctgtagacacaggtttggaaatcttcaacaaaaagacaataatgagatcacccaggggatgtgtgtgaggtaaaaagagcctagtttttgaactctagaggacatcgatgtttgtgaacaagagatatctgtaagggagactggaaaagagcagccagagagatcacaaaacccaggagcatgtgggtcagagaaatcaatggaaggaagtggtcagctgacatgataatgactggcgtgtcctgtgaaccagaaacatggaggtctttaaccatctttgttagagcagttctgtgcagtattagatgaagatgccagacttctgttaacttgagtgtgactggaaaatcattctgtggaaagcacaaggactcctagaagcctctgaggaagcagagatagcaagtataaggtactctgccaa

SEQ ID NO: 731825 - DNA, 622 bp, Homo sapiens
ctgaaggctttggatcctccctagcgcactttttctcgccatttattcccagagtgtccttgcctccgctccgctatcccaaccccactataacaaagcacatcctgcgcgctggggccagaaatcctcctttggcctctgaatcactggtgccatttcactgtgtcctgtccttccggccattgtcactgggtgaagccccagagagcttgagcttggagcccaagagagctggattcttagagcgtagctgtccgcamaaacattcttttttttttttttggtctttattattattattattattattattattattatactttaagttttagggtacatgtgcacaatgtgcaggttagttacatatgtatacaggtgccatgatggtgtgctgcatccattaactcgtcatctagcattaggtatatctcctaatgctatccctcccccctccccccaccccacaacaggccccagagtgtgatgttccccttcctgtgtccatgtgttctcattgttcagttcccatctatgagtgagaacatgtggtgtttggttttttgtccttgcgatagtttactgagaatgatgatttccaatttcatccatgttcctacaa

SEQ ID NO: 731826 - DNA, 685 bp, Homo sapiens
acttgtaaggaagggatccagtttcagctttctacatagggatagccagttttcccagcaccatttattaaatagggaatcctttccccattgcttgtttttctcaggtttgtcaaagatcagatagttgtagatatgcagtgttatttctgagggctctgttctgttccactgatctatatctctgttttggtaccagtaccatgctgttttggttattgtagccttgtagtatagtttgaagtcaggtaacgtgatgcctccagctttgttcttttggcttaggattgacttggtgatgcaggctcttttttggttccatatgaactttaaagtagttttttccaattctgtgaagaaagtcattggtagcttgatggggatggcattgaatctataaattagcttgggcagtrtggccattttcacgatattgattcttcctacccattagcatggaatgttcttccacacaaatattcttgagatttcttcagatctgaaagtcagcctgagtttttagacttgcttcgaaagactttggccctgggaaaaaggaaatcagtactccaggaacaagattttcctcgactttgtctcaacccaaagacgctatagcagcgcagttttcaaacgtgctttgaaaataaatgggacagtgtgtccacactggattttgcctttc

SEQ ID NO: 731827 - DNA, 525 bp, Homo sapiens
cactcaatccatcactcacccattctccctacatgttgtagttattatcaatttccttatttgtcacatatgaaatttaaatattttaaaaacctctatgtcttattctgtcaacttttgacatgatctagtgacttctcagtgtgttcagtgatgaagatattagcacacctgccctttcctccacttttcctgccccctgttctcttctaaattccattatctaaacctctaattttataatttatcttctgtactataaccataattatctttaatgtttggtgcataaatcaattctaaaaattyaaaaaccaataaacaccattcatgcctttatgactatttaaatgttatttactgcaaagccaagaaatgtactggtttacctgtccttctcgatagtgtcatgtcaccacactgggcagcacaaggaagcactcctgtcatcccagacaaagggattctcttctatcatgtggcctcaattgttctatatcacgtcacatttttgttagcttccta

SEQ ID NO: 731828 - DNA, 624 bp, Homo sapiens
tacaggcaacttggagtcctcctcttcaacccataagacgtgtttatctcattcccactgcactccaggccatcttactaatattgttaaatgttgattttataacacctaaccaaaacattaaagaaatattcttaagcctctaggatcaagagcatctagcctggaattaatggttctccataagactacttgtctccacccattcactttattccttccttcttcataacctgccatctcaagttccacatttgccatggtgctttacctgctatctaacacacgccgaccttccatctcctccaaataccacttgtatgtattatgatcttttctctcttagtacscatggttaatttctaccatgtccctaacattgttgcctccatcattggtgaaaactggctggtcacatttgccatgtctatcacaaaacaaaatgcctaatacaagatgtaattaagtcaaaggagagtagacaattctaaaggaggaggaggaggaggaggagaaggagaaggagaagcccagacacaactcactttccccgactacctagtcagatctgtcttcctctccagagtcagaagactgcatgccagctcaacaaagagaaaaatc

SEQ ID NO: 731829 - DNA, 633 bp, Homo sapiens
gctgggaagctccagggaacagcgtaaaacatactctagagttatcccaggcaaagggcaaatgagctgcagcatttgcacacaatccctgagagtcattttttgagggctactcccagaaagcattaattccttaccccttccagcctgttgtgaccataggtagagaagcccctgaggacagttgttgacaatggaaagatgtgccagaatacaccaaaatggtaactaccaaagcaatatgggtggaatactgacagcatctgctacatttctaaatttctgtttctggtccagatctctctatttttcccctgatccacagaaccaactgcctacttggacttctactgtcagactccaggggcctyccactcccaccctcacctgttttctcactgattgcagagcttgacaccaccatcctcacaaccccaaatcagacacctaccattcatttgtgatttgctaattggttgccaacctcctaacacctcttttagattctaccttccatcccactgtgttagttcaggtcctaatattttttgcctaagctattgcaacaatctcctaatcagcacttctctccctattctattcacacttccacaccatgtaatcgtcttgctt

SEQ ID NO: 731830 - DNA, 568 bp, Homo sapiens
ggtcaaatgatgtaataaaagtgaagccttaatccaacaggattagtgtccttataagaagagaaagagacaccagagatctcttctctctctctctctctctctctcagagcacacatacagagaaaaggccatgttagggcatggtaagaaggcagccctctgcaaatcaaggagagacctcaccagaaaccaaccctgtcaacaccttgatcttgaacttccattctccagaatggtgagaaaataaatttctgttgtttaagccaccagtctgtggcatatgattaccacagctctagcacactaatacagttttcttcgaccactctggtcccgaaactccaatatctaccccatcacctccccatatccctcttctcccagccccttaccttgccttayatccaaggcacatttaactttatcaggactgccacggctagcatgtataaactagctgctgccaggaaggcaaagtagcttaaatggagacctttttaatgtagtcctgaaaatgaaacctgagtgacaaaatgtacttgatagctacacaaagctgttctct

SEQ ID NO: 731831 - DNA, 587 bp, Homo sapiens
ctgtcttcctttttcattttcttaatggtgttttttcaaagatcaatagttctaattttcataaagtccaatgtattctttttctctgttatggcctatgtttttgtgtctaaaagaaatatttgctcaacaaggtcaccamgattttctcttgtgtttctcctagtttttaaattttaacttttacacttaggtctgtgatccattttgagttcatttttgtgagctaaggtacttgtatcattttggagctaaggataaagaaaatgtcctattaagcttgcagaagtaaaaaacaagaatcatgcaaggattcagccaatgcacctctctcaccccttcacagaagctaatggaggacatgctcccacaacgtaagggcaaaagccaacaaagagaaagcacaggctctcataaacagcagatctcactagaagagtggtgaagcaaaacctaagactacccattgtacatcagacatagaatcaatccagattggagcaagaggacaataaaaggaagacctacagagagatctctaagtgaaaggggaatttgagagaccactatatattagaggaaagaat

SEQ ID NO: 731832 - DNA, 564 bp, Homo sapiens
aattctctgcctcagcctcccaagcagctgggattacaggcgtctgccagcaggcccggctaatttttgtatttttagtagagacggggtttcaccattttggccaggctggtcctgaactcctgacctcgtgatccacccgcctyggcctcccaaagtgctgggattacaggtgtgagccaccacatccagcctctctgcctctatctctattcatctttcttggagatagaggcagaaaaagggagaaagacaggcaggcaaacatgcatctttgtggaaagagtacatttaggaaaagccagcaaagtctctaaagtggtgtgaaacatgaggcatcatcctgctctattgaccagcagaaagtcacggtaggagtttacagagtcatttataattctctttctagcaattttgtgtagctaaataatcacaaaaactttccgcttttttttttttttaaaaaaaaagaaaaatatttaaatatgtagctgatttcacaaaaacggtaaagaaaatctctaggggtcaaacgtgaaggaaaaagtaaaaaccatagtgata

SEQ ID NO: 731833 - DNA, 566 bp, Homo sapiens
tcatcacattggccaggctggtctcctgacatacaatctgcccgcctcggcctcccaaagtgctgggattacaggcgtaagccaccaggcctgacctccatctcccatttcttgaggggaatcagtgtctggttcaatcacagcttcgttatcaatttctagatcactttcctcacttgatagttcgtctgtgcttatgttttcctccaccttcttactacctgtttttaattccttgatattttcttctgatttataatagctttctgagtagcacatggtacttcaccccccatgctctccacctgctccctcagaaagcacrtttccttggtatgcagaatgctcggatcctgcttatacattttcacgaagtcccgaagctcgttcactttgcgaaggtccagggtcggaaggcagtgggcgaagctgaggggctgcaggccagtttcaggcccaggcactggcttggcgtaacctcgaagaaggggtgtgtctagtttaatttcataacttgtgttggctctttgtttgataagaaggtatatcactaaaactattctttt

SEQ ID NO: 731834 - DNA, 616 bp, Homo sapiens
tggggaggtgacaattaacagagattgcttgtcagtgagacagtcttgttttaaggacctatcagagtcaggaatgactcaagtcgagataggtgtatttggttcttgttgttgggctaaatctccttcccaggttcttaaacataaaatatacagcttcacagcttttaaagataaggatgtatatattgaacctataagtaaatgatggacataaattttataaatgaaaatactgggtagaagatacagtgtaagtggaccaagataacaatgcaccaagagggaactaaagagaaggaaatcttgggactctaaccctccccagtgcagtgaagctttggttagcaaaataaccagaattctcagtcaactatgcactcagcactgcaaaatttcctrtctaatagatgtacctaatttggggtcaaaaactatatggataataaacacaaaatcctgtgtacccaataaaaacaaatgataatctgaaatttcacttcaatccttcactttttactcttgagaggaaatcaaaatgcttacctcttcttagtaggttccgttgtgtttttcccaaggatttctctaataaaaagcaaatacagtttattac

SEQ ID NO: 731835 - DNA, 717 bp, Homo sapiens
acatgaaggaaattcaacaaagtttaaagtcatattctatcaagtactttatgaaacttcattaaatcaaatggaaactggtggcctcttttgaggttctcatacatgaaaatcaatacacaaaatattccgtataaaaagttttgtgcttttcattttaagcccatcggtaaaaattatgaaaatgtaatgtctcttccaattagtttgcaagagctactgactcacatcagtgactatggaaattagtagccacatttcatcaaaattttttgcttaattaccagatggcattgaaaaacaaatatcattcttagtatctgctgccaatgatgtactttatccatttggaggtttggggaggtttcttttttcacttttgacaaccattataactaagtgtcaaaaataaactgaatttagaacccgactttaaaactcctgtatcacagagtattaaagatttgctcaaataatgaggtgtattatatttctggtgagaacttyattcaataaataagatacatattttaaaatattatttttccatttttaccatagactttttaactttcaattttgaatatgttttataatgtacaacatgtaggcaaaataatacctgtatatattatttatgaataaatacatatacaaacagtggctacatagtctcaaaatacttttactagaaaagaatgattgatcaaaaaagtg

SEQ ID NO: 731836 - DNA, 622 bp, Homo sapiens
caggggagtgaaatctaagcagagttttaaactgcctggctaagcactgaaggtgtgctccaacacttgcacacagccactcagccaagactttgtgacttattggttctaggcatttgagaaaatctgtccaattatttggtgacctctaagctaacagagcaggccacttcagtggccatacttgacaaagaatatagactttacagaatcagttcagaaaagtcactaaacaaaccctggcaagagagagaatatgatttgcagagtggccacattatttaaaatgtccaagttttcaacaaaaaaattatgatatacaaagaaacaaaaagcaatggcccatacacaaggaagaaagcaatcaaygcaaactattcctgagggggatcaaatattggacttgctagacaaagactttaaatcagctattttaaagatgttccaataaccaaaagaaaccatgtctaaataactaaagaaaattgtgtgaactatgtatcactgaatagagaatacagagagaaaaattatatatgtttttaaaaaaataaagtagaaactctggatttgaaaaatataatacctaaaatgaaaactcagtagaggaattcaatagcag

SEQ ID NO: 731837 - DNA, 577 bp, Homo sapiens
cttaattatgtggtggaggggcatatgtattcccactttgattattcaccttgattgccctcactgtctctttacactgtggctactttctgctggcttttcacatctctctttttatttctgcctcttcccattggaaggctcctctttattttccagttttgggattcaacacagttatttatatacattcacgaaatcacatattggacacctaraaaccatacagtaagcgagattcttggtacagaaatgaatggaataggcccctgccgttagcaagctcatagtttagtggactagagttgatcctacattgattacataagtgttcaaccaccgatgttacatactaattgatttttaactggaaccagggtgaggatggtgcaggagtggatctgtcctggtcacctttgctcctgctgttctctcatgagagagaatgagcataaagggtgctgagagtctcatgataactgctttcttgattggacactgtgtcttagggatccaacaatgggcctaccctgctttggagttaagcagatgtgtctgtgctggctcagacctcagt

SEQ ID NO: 731838 - DNA, 671 bp, Homo sapiens
gaaggatttaatagaatattctagaaaaaatctataaaaacatctttatgatcttggaaaggcagagattccttaaacaggataccaaaaaaagccataaaaaatatactgataaattttgaacttcatgaaaattaagtacttctattcatgaaaatatactattaagagagtaaaggcaagccattgtctggaaacaaaatatctgcaatacaaataaccaactaaggacttatatccataatgcatgagcaactcctacaaataaatagttttaaaaaagaaaaaaattcagttgcacagtgagcaggagatttgaatatgcacttcacaaaagaaagtatccaaaagatatccaaattatatgttttatatacatatataaaaatgtgcccttcatgatcatcagggaaatgcaaattaaagccacattgtgatattatacaccagaatgtataaaattgaaaaaaactgaaaatacaaagtgttgatgagggtgcatggtaattacaactcctataccgtgkggatggaagggaaaattggtacaaccactctggaaagatgttcggtaatattttctccagctccgcagatgcctaacctatgattccaaaatgctgcttgtggaattctacttcatcacaaatgaatggctatgtctaccaaat

SEQ ID NO: 731839 - DNA, 673 bp, Homo sapiens
agacatcggccagggcaaggaatgtatgtctaagaccccaaaggcaaacacaacaaaaacaaaaataaataaatgatacctaattaaactgagaaggttctgcacagcaagagaaataatcagaagagtaaacagacaacctacagagtgggagaaaatatttgcaaactatgcgtctgacaaaggactagtaaccagaatcaaggaacccaaacaaatcagcaagaaaaaacaagtaagtctattaaaaagtaggcaaaggacataatagacatttcttaaaataagatacacaaatggccaacaaacttaagaaaaaatgctcaatatcattaattatcagggaaatgcaaattaaaaccacaataagataccatcttactcctgcaagaaaaaccattattaaaaagtcaaaaaaacaatagatgttggtgtggatatggggaaaggggaatgtatgtgacaaatactcacatrtcctcaataaatatctaaaatattgtatatcaattaaaaattatagttggaagattccaaatggagataaaggattgtggctaacattgcaagtccagcttctctgcattgagttaaccacaggctgtgctgggtgcaagctctctccttatcccatggtcacaacccccattgtattagcaggctggcttctgtc

SEQ ID NO: 731840 - DNA, 681 bp, Homo sapiens
atttgaactgtgtggatccgcctatatgcagattttcttccatttctgccatccctgaaacagcaagatcagctcctctcttcttcctcttcctcagcctactcaatgtgaagaaaatgagaaggaagatctttatgataaaccacttccacttaatgaatagtaaatatattttatctttcttatkatttttctaataacattatcttttctctagtttttttaataatatggtatagaatacgtataacatacaaaacatatgttaattggctgttaatgtcaccagtaagacctccagtcaactttagaccactagtagcagtcaaaagttatatatggatttttgctgcatggtggttgatgcccctaacccctgcattgttcaagggtcaattgtatcgtggtttccaaattgttaacccatactattgttggaaaagcttaatcaaatagagtgcattgcttctgcagagttccttttccctttagtgttacagattctattcatgccaaaagttagtccttattctcccatcccattcagagagattatttcatatatttgtaatacagctttgttttttgtttgtttgtttttttgagaaagagtctcactctgtcacccaggctggagtgcaatggcacaatcttggctcactgcagccttgacctcctaga

SEQ ID NO: 731841 - DNA, 680 bp, Homo sapiens
gggtcttcccagttttgtgctagggatccaaggccctggtagtgtaggcacacgagggaatcttctgatccacagattgcaaaaatctgtggggagtgtagaaccctgggcaggtagcacagtgtctcaccactctcttggctgtgggaggaaggtccctttgccctgtgcagttcctagttgaactgtggtctcaccctgcttttttcatttctctcccgataagaaaatatggttacctcagttggaaatgcagaggtcactcaccttttrcatttgtctcagtgggagctgcagaccagcgctgttcctaaatgtccaccttggaccctccccctacctgtaatacagtttcttttgttacattctatacttcattctggaatttccttgacctcctaaatttttaaaaaatttgcataccttaaggttccatgctgtcaggtagtgtgacatgctacctgacttcaaactacactacaaggctacagtaaccacaacagcatggtactggtaccaaagcagatatatagaccaatggaacagaacagagtcctcagaaacaatgcctcacatctacaaccatctgatctttgacaaacctgacaaaaacaagcaatggggaaaggattccctatttaataaatggtgttgggaaaactggctagccatattcagaa

SEQ ID NO: 731842 - DNA, 680 bp, Homo sapiens
gggtcttcccagttttgtgctagggatccaaggccctggtagtgtaggcacacgagggaatcttctgatccacagattgcaaaaatctgtggggagtgtagaaccctgggcaggtagcacagtgtctcaccactctcttggctgtgggaggaaggtccctttgccctgtgcagttcctagttgaactgtggtctcaccctgcttttttcatttctctcccgataagaaaatatggttacctcagttggaaatgcagaggtcactcaccttttgcatttgtctcagtgggagctgcagaccagcgctgttcctaaatgtccaccttggaccctccccctacctgtaatacagtttcttttgtyacattctatacttcattctggaatttccttgacctcctaaatttttaaaaaatttgcataccttaaggttccatgctgtcaggtagtgtgacatgctacctgacttcaaactacactacaaggctacagtaaccacaacagcatggtactggtaccaaagcagatatatagaccaatggaacagaacagagtcctcagaaacaatgcctcacatctacaaccatctgatctttgacaaacctgacaaaaacaagcaatggggaaaggattccctatttaataaatggtgttgggaaaactggctagccatattcagaa

SEQ ID NO: 731843 - DNA, 680 bp, Homo sapiens
gggtcttcccagttttgtgctagggatccaaggccctggtagtgtaggcacacgagggaatcttctgatccacagattgcaaaaatctgtggggagtgtagaaccctgggcaggtagcacagtgtctcaccactctcttggctgtgggaggaaggtccctttgccctgtgcagttcctagttgaactgtggtctcaccctgcttttttcatttctctcccgataagaaaatatggttacctcagttggaaatgcagaggtcactcaccttttgcatttgtctcagtgggagctgcagaccagcgctgttcctaaatgtccaccttggaccctccccctacctgtaatacagtttcttttgttacattctatacttcattctggaatttccttgacctcctaaatttttaaaaaatttgcatacyttaaggttccatgctgtcaggtagtgtgacatgctacctgacttcaaactacactacaaggctacagtaaccacaacagcatggtactggtaccaaagcagatatatagaccaatggaacagaacagagtcctcagaaacaatgcctcacatctacaaccatctgatctttgacaaacctgacaaaaacaagcaatggggaaaggattccctatttaataaatggtgttgggaaaactggctagccatattcagaa

SEQ ID NO: 731844 - DNA, 602 bp, Homo sapiens
gggaggtggagcttacagtgagcggagatagcgccactgcactccagcctgggcgacagagtgagactccgtcttgaaaaaagaaaattttataacagccttgtgagagtgatgggtagattgattctgttagatgagaggtatttggcatactgcttaagaggtcttgtcttctctggcctcagactttggtttgaatcttcgctgagttctacctcttgctttgcttagcagtaggttgcatttcctagtctgtaaaatggggctgacaggtgtcttctcatagagatgtgaaataatataaagctacagctcatmgcatagtgtctagcatacagtaaatagttcttaaatgttaggtattagtgtaatttacatgttgtgatttttttttttaatcctttttttcccctcccctaggctatggtgaactaaacggtaatgctggagaaagagaaatatctttaaagaacctgagttctgatgaagccaccaaccctatttccagggtcctcaatggcaaccagcaagttgtagacactagcctgaagcagactgtaaaggccaacacctttgggaaagcaggaattaaaaccaagaat

SEQ ID NO: 731845 - DNA, 826 bp, Homo sapiens
gctggcatatagtgagtgattgagagactgagctttgttgttaatatgaagatagaaatggctgatgttgctattgcacactctgggagacaaggccttaaaatcaaggaatggccattaggtgtcatggaaccgggttggaggaggattgggggtgcaaatcatactctatccctttccaatcataccacgtgggtgaccatctggcatgtggcacttagcacttaaaaggacaccactaatgtccttttagtagtgagaactgggtttccaaaggagtgctctagagaaagaccaccacactccatgtctagaagatccctgtcccatccctaatggttgcaggcaagctgtgttttccccttggagtgtctygccctcctgtgtggtcagatagcctgttttccccatagtccccgagggtctgagcatgtcccaggctgccctgccatctctagtgaaggtggggtgggggtgggagagggagtgtgccaaagttcaagagtttgttgggtgcagctaaacttactgcccctgccccctcccggccccatccacctccccgccaacccggcagcaataaccaaggcagcctgatagactccgtggtgccctaatggtggagagagattttctgcttgggagcacaggatgtttatggcctgctgagatcacagtaaccctggctttcttctttggattatggctgcagatcaagggcaggcatttatgcctcctcccagtttatagcagtgatcataattatggtgatggcagagcgcacttctattgtgcctttttaataaggccactttgtttggcttct

SEQ ID NO: 731846 - DNA, 468 bp, Homo sapiens
tgctttcaatttctctaattgctttgacctttctacggctgtttcttccttcttcctccctctccctcttcctttctctccagtgtccctcctccttagcttctaggccagtatctctaaagcacagactctcaaatctcaaaatgttctagcatcaaacatagagctttgtaaatataaaaatacccaaacctccctcagagccrttgaattagaagctctaaagtcggggccccagtatctgcattttgaaaaagctctccaggtgattctgatttccaggctggagtttgaaaacgctggaaatctaacctgttgaacctcatggtgctggtatgatgctgctggctttgaacccttctaaggagatagtttccacagggaggagggggaaataaggcctttcactcagaagaatgaattgtccttcaggcacaagggcaagtctaaaggacttgagaaggagca

SEQ ID NO: 731847 - DNA, 635 bp, Homo sapiens
aaaggcctaaatcttactaaatcatagtaataaatttatagaatttttacagtaggtcttaaagaaaactgaattcaaccctcaattttctcccttttacaaggattatttgatacataacaggtaaacaatgaagacttattaagtgaatgaagaaatgaatgaatgaatgaagatgcagaagggttatatgactcttcaaagctccagcaatcaatatcaaacccaggactagtcataactagctttccagattcttttggggtgggtgtgggagtagaagaaaccaagatttaaaaaccctatctgggtcctcaggaaaatcttaaccaaaaggcattacagccagtttcctttggtactctttcttagaaaagcacttgataaaataaattttgccaagatatatctccttggaaaccaaaatgcagttgactgtttatttctctctmtatatataaataatatttaatataggaccataaacaactgcaattgtttttgcaccaaaacaggtggcctttgactaaaagaaaaatccaactagaggagaggaacagaacattgacaagggccacataagtcactagaagagtatcagctatacaaggacaggaaccatgtatcctgtttac

SEQ ID NO: 731848 - DNA, 655 bp, Homo sapiens
tggaaatgagtttaaaaagagaagaaaaagatgaaccaaaataaactgagtttagcttttctaaagagctaaagagtacattatgctctgtgcaaataaagatttctttaaaaatgaaacaaaacaaaaaagcctacaggctctactatgtagaaactttaactcatattttctttttctgtaactttgtcatttaattatgaagctcggttaccaatgttgttttcatagctttacaacctcaccacagatcgttcgtttccttaagttttgcatctcctcattttggatatttaataaatactgaactsttaagtggggggagaaagtagtaaaattttaacataacaggctctaaggtaggaaaaaaagaaaagaaacgagtgcaattaaatatggacacctgtcttccaatcactgcctagtcattaaccagttctataaccttcaacaaatcacttcaactttctgggcttcagtttcctcatacgtaaaatgggaaacatgagccaaatgagtcaaaatccctcctagttccaacaatccatgaatctgtccaacaaaaagtaagaaaaccctattacaaataagactttatagtttacaaagtactttcatacatgtattctcatcaatttttgtagctcatctgtga

SEQ ID NO: 731849 - DNA, 610 bp, Homo sapiens
tctcagctagctacctcgggggctgaggtgggaggctcctctgagcctggggaggttgagaccacactgagccatgattgagctactgccctccactctgggtgacagattgaaaccctatctgaaaagaaaaagaaaaaaaaaataaagctgctatagcatttgtgtttaggtttttgtgtggacatatgttttaacttcctttggaaaaacacctaggtgttgcttgctggatcatattgtgtacggaattggtgggttcttggtctcactgacttcaagaatgaagcygcggaccctggcggtgttacagctcttaagttggcgcgacaggagtttgttccttctgatgttcggatgtgttcagtttcttccttctgctgggttcgtggtctcgctggctcaggagtgaagctgcagaccttcgcggtgagtgttacagctcttaaggcggcgcatctggagttgttcgttcttcccagtgggctcatggtctcgctggcttcaggagtgaagctgcagaacttcgcagtgagtgttacagctcataaaagcagtgtggacccaaagagtgattagtagcaagagttattgcaaaaagccaaagaac

SEQ ID NO: 731850 - DNA, 490 bp, Homo sapiens
tttaggatcaagggctaaggaaattcayggaaatggcaagttggtaataagatctttaagagctatgtcctctgatgttaggaatgacatgaaacaggcaggacacgccttctaactgacaggagagtttggaagtatagatgaacacagacgaaggtaagagaggaggtggagtctgagctggggcatgaagaaagagtgagttcaggtaaagggaaagaaaaagcactcactgtataaacgtaggcatcgctgtgtttacctccatgatacatttgagtatgttcagcaaaggttgttacaggagggagctcagatacaaaaccagaagacaggtgaagtacggtccaggcatgaaagatctcaaatattattccagaacatttggacttttatcccactgataataggaagcatgaaagaatcctgagccagccaaagagtgaaagagcgaaccagggtctccatggtgctccacagcagggtatgt

SEQ ID NO: 731851 - DNA, 656 bp, Homo sapiens
tggagtctgagctggggcatgaagaaagagtgagttcaggtaaagggaaagaaaaagcactcactgtataaacgtaggcatcgctgtgtttacctccatgatacatttgagtatgttcagcaaaggttgttacaggagggagctcagatacaaaaccagaagacaggtgaagtacggtccaggcatgaaagawctcaaatattattccagaacatttggacttttatcccactgataataggaagcatgaaagaatcctgagccagccaaagagtgaaagagcgaaccagggtctccatggtgctccacagcagggtatgtgaagcttggtctggtggctggaaggagcctgtggattccattggacctgagttcaaatcctggcttagccacctcctgtattagcaagtgaccataggaaagtctgtttccttctctgcaaaatgggaatcataattgtaatagcaactggtccaaaggtaagaggtatctccattgattgttcagtcagttacagatcaaactccttgctctacttttttctcccttctcactagtgtacttgactagtcttgaaaaaaaactttgtaaaagaaaaacaaattagttcaaccattgtggaaagcagtatggcaattcctcagagagctaaaagc

SEQ ID NO: 731852 - DNA, 528 bp, Homo sapiens
aggcagaggttgcagtgagccaagattgcaccattgcactccagcctgggcaacagagtgaaactccatctcaaaataaataaataaagtttaaaaaaataagacaatgcctaatgccattttaaaataactaatcttaaaagtgcgattgcaagtggtttagaatgtagttactgagagctgaaaggggcattctatttgttcatcctttgctttctctaaaatctattgtttggttttacactgaacaactagtatgactctgcagggttttttgtttktttttttttgtttgttttttcgtgaaaacagatacctaggatgttttttttcacctttgaaatctctggaagaaaaacaaatatttacttaatagaaatagaagctggagaagtttttcaaaaactacaatgatatattaatacaaaatttgggtgacccctgaagaaactgcagtcacacagaggaaggaaagctgctgcctagaatgccattaattcactttctgagggaaaagagggacccaga

SEQ ID NO: 731853 - DNA, 602 bp, Homo sapiens
aaatagtccagaatgtcccaggtccagggcagaggaccaacatgggcagttttggttatgagcaaggtgggtctcagaggtgatcagcgatcagagggcggtgaagttctggatccattgagacaagctctacacaatagcatgcagtcccacaacttgtaccagcatccccagcatctggcattccatgtttctgctcctgtgtggcctccacggtgcaacaagctagcggtttacttggacctctgcctcatctttcttcttttgtgcttcagactgcacattcgctttttcctccacttagctctcatgatgcagaggtttccaagaaaatggcgctaaggcygagagaaaccctagcccatttctattgtcagtttttattgaattccaccttggacgctcttctaggttcttgggttacaccagtaaacaaaaagatttctgctcttgaggagcttatattctatcagaggaacacagacaataaatatcagtaagctttccagtatgttagaatgtgataagtggtgtggaaaaaagaaaagtggatcagagtaaggggagttgagaaagcaggtagaggtgggagcatgtgaagg

SEQ ID NO: 731854 - DNA, 549 bp, Homo sapiens
ccatggggaaggcggggcatgagagaagggaggggtggtcccgaggaccctttccatagacctgggagttcccggtgagcacgcggaaaggacgcggtgggagcggcaggtgcagagggaggacttgaaggttccatccctaacagaggacagcgtggccgagtactcatgcttccaaccctgcacagaggatagtgcatgcccagcatgcagactcgcttccatcgcgacacagaggacagcatggagcccagctcgagtgccgtccccccaccatgacagcgcagcatgggcyttccaagccacagagccacagggaagccagtcctcctggaccgtgtgtggctgttttggagccagttgtgtcctgtgaagagcgcagcggccgcaggtgaggcaggagtgaagatggaggaggcggccatctctctggggcctggcaacagcgagagcttttgccaagccactgtctcccggaggacaagatctccttcccaaaagcaagatggccaagagtatggagaagaaagtaggtaatacaagtttgct

SEQ ID NO: 731855 - DNA, 602 bp, Homo sapiens
agctgggggcctctggcagggcctccttccaggacacaataccaaggaggccagacccccagggctgtccgcactggatgaccctctggccactctgtcctgctgatgagaccctctccctgcctcctccctctcagtaaaactagagtaactaggcatttttaaagaagatggtggcgtcttccactgttgccctaaatggaaatgctccaccgcaaaactcaatgtgatgctagtgcctcacgacctaacaccctccccacggggcagcgtttgtcaggaacggtaaacccagcgcgtccgcacccaggcgcagaaactctccatcagggaaatgtgaaaaattgatctttttgcagctcggtgctgcctccaacacatccagagccaactggaactgtgagtgtgagcccagtggcamtgcaagcgcccacaccagcaccctgccctgggcagagtcacgtgggaccatccccgcaggacagtgctgcacccagagcccccaccctgaaagcttcccgtgctctgagcagctcctcaggtgtgagcacacaaacagaggaggccatggtcagcacggcacattcggacaccacagtcct

SEQ ID NO: 731856 - DNA, 427 bp, Homo sapiens
tattgctgaactttcccaggacggctgaagtacttggcatgcttctaaccctatgccccaaacatctgtttcccctgcagactgccagcttctttagggcagaggttacatgatcaaaatgatgatactgtcttgtgtttgtaatcccagcactttgggaggctaaggcaggagaatcacttgaggtcaggtgttwgaaaccaggctgggcaacacagtgagaccccatctctacaaaagaaaatttaaaaaaaattagctgggtgtggtggtgcacacctttagtcccaactacttgggatgctgatgtgggaggatcatttgagcccaggagtttgaggctgcagtgaactgtgatcaagccactgcactccagcctgggcggcagagagagaccctgtctcaaaaacaaaaacaaatgatgatg

SEQ ID NO: 731857 - DNA, 613 bp, Homo sapiens
actttcagctccttgccacactctgaaaacccatatcctatgtcagggaatgcaacatgaccaggaaagagaggatacattagccttccattgagatactgactttgaactcagatatgcctgttgtgggaaggctgtccctcttctccttgaaagttgttggatcacaagaccctcagcttaacagctgcatatttatgtccttctctacggccagcagctataatcagaaaatacctagcattatgcatacctcacatattaatctggggaaaggcggaacggctttgttagatatgtgayggcaagtaggtggagactgtgacctggtcaggcacaagtggtctttcctgtgccaaacaaagccaggctggccagtgtttattggccttttgactgcaatatccccttcttaggacagaggcaagaggttcctgtggagaggtgggccaagggcccatcatcatgacaggcagctgtctctgctcagaatatttcctcttctgagttgatcattgccctggaatcagattttgcagttctttctcaggtggcttctttattcaattgaccattagaaggtcaatccactaatcttctacacattggatgt

SEQ ID NO: 731858 - DNA, 632 bp, Homo sapiens
aaagtgacagatctgaagctgttaagaaatacacaaagtgcagctttactgaccatacagatattgctctagattaagtacagttttttttttttttaaayattaagcaacctgtgcagataaaatcagctttggtttcaatgtcagagcaagtaaggagcttttaaatattcagtttggcttcttggtcacaagtctatcatgtcaacttcttgtcatgatgatttttccaaagcaacccagtcctgtttcctgccctccctcctgctgcctgctccgggcacggagaagcagatctctttgtggtgcctcataagtgaccccggtgaccagtctagatcacagcacataggacaaaaaaaaaaaaaaatcactttcttaacaacaaataaacaaatgtgcctcacataatttcaagttgaagacaagcaaatcacatgacaaaaagctcattacaaaatgttatccaaacagattttacagtcaaacattgaaatgaaaatcaatttcctttatctcaatttttttttaagcttggtcattaactgggtacaagtagagtgctgaggtaaaacattgatgaacagtttgtatttcttttttttttcttaaaataggaacagtttagtatt

SEQ ID NO: 731859 - DNA, 655 bp, Homo sapiens
gtcattttttcatgaagtaatgaaaatgcagataacaataattaaaaattatgtgagaaaaatactgaagcttgaaatacaatcacatatgcccaaagtggcttttattttttgtgggtggcaaccttaaccttcagttcatggaaacataaaagacacttaaacgccattggcatatgaagttgtttacaagtagacatgagaaatgtcatcataaaattaagcattaggtgtggtcccaaagacttatgagttacacagtataatttatattcctaagaatcggttcaggcacctttttatgccttgtagcaaaaaatttatctgtaaaaaattaatataagaagcattacaacaccttataaataatttataaaacaatacaaaattataaaactataaaaaaatcactgcacatgaatggtgttacgactgtsggatgaatatatttcttttttgttccactctggaagattacttttattttatattttccctgtcctagttagaccctcccaattatagatctcagaactgagcaggccttatgtaaccgctgccggcatatatttaaatatttagcatccatcatatgttatcttgttaacttctcttcgcagggagcttttcttgatggaatttggagcaggtccta

SEQ ID NO: 731860 - DNA, 643 bp, Homo sapiens
ggatgctagatcaccacactctgggtttctcttttagttacccaaccatttcttctctcatttttcctcttccattccttaaatgctgatgtttcccaagagggactcttagtcttccttcccttgcttctcatatttttttctgattytttttcttcccttgctcctcttgctttctctggtgtctcaattgttttcagctacaacaaatgtactcatgacttgactcccatgtactcaactccaagtacatgctctcattaattcttctttgtgttttgctatagactcctaaatggtttgctcacagtagatggtttacttcagttcaacctctgtagtgctatcagagttattttcttgaaaaaaaaaaaaaagctaagctttaaaaataccttttacacgtttaacaggtcctgttccccatgccacccaactgagtgagtccctccaacaggggttgtcagacaccctatataggagtgatcctactggcatcaggttggtgccccttgaggtcagaggtcccagaagaaggaggaggcacccattttttctgttctccagacttcttgaatgacatatccaggcacgggagtgaatcggatgagtagggcctgaagtgaacctcccagcaaactgc

SEQ ID NO: 731861 - DNA, 643 bp, Homo sapiens
ggatgctagatcaccacactctgggtttctcttttagttacccaaccatttcttctctcatttttcctcttccattccttaaatgctgatgtttcccaagagggactcttagtcttccttcccttgcttctcatatttttttctgattttttttcttcccttgctcctcttgctttctctggtgtctcaattgttttcagctacaacaaatgtactcatgacttgactcccatgtactcaactccaagtacatgctctcattaattcttctttgtgttttgctatagactcctaaatggtttgytcacagtagatggtttacttcagttcaacctctgtagtgctatcagagttattttcttgaaaaaaaaaaaaaagctaagctttaaaaataccttttacacgtttaacaggtcctgttccccatgccacccaactgagtgagtccctccaacaggggttgtcagacaccctatataggagtgatcctactggcatcaggttggtgccccttgaggtcagaggtcccagaagaaggaggaggcacccattttttctgttctccagacttcttgaatgacatatccaggcacgggagtgaatcggatgagtagggcctgaagtgaacctcccagcaaactgc

SEQ ID NO: 731862 - DNA, 642 bp, Homo sapiens
gtaaaaaatgaataagacatggtctctgccaccacagagttgagcccatggacatataaacaaattacttaaaggatgctggatgtcatgatttatgaattgtctagtttttatattcagaggttacaaaccagtagtgtttagatagattttcttctgtttatttaaatttaaaaaactgttgccaatatttataamttaggagaattcacacaaaaataaagattttcagcctctctgggaaaactaaaaggtctgacagcactggctctaccttcccacacagcaacaataggtcagagctgagccacggctatgtcctttcgataaggcatgcattctcctgttcactacattctccaccactccctattgtctctgacattgaggccaagtgtcaggtactttttatccttgtgtttatagtgttctcctgggtccatttttctcatatacattactttccagccttgtgagcgtttgagtttataatcactattaaactttacttttcacaaaaagcaatatataaataagagtcaaatgagtaacatgttactcgagtaacataaaatactcataaataattataaatactgataaatcataaatttatttttattaattaaacaatcaattaat

SEQ ID NO: 731863 - DNA, 642 bp, Homo sapiens
gtaaaaaatgaataagacatggtctctgccaccacagagttgagcccatggacatataaacaaattacttaaaggatgctggatgtcatgatttatgaattgtctagtttttatattcagaggttacaaaccagtagtgtttagatagattttcttctgtttatttaaatttaaaaaactgttgccaatatttataaattaggagaattcacacaaaaataaagattttcagcctctctgggaaaactaaaaggtctgacagcactggctctaccttcccacacagcaacaataggtcagagctgagccacrgctatgtcctttcgataaggcatgcattctcctgttcactacattctccaccactccctattgtctctgacattgaggccaagtgtcaggtactttttatccttgtgtttatagtgttctcctgggtccatttttctcatatacattactttccagccttgtgagcgtttgagtttataatcactattaaactttacttttcacaaaaagcaatatataaataagagtcaaatgagtaacatgttactcgagtaacataaaatactcataaataattataaatactgataaatcataaatttatttttattaattaaacaatcaattaat

SEQ ID NO: 731864 - DNA, 353 bp, Homo sapiens
taatccagtttttaaagatgggcaatgggcaagagacactaataaggacttcacaaaagatgttatccaaatggccaataaacatacaaaaaggtgctcaacctcattagtcattaaggaaatgcaaattaaaaccacattaagataccatttattagaaygactagaagttaaaagactgagaatacacctgttggtaaggacttggagcaactgaaattgctgataggtttgtaaattgatataaccactttggaaaactattaatatttggaagtacctactaaagctaaatatacatatacccctatgatctagcaattccacttcctagttatatatccaatgaaaat

SEQ ID NO: 731865 - DNA, 635 bp, Homo sapiens
gccttgaactcctgggctcaagggatccttccacctcagactcccaagcagctaggaccacaggtgcatgccatgacccctggccaattttttcttagagatgtggtcttgctctgctgcccaggctggtctcaaactccttagcctcctgaagtgctgggattataggcgtgagccaccatgcttgccctacaagttttatagcttaatcttctacatttgtgtctgtgatccattttgagttaatttttgtataagatgtgaaggttaggtgtgaaggttaggtggagtttttttttttttttttttgcctttggatgtctggctgtttcaacaccatttatygaaaggctatctttcctctattgaattactttgaacctttgtcaaaagtcagttgggcttatttgcatgggtctatttctgggttctctcttctgttccattgatctgtgtgtccatccctttgctaatgccacattgtcttattactgtagctatataataagccttaacatggggtagagtgattcctcccactttattcttctgtttttaaaatatcttgggatttttagttcctttgctttccatgtaaattttaaaataatattctctttatctacaaaaactct

SEQ ID NO: 731866 - DNA, 611 bp, Homo sapiens
aagcccgcagcagctcctgaccacctccccacactgaggcaccagctccttattctgctactcagggcccccactccctggccccaacaatgcttcgaaactgaccttatcctgccacaccaccccaaccacacaygccagcaggagtctttcataccactcacatttgcacttttatttacacatactccatgtaaaatgcctttactggccccatcctctgctttcaatacagtttcttccatttatattccaaaaggctaagaagcgcacctaacatccaagcacagagaaggacgctgccagccagcggacctgggcattacctaacacagacctcacaccaactgggagcttcgaagaatacttcctttcattacaaatgtcttagtctgtttccttttaatcatgtaaacacatgtgagaacattattttctgaaatttctctttatactaagatgagttagaaagataaagtagatcaaatcaatgacagtgagtactgcactgaagtggctacagttaagtagaatcagatctcaagagagaggcactgtatggtcacaacaagctgggatggcctcttaggaaggctacgtctcacggcctg

SEQ ID NO: 731867 - DNA, 611 bp, Homo sapiens
aagcccgcagcagctcctgaccacctccccacactgaggcaccagctccttattctgctactcagggcccccactccctggccccaacaatgcttcgaaactgaccttatcctgccacaccaccccaaccacacatgccagcaggagtctttcataccactcacatttgcacttttatttacacatactccatgtaaaatgcctttactggccccatcctctgctttcaatacagtttcttccatttatattccaaaaggctaagaagcgcacctaacatccaagcacagagaaggacgctgccagccagcggacctgggcattacctaacacagacctcacaccaactgggagcttcgaagaatacttcctttcattacaaatgtcttagtctgtttccttttaatcatgtaaacacrtgtgagaacattattttctgaaatttctctttatactaagatgagttagaaagataaagtagatcaaatcaatgacagtgagtactgcactgaagtggctacagttaagtagaatcagatctcaagagagaggcactgtatggtcacaacaagctgggatggcctcttaggaaggctacgtctcacggcctg

SEQ ID NO: 731868 - DNA, 608 bp, Homo sapiens
tttcattttagctgtttcagataataattacctaggaaatgagtatttgtcattttcttattagcttgcatttttttctcccccctttcctctgtctctttcttttcttttttcttttcttttttttttttgaaacggagtctcactctgtcaccaggctggagtgcagtggcgtgatcttggttcactgaaacctctgcctcttgggctcaagcgattctcctgcctcagcctcctgagtaggtgggactacaggtgcccgccaccacacctggctaattttttgtagttttagtagagacggggtctcaccatgttagccaggatggtgtcgatctcctgacctcatgatccgcccgcctcggcctcccaaagtgctgggattacaggcatgagccacyacgcccggcctcttttcttttttctttccggacaaggtctcactctgttgcccaggctggagtgcagtgccatgagcatggctcactgcggccttgaactcctggactccagaggtcctctcacctcagactccctagtagctggaactacaagtgcatgccaccatgcctgactagcttgcatttctttatgctcccagtgaacca

SEQ ID NO: 731869 - DNA, 621 bp, Homo sapiens
tgagtgactccattttgcttgtctgttggggtctagcacagaagttcagtccaaactgacggcctcccataaattttttttaatgccctgcagtgtctgaaggctagtcatcaataactgaatcatgttacattcagctcaagcaattaargtggtggtcaggtgcatttagcaaaacctaacaactatcatttcagaaaatacaggtttttttgtttgtttgtttttgtttctttcccagaggtgtgcagtccctctggagaaagcatgtgtgctgcagggaaaaccatgcacggtggacagcatggccttccacctgcatcacagtcacattctgattccaggcagctgtttcacaattctgtaaccaacggtaggaaaaataggcttaccctctacctgccactcatttcaacattccttcacaccacatgactccacatgaatttgtgcttcttgactcctctctgtttgttttttgtttttgttttttgagacacggtctcactctctcactcaagctggagtgcagtggtgtgatcttgctcactgcaaccgccatctcctgggctcaggtgattctcatgccttagcctctgagtagctgagaccacaggtgca

SEQ ID NO: 731870 - DNA, 621 bp, Homo sapiens
tgagtgactccattttgcttgtctgttggggtctagcacagaagttcagtccaaactgacggcctcccataaattttttttaatgccctgcagtgtctgaaggctagtcatcaataactgaatcatgttacattcagctcaagcaattaaggtggtggtcargtgcatttagcaaaacctaacaactatcatttcagaaaatacaggtttttttgtttgtttgtttttgtttctttcccagaggtgtgcagtccctctggagaaagcatgtgtgctgcagggaaaaccatgcacggtggacagcatggccttccacctgcatcacagtcacattctgattccaggcagctgtttcacaattctgtaaccaacggtaggaaaaataggcttaccctctacctgccactcatttcaacattccttcacaccacatgactccacatgaatttgtgcttcttgactcctctctgtttgttttttgtttttgttttttgagacacggtctcactctctcactcaagctggagtgcagtggtgtgatcttgctcactgcaaccgccatctcctgggctcaggtgattctcatgccttagcctctgagtagctgagaccacaggtgca

SEQ ID NO: 731871 - DNA, 621 bp, Homo sapiens
tgagtgactccattttgcttgtctgttggggtctagcacagaagttcagtccaaactgacggcctcccataaattttttttaatgccctgcagtgtctgaaggctagtcatcaataactgaatcatgttacattcagctcaagcaattaaggtggtggtcaggtgcatttakcaaaacctaacaactatcatttcagaaaatacaggtttttttgtttgtttgtttttgtttctttcccagaggtgtgcagtccctctggagaaagcatgtgtgctgcagggaaaaccatgcacggtggacagcatggccttccacctgcatcacagtcacattctgattccaggcagctgtttcacaattctgtaaccaacggtaggaaaaataggcttaccctctacctgccactcatttcaacattccttcacaccacatgactccacatgaatttgtgcttcttgactcctctctgtttgttttttgtttttgttttttgagacacggtctcactctctcactcaagctggagtgcagtggtgtgatcttgctcactgcaaccgccatctcctgggctcaggtgattctcatgccttagcctctgagtagctgagaccacaggtgca

SEQ ID NO: 731872 - DNA, 587 bp, Homo sapiens
tgccaccagttactcatctttttcagttattctctggcctttgtaggtaaatgattgataatgatttctgagagtctgctaattcacaagtattaatagaaaataataaaatcgagcattgttcttcaaacattcccactgcaatcctctaatgatagaaaaaagtgaatgagtatctctaacggggctcagagaggtaggatggaaggtgtattagtcagttctcatgctgcttataaagaaatacccgagactgggtgatttataaagaaaagagatttaattgactcacagttctgcatggcttgggaggtcttaggaaacttacaataacggcrgaaggcacctcttcacagggtggcaggagagagaatgggtgcaagcaggggaaatgccagaagcttataaaaccatcaggtctcgtgagactcacttaatatcacaagaacagcaaaggggaaactgccgccatgatccaattacctccacctggtcctgtccttgacatgtgaggattatgggtattataattcaagatgagattttgggtggggacacagccaacatctgacacagccatatcagga

SEQ ID NO: 731873 - DNA, 654 bp, Homo sapiens
aagggtgtcattttatactggatcctggctccccaaaagagggaaatactgtgggagaggacagtgcagagcttctaccctgtgtttcattgcaaggcagctcaaagccaatcagcccattttgtaatcagcccatctctcatgggagtctcatctccctgggcaggtgggaatgtttccttccaggtggccaagagcgtgcttytctgatccaagtgtgcaaagaatcaagtgcctctccataataactattagccatcccttaaagtatatttcctacctagttattacacaccaaagctctctcataatgcaaagtaatttctgataccctcaaaactcaaaaccatcagataacacaatgcaaaacagagcagggcctttgattttgagagggatctatctgcttttaattcctgggatttcatcaggaaaacagagggtttttttccccaaaacggggtttttggcacttcctctgtttttcccaatgagtccctggataccagaaattatcttagggcctctcatgtgcattaagagtggcaagacaaaaaaaaaaaaaaaaaaaaaaaggagaaaaataattcagccgactaagaagaaaaaaacctttttccagaaaaacaagttccaagaagagaaaaacataaa

SEQ ID NO: 731874 - DNA, 654 bp, Homo sapiens
aagggtgtcattttatactggatcctggctccccaaaagagggaaatactgtgggagaggacagtgcagagcttctaccctgtgtttcattgcaaggcagctcaaagccaatcagcccattttgtaatcagcccatctctcatgggagtctcatctccctgggcaggtgggaatgtttccttccaggtggccaagagcgtgcttttctgatccaagtgtgcaaagaatcaagtgcctctccataataactattagccatcccttaaagtatatttcctacctagttattacacaccaaagctctctcataatgcaaagtaatttctgataccctcaaaactcaaaaccatcagataacacaatgcaaaacagagcagggcctttgattttgagagggatctatcygcttttaattcctgggatttcatcaggaaaacagagggtttttttccccaaaacggggtttttggcacttcctctgtttttcccaatgagtccctggataccagaaattatcttagggcctctcatgtgcattaagagtggcaagacaaaaaaaaaaaaaaaaaaaaaaaggagaaaaataattcagccgactaagaagaaaaaaacctttttccagaaaaacaagttccaagaagagaaaaacataaa

SEQ ID NO: 731875 - DNA, 654 bp, Homo sapiens
aagggtgtcattttatactggatcctggctccccaaaagagggaaatactgtgggagaggacagtgcagagcttctaccctgtgtttcattgcaaggcagctcaaagccaatcagcccattttgtaatcagcccatctctcatgggagtctcatctccctgggcaggtgggaatgtttccttccaggtggccaagagcgtgcttttctgatccaagtgtgcaaagaatcaagtgcctctccataataactattagccatcccttaaagtatatttcctacctagttattacacaccaaagctctctcataatgcaaagtaatttctgataccctcaaaactcaaaaccatcagataacacaatgcaaaacagagcagggcctttgattttgagagggatctatctgcttttaattcctgggatttcatcaggaaaacagagggtttttttccccaaaacggggtttttggcacttcctctgtttttcccaatgagtcccwggataccagaaattatcttagggcctctcatgtgcattaagagtggcaagacaaaaaaaaaaaaaaaaaaaaaaaggagaaaaataattcagccgactaagaagaaaaaaacctttttccagaaaaacaagttccaagaagagaaaaacataaa

SEQ ID NO: 731876 - DNA, 596 bp, Homo sapiens
acaccaataaggaatcctctccacaggaccctgccaccctgccggaattttagtttacaactctgtatatcaacattaatttggccaagctcaaaagttttaacactggaaagtaatttgaatttcatccacatgcacaagaaaacctttaaagggttttaaggaggaaagtggcatgataaggtttgcattcagaatgaccactagggcaagaccaaaagcaaagactaggttgaatgctgtcactggaatgtagggtcctagtgatataaacagaaagtgggggtgtattcaaaacaagtccagagaaagcaaaggagaaaaggcactaaagaaagagggtatgtaaacatttgagagacaaaagagcctgctaaggagactagaaaatgmgtctaaagaagcataaggaaaccacaaggatgttttgcacaaggaagggggacaaggaaagtgtctttccaagagtgagttgaaaatagagtcagtgctgaagcccaaatgagccatgtacaaaaaggtgcctgtgggattcaacaaatgagagccatgtccatggggtggccagagaggggaagcagggactaacccacatt

SEQ ID NO: 731877 - DNA, 553 bp, Homo sapiens
gtctacagctcccagcatgagcgatgcagaagacgggtgatttctgcatttccagctgaggtactgggttcatctcactggggagtgtcggaaagtgggtgcaggacagtgggtgcagtgcaccaagcataagccaaagcagggcaaggcattgcctcacccgggaagcacaaggggtcagggaattcccttccctagtcaaagaaaggggtgacagatggcacctggaaaatcgggtcactcccaccctaatactgcgcttttccaactgtcttagcaaatggcaaaccaggagattatatcccatgcctggctcggagggtcctatgcccatggagccttgctcattgctagcacagcagtctgagatcaaactgcaaggtggcagtcagtctgagggaggggygcctgccattgccgaggcttgagtagctaaacaaagcggacaggaagcttgaactaggtggagcccactgcagctcaaggaggcctgcttgcctctgtagactccacctctgggggcagggcattgccaaacaaaaggcagcagaat

SEQ ID NO: 731878 - DNA, 405 bp, Homo sapiens
tagtaaaaagaaagtggatcaagagaatgagaagacaagccacaggctgggagaaaatattggcaaaagacagacatcggataaaggactattgatatggtttggctgtgtccccaccaaaatctcaccttgaactgtaataatctccacgtgtcaagggtggtgccgggtggagataattaaatcatgggggcagtttcccccatactgtttctgtggtagtgaayaggtctcacgagatctgatggttttataaatgggagttcccctgcacaagctctcttgcctgccgccatgtaagatatgactttgctcctccttcaccttccactatgattgagagacctctaaatcatatgtggagctgtgagtcagttaaacctctttcctttataaattacccag

SEQ ID NO: 731879 - DNA, 562 bp, Homo sapiens
acaccagaagagtacaatgcttataggtactatagttactgcagatttacataacaagaatataaacttaacatttctcaagtgaccaaatgcatcagcaaaaaagtagggacagcagagtttagagaatgccaaagggatttaggttggtcagtatggmaaatgaagactcgtcatctcacttaccaacaaacgagtaagaagaagcaggagtcttagtcaatactcaaaccaatcctgtgtgctgagcattgtttttatccccattttacagacacgagctgaggcttagagtgggaatatatgccacgtcacttagtacatgcccaaaccacaatttgtgtcaagcatccagtctctacatccatgcttataaacactataccatgctgcctccatgcaattaaactgaatgtgatttaattgctcaagttgttatgttaaacagtgtaaagtttgtaactatcacacattgtgatcagttaaaattgattatataaaatattatgtgtgttgtgaatatggcctttatttttcaaaataatcaaaacttatttcaact

SEQ ID NO: 731880 - DNA, 611 bp, Homo sapiens
ttaggttgaaagaatttttaaatttccatttttatttcattgttgaccgaacaatcattcaggagcaggttatttaatttctgtgtgtttgcatggttctgagggctccttttggagttgattttcaattttgttccactgtggtctgagacagtgcttgatataatgttgatttattgagacttgttttgttgcttatcatatggtctatcttggagaatgttccatgtgctgatgaacagaatgtatattctgcagttgttgggtagaatattctgtaaatatttgttaagttcagggtatactttaagaccaytgtttctttgttaactttctatcttgatgacctgttcagtgctgtcagtggagtatcgaagtcccccactattatcgtgttgccatttatctcatttcttaggtctagtagtaattgcttttataaatttgagagctccagtattaggtgcacacagatttaggactgtgacattttcctgttggactagtccttttattattatataatgtccctctttgtctttttaactgttgttgctttaaagtctttttgtctgatataagaatagctactcctgtgtccatttgcatgg

SEQ ID NO: 731881 - DNA, 534 bp, Homo sapiens
caattggcaggatggtgcatacttgctggaagagggaatacttgggggaagggaacaagtttgaaagagaaaatcaaatggtccattttggacacattgagttacagacgtttaagggatagccacacagaaatataagatcacctgtttgagtacgtgagtctaaatgtcagaggaaatgcttgagattaagacagaaatatgagcatyatcagtttaaagaggttatttaaagttcacggtgctggatgagatctctccttagggggatagaagatatagaaaaacaggacccaaccccaaaccccagggaactctgtgaccctcatctcttcttctgtccatgcttgtgctaggggtcctcactccccatggtaagtgctcgttcttattatgaacagctttgctctatgacacattgcatatggtggaaagacaaggcagacccctctctgtttcgtgcctcattatacacatattttatctcaatttccctttgtcttgcttttactccatgggggaagaggctatgtt

SEQ ID NO: 731882 - DNA, 577 bp, Homo sapiens
ttttatttctatttttatttttttgagatggagtctcgctctgtcgtccaggctggagtgcagtggagcaatctcagctcactgcaagctccaccttccgggttcacgccattctcctgcctcagcctcccgagtagctgggactacaggtgccaaaaattgctgtttttgatgtaagaaagagcattccataaaaggaaaagccgaaacaccacaccactgagaatatatagtaaaatttctacattaaaaaaaatccataaaaacaaagaaaagttaagaggaaaaatatgcttcctctggcaagaaataataatttattaatatacaaaaagcccccaaactcaacaggaaaagaagacaaagagcataagagaaaaatgggcaaagattatgaatagatattttagaaaaggaragacaaatggctttaaaactttgaaaagatgctcagctttactcatacttagaaaaatcaaaataaaattccaattttttaaactattaaatggtcatagagcaaatattggataatccactgtcttgcaaaaacatagggagaaaggtattcacattg

SEQ ID NO: 731883 - DNA, 613 bp, Homo sapiens
atacatggtatgggatagaatagggcatgatccaaattcttcatgaatttaggaatccattttggattcccttgtttttggaggttcttcagaggcagcaaggtagctcattagccaaactgtcaagtgcacttaatttttttttttttttttgagatacagtctcactctgtcacccaggctggagtgctgtggcacaatctcagctcactgcaacctccacctccctgattcaagcaattctcctgcctcagcctcctgagtagctgggattacaggtgcacaccaccaccamgcccagctaatttttgtattattagtagagacagggtttcaccatgttggtcaggctggtctcaaactcccggcctcgtgatccacccacctcatgatccacccgcctcggcctcccaaagtgctgggattacaggcatgagctaccaagcccggccgcacttaatttgtcatcctgaaacaggagaaaaatctccaggaggtcttacttcctagtcccagctctgctcatcactggacaaactgcttttccacatctggaaggaatgggagaaaaactatccctcaaaactcactagaatctgttctaataaggaag

SEQ ID NO: 731884 - DNA, 628 bp, Homo sapiens
tgaataggtggttttcccctcacagcgtaaacaaagccatggggaagttccagctgagcagagccctccacagctcagcaaagcctctgtagccagactgcctctctagattcctcctctctgggcagcgcatctttgaaaaaagtgcagataaaaccctcatctccctgggacaaagcacgtgggggaaaggggtggctgtgggcacagcttcagcagacttaaacattcctgcctgccagctctgaagagagcagcagttcttccagcacagcgcttgagctctgctaagggacagactgcctcctcaagtgggtccctgacccccatgcctcctgacggggagacacctcccagcaggggtccacagacacctcatacaggagagctctggctggcatctggtgggtgcccctctgggacaaagcttccagaggaaggaacaggcagcaatctttgctgttctgcagcctccacyggtgatacccaggcagatatggtctggagtggacctccagcaaactccagcagacctgcagccgaggggcctcactgttagaaggaaaactaacaggaatataatcaacatcaacaaaggacatccacacagaaaccccatctgaaggtt

SEQ ID NO: 731885 - DNA, 651 bp, Homo sapiens
tttatgggtattgggagtgtgggaatgtgataacctaaacaacctttgctctgaaattccatttttccctctttccctgaagtgtactgacctgtactacagagttaatttcttttgtatttttttaagaaaatattaaaaatcaatggtctcaaaaaaaaaagattttcttcttytttttttctagaagttttatggttttacatttaactccataaaccattttgaattcattttggtatatggtatgagacttgggttgatatccatttttttgccgacgcatgtctaattgctccagtactatttgctgaaagatatctttcctccactcaattgtttctgcacctttgtccaaaatcatgtgtaacatgactgggcatatttactcaggtctgtgggttttccattctgtttcactgatctatgtgtctatcactgtatccataccacagccttgattactgtagctatgtagtaatcttgaaattgggcagactcctcccatcttatcgttctttttcaaaattatttgagctattctagttcctttgcctttatatatacatttcagaataatctcatttacatctaatgtcacaagtaaaatcaaatcaaaattaaaaaatttattttatttattttgaaatt

SEQ ID NO: 731886 - DNA, 578 bp, Homo sapiens
ggtgaaaacttgagagatatcccacttcagggttcctgcaagaaaagtccccagggcaagggttcttctctgggaaagcccagaattaagaactggaagggtgagttgtcatcaaagaaaatgggggtaggggaagtgttaaragggctgggagggtgattgaagagtttatgggtgttgagtgactggatacttcataactcagctttattttgcttccgggagaattgagttctttatttttttcgatattgctgtttgtgtgtttttctgttgccgctctaacaaattaccacaagtttagcatcttaaaacaacacacctttagccaggtgtggtggctcacgcctgtaatcccagcactttgggagactgaggcaggcggatcacgaggtcaagagactgagacccatcctggccaacacggtgaaaccctatctctactaaaaatccaaaaattagctgggtgtgatggcgcacacctgtagtcccagctactcaagagtctgaggcaggagaattgcttgaacccgggaggcggaggttgcagtgagccgagatcgcaccactgctatccc

SEQ ID NO: 731887 - DNA, 578 bp, Homo sapiens
ggtgaaaacttgagagatatcccacttcagggttcctgcaagaaaagtccccagggcaagggttcttctctgggaaagcccagaattaagaactggaagggtgagttgtcatcaaagaaaatgggggtaggggaagtgttaagagggctgggagggtgattgaaragtttatgggtgttgagtgactggatacttcataactcagctttattttgcttccgggagaattgagttctttatttttttcgatattgctgtttgtgtgtttttctgttgccgctctaacaaattaccacaagtttagcatcttaaaacaacacacctttagccaggtgtggtggctcacgcctgtaatcccagcactttgggagactgaggcaggcggatcacgaggtcaagagactgagacccatcctggccaacacggtgaaaccctatctctactaaaaatccaaaaattagctgggtgtgatggcgcacacctgtagtcccagctactcaagagtctgaggcaggagaattgcttgaacccgggaggcggaggttgcagtgagccgagatcgcaccactgctatccc

SEQ ID NO: 731888 - DNA, 456 bp, Homo sapiens
taattctcccatcagcagttataacaaaggattagtgaataaataccatagactgttttgcctagaatcgaatccaatctgtctattaaactttgcttttattcaagtgcaaaatgctaaaacacataataactgcagtgacagccactgtggatcctcagaggtaaaagtagtcttgggacataaatcctgcaagctaatatygtttttacagggtttagaaaaccatttagctgggtttcaaacctcacagtgtgagcagtgggactctcatcaaactatagcatgtgcttcagtaccatttgtagactgactcattcccattgccttaagttgccatcagcaaaatgccagggactctatttcttgctccttagctcctcgttcttgcctgtctttccacgagggaagattttctagcaggagctcaagctgtgcttttaatgaaacacatcc

SEQ ID NO: 731889 - DNA, 366 bp, Homo sapiens
tttactagaaacaatttaatttcttcagttgtaaaaggtgtattttaaacctatataaaggtacatggagatcgtcattcagaataacaaaataaaaagcaatataaagacacaaatagatatagtacaatattaaatactacaatattcaagatgatattaaaattatayatatctacatctatatgcatgtaaggatctcagtaaatgatattgtctaaaattaaactgtggtaatttttgcagacctctgtgaatatattagaaaccattgaattgtgtgtacactgtgtgtgggtgaaatttattgtatttgaattatatctcaaagttctgttaaaaaatgaatggcttgatattctagtg

SEQ ID NO: 731890 - DNA, 633 bp, Homo sapiens
ttcctgttcattttcacagccttggttccagtctgaagttgccatttttcacctgaattattcagatggcctccctaactggcctccctaactgctggctccaaccaccttacacaccaccaaagccaccttcaagacaaaccattatgccaggcacagggactcacacatctaatcccagcactttgggaggccaaggcaggaggaccacttgagcccaggagttggaggctgcagcgagctgtgattgcacccctgcactgcagcctggacaacagagcgagactgtgtccccgccctctgcttcccccgccccccgtcaagacaccatatgatcacatcaccctctgtgcaaaaggcctttcttccccrgctgccctctgagtcaggcatctggtcacctcgaacccatccaccttgccagggtcacctctcagccttcctgcctctgcgtgtcttgtcttcatcttactgtctcacctctgagcttctgcacatgctgttcactctccacctggctacctgccatgtgtgccatggccagttccacttgccctgctcttctgcatgtgttggggccacaggcagcaccaccatgcagctctgcccgctgcactagactgctccctttta

SEQ ID NO: 731891 - DNA, 680 bp, Homo sapiens
gcacaaaggatcctgagcacaggctgcagtgcctctgagtgcactcggtcatctctggtttagcgggcacccaggcctaaccccagcagagctaatgcccaccagcaggacagagtccatttgggttcactgagaacaagatgctttccttcttggaagggctggcagaaaaggccgggtggtggtggcaagcccactctctgaagatcttacaaagacgggtggggaaagatggcctgctgcagggctgctcccacgcttgccctgtaagtcggcaagaccctcagragccaggccataggctgggcccaggcccctcagcaagcaagacatgccgtaggcttctccctcgtagagcattagttctgtgattcaaacccactgtgagttcttacatcttcaagttggctcatggggtccatacctgtccatgttctcccccaaatccaggcagaaaagcttctctgcctgccacacccttcagaccccacaccagcccgaccctcctgctgccccgcctggacacctctcctctggtttctgtccccatcctcagatctctcttgtgtccacactagctccctcgggaagctcactgaacactgacaacaccttggaccctccagcagggctctccccatcaatgctagacttgcaaatccaactgcccaatagatgat

SEQ ID NO: 731892 - DNA, 632 bp, Homo sapiens
tttgatagtgaagatgacacatattggtcataataaatcaacttatctattacaagaataagatgctcaatttagttcacaaaatgtaccccaactctgtggtgtattcaagagacacaaagtaattcagaaaagctaaaaataaagaaacagactcatttataccaggcaaatggaaacaaaaagagcaggttagcaatcctaatgtcagaaaaataattaaatcccaaagacattagatgtgacaaagaaggtgtttttttttttytaacactaaaggctacagttcacagtgaagataaaatacctgtggctatctatatgcacaaataaaatagcaatcatctttatgaaacaaaactacagggaggacaaggagacttacttagaaatacactaataataggagactttaatatacctctcacagtataagatagataaagttgacaaaaaaatgagatagacaatttaaacaacataatcgattgagcagatcttgtggatgtacatcaaaccgtacaacatgataatagagtatatgtattcttctcaggtgcacatgacatggatcacgtgttaggaaatgaagaacatgtcagtaactcttaaaaaccagaaatattgtaagg

SEQ ID NO: 731893 - DNA, 632 bp, Homo sapiens
ttaatctacagacttttttcaaatttttccaattgtaaaaacttagtattgtcccactactgctcttttccaggatccagtctaggatcccacatttcatttagttttcatttcttctctagtctggaagagttcctcagtgtttctttcctttcatggccttgacaatattaaagggtattggccatttagtttcacctcttgtaaatttatatgtaaacacacacataacacacatatacactttaacttaaatataaacacacctatagctaaatatagagctcacaatcaataataaagtaactgtcctttgtttttattttatggaagacataggctctgtgttcaacctcaagaatctctgctttttaaattttagaagaaattttaaaatatcagtcattgatctcctttctttcttctttctctctgcatccttccttccttccttttttcttttygttttccttttccttccttcattttacgatatagatcattgctttaaaaatataaaagatcaatcaatttcgataagacaattgcactcatctatacatatttaagtggatatattgtctactctcagtcttctttcaggtataattctttcatttttgatttctttc

SEQ ID NO: 731894 - DNA, 521 bp, Homo sapiens
aatatgtgggtgatctgtacagctggatattgttcatcaataaaaagaaataaaggaaatactgatacatgctatatgatatggataaactttcaaaagattatgtgcagtaaacaaactagacacaaaagaccacatattatatgattccatttatgtgaaatatccagaatagacatatccatggacatggaaagtaaattagtcattaccaagaaatagggtgagggattgattgggaggtttaggattttctttgagcaaagttgaaaaggttctggaattagtggtggtgrttgaacaacattgtgaatatactaaaatccactgacttgtacactttcaaattgtttttaaaaagtcctatttcccctattagaatcacaaatcccctgaattgaaatattcacggtctctttagaagatatacctctctagaagtacactgttacaatgaaagatgctcctgtgtatgctggtccattaagtcccattattgcaaacacaatcaactgcctgga

SEQ ID NO: 731895 - DNA, 626 bp, Homo sapiens
tcgtgcatttgtcatgtagttctcgtgccgtggttttcagctccatcagatcctttaaggactactctgcattggttattctagttatccatttgtctaattttttttcaaggtttttaacttctttgccattggttcaaactttctcctttagctcggagtagtttgatcttctgatgycttcttctctcaactcatcaaagtcattctccatccagctttgttccattgctggtgaggagctgcattcctttggaggaggagaggcactctgatttttagagtttccagtttttctgctctgttttttccccatctttgtggttttatctacctttgttctttgatgatggtgacgtacagatgggtttttggtgtggatggtctttctgtttgttagttttctttctaacagtcaggaccctcagctgcaggtctgttggagtttgctggaggtccactccagaccctgtttgcctgggtatcagcagcggtggctgcagaacagcagatattggtgaaccgcaaatgctgctgcctgatcattcctctggaagttttgtctcagaggagtacccagccgtgtgaggtgtcagtccacccctactggggggtgcctcccagtt

SEQ ID NO: 731896 - DNA, 663 bp, Homo sapiens
gtcatgcaaatctctctagcaaatggatactttacagcctgcttcagttctgctcctgaaaatactcttttctctctaccaaagggccaggctgcaaattttccaattttttacactgtgcttcccttttaattaaaagttccaatttaaatcattcctttgctcctgtgtctgattgcagggtgttagaagcagccacactgcttcttgaatgcttcrgtgcttagaattttcttccactaaatttcctaagtcatcactcttaagttcaaccttccacaaagccctaagacatggacacaatgtagccaaattatttgctagggcataacaaacctttacttcacttcccaataaattcttcttttccatctgagacctcataggactagacgttactgtccatattgttaccagcattctgtggtcacaactactctaagaagttccaaactttcctttgtctttctgtcttcttctgagatctcccaactcttccagcctctgctctttacccagttccaaagccacttccacatttttagttcactttatagcaatgccccactccttcatagcaattttctgtgtcagtccattgctgttactataaaggaatacttgagactgggtaacttataaagaaaagaggtttattttggc

SEQ ID NO: 731897 - DNA, 634 bp, Homo sapiens
tcagcccatccagcacatcctgtatcagagtcaaaggtcttctcctgatggtgctcagcgatgatgtcagccagcaactgacactcactctaggtcagcttgacaaaggtactgacacagtgaacgtaggcatcagtcttcatgtccaccatctctcctggccagcagcctatgcttgtcattcaaggcctcggacaggtgcttaactttgaaattattctcttgaccttccaaaggaaggaggttagagcatcccttttctgcaactaagccatgcttggaatgaatactgttttcagaaggttttgagccttatgacatccctggccacttgactggctttttggcaggtgtctttttcctcttgttggggatagaagggcagtagggaattccagaaaaagaactgttcttccagaaatacttctccaggccttgatgaagcggtccagctggctggagcaaatcttgtagtagacwttcataaattcttggttgcagctgtattccaccagccagcaggcgatgcagattacatcctggatcacactcttgggcaggtgctccagggacataatctcctgtacctccagatcatcatcaccaccgatcagatccaggatgagcacaggtg

SEQ ID NO: 731898 - DNA, 439 bp, Homo sapiens
ccctggactcaggtgatcctcctgcctcagcctcctgactagctgggactacaggcacatgacaccatgcctggctaatttttgtatgtttgtagagacagggttttgccatgttgcccaggctggtcttgaactcctggcctcaagtgatccaccctccttgggctcccaaaatgctgggattatgggtgtsagccaccatgtccactttatacaaaaatggtgttttaactggacactacaaaacaaaagacaaaaagaactgaagattgaacataagcactgttttctagttggtaaatttgtttctcctgaggatatggtttaacaattctgaaactgctgaatatgtttactggaattgaacaagtaaataagttgacagcagctggttggagccacatttcttatgattaaagagggatgtaacagagaagca

SEQ ID NO: 731899 - DNA, 546 bp, Homo sapiens
gctcctctcacctccctccttccccactttcttcttcagaatagttcattgtgaagaattccactggcatttcatacccttcaagttctacatcatacagctggtgtggctctaaacgtaggttttaaaaatcaaaagcaccaaagcagagagtctggctggatcaggaaagcaatagtgcaattttctgataacactgtttccccaacaaaacataaatctgaacaaatgaatcttacagaatcactggtgctggggagaattctttttttttttttttttttttttttggkgcctggtagggttatttcccatcttccaaagcctaagccctaatgagctccagggggacagaagtctgtcaatcacagggtacttttcaagtatagtcatctctgccccatcagagaaccacgaggcatgaaataattagaaagcccagaataactgctctgttttacaagagcaaaatccgtatgtggatcatttacataaacttgtcacttcccattacagttctaatgtcggctgggtagtaatcgcagg

SEQ ID NO: 731900 - DNA, 484 bp, Homo sapiens
cctgaatcttcctccataggtaagagaaggaaagaaatgtctcacaatccttaggatattctggaagtaaaagcactgataaagaagtttcagagcaaggttattagtgtgaataattaccataatcattcaggttttatttagattcatatggtatcttcggaagtggaattttaaagcagttgaactgccaggcactccttccttgcaaatttcaaactgcctgaggtttctatattttcagatatttaccattttctgttaaaaaaaaakgccttccctgaaatgttgactgttagcgaaatttatcttttccttcagtcttcacaggaatgtaggcgattagccacggagcccttctctgtctagcatcaggcatcagacgcccaactatacagaggccatttgaatggaactgcagaataatcttcagaagaaaaagcaagctcacatgagtggcagcagcccattgtgctgagttaaa

SEQ ID NO: 731901 - DNA, 590 bp, Homo sapiens
agtgagaacgtgcagtatttgattttttgtttgtttgttcctgaaagcagggattcttacctgagttgctcactgttgtatcccaagcacctagaacagtgtctggcttatagcaggtaatcaatacatatttggaaaataagtgaacgaatgggggaaataagagaaagttgtagttaagagccagggctcygggatcagagacagacagacccgagttcaaatgataacctgccactcataagcttcgtgaccttgctcagtctgcgtagctgcagcaccctcatctggaaaatgggcctaagaagggggcccactgtttcagattgcatgagtccacacaaggagaagacttatgggcttttgagaacataaattctcaataactggctcatgttcttcttcttcttgtgattcttccagattggttttgaaggtccccttaaatccaaatattagcagttcatgaagcataacctgtcttccaaaactgtgcttcacatcaacacctaggaagtgaccctcaccctcagtgagggatgagtcccctgtctcactcagcgtgttggcagtggtgggagcagcctgtt

SEQ ID NO: 731902 - DNA, 590 bp, Homo sapiens
agtgagaacgtgcagtatttgattttttgtttgtttgttcctgaaagcagggattcttacctgagttgctcactgttgtatcccaagcacctagaacagtgtctggcttatagcaggtaatcaatacatatttggaaaataagtgaacgaatgggggaaataagagaaagttgtagttaagagccagggctccgggatcagagacagacagacccgagttcaaatgataacctgccactcataagcttcgtgaccttgctcagyctgcgtagctgcagcaccctcatctggaaaatgggcctaagaagggggcccactgtttcagattgcatgagtccacacaaggagaagacttatgggcttttgagaacataaattctcaataactggctcatgttcttcttcttcttgtgattcttccagattggttttgaaggtccccttaaatccaaatattagcagttcatgaagcataacctgtcttccaaaactgtgcttcacatcaacacctaggaagtgaccctcaccctcagtgagggatgagtcccctgtctcactcagcgtgttggcagtggtgggagcagcctgtt

SEQ ID NO: 731903 - DNA, 590 bp, Homo sapiens
agtgagaacgtgcagtatttgattttttgtttgtttgttcctgaaagcagggattcttacctgagttgctcactgttgtatcccaagcacctagaacagtgtctggcttatagcaggtaatcaatacatatttggaaaataagtgaacgaatgggggaaataagagaaagttgtagttaagagccagggctccgggatcagagacagacagacccgagttcaaatgataacctgccactcataagcttcgtgaccttgctcagtctgygtagctgcagcaccctcatctggaaaatgggcctaagaagggggcccactgtttcagattgcatgagtccacacaaggagaagacttatgggcttttgagaacataaattctcaataactggctcatgttcttcttcttcttgtgattcttccagattggttttgaaggtccccttaaatccaaatattagcagttcatgaagcataacctgtcttccaaaactgtgcttcacatcaacacctaggaagtgaccctcaccctcagtgagggatgagtcccctgtctcactcagcgtgttggcagtggtgggagcagcctgtt

SEQ ID NO: 731904 - DNA, 660 bp, Homo sapiens
atcacctgaagttaggagttcaagaccagcctgggcaacatggcgaaacgccgtctctactaaaaatacaaaaaattagccaggcatggtggtgcatgcctgtaatcccagctatttgggaggttgaggcagaagaattgcttgaacccgggaggcagaggttgcagtgagccgagatcgcgccactgcactccagcctgggtgacagagcaagactccgtctcaaacaarcaaaacaaacaaatccttcaaacaacacagaagtgaaaagtagatacgacatgcagtctcctcccgcctgggactgtgtctctcagtttaatttgcatctgtcattgccaaggagctggacagatcaatgcagatgaggacgacaaagcgctctgtcacgatgaccgtctccacggggccccagtgtgtttacaaagcacgttacattgctgcacgaaggcaggagataggtgttagatcagctgcctctttctgccgaggaaatggaggctcagagaggttaagggagggcctcaaggtcacacagcaagagacacagttggggtgcaagcctctgccctcctgccgagcctcctgttcatcatttgcggggcccccaagggtctctcccctcctcttcctgatgcccgctgggctcaccttgatgcg

SEQ ID NO: 731905 - DNA, 660 bp, Homo sapiens
atcacctgaagttaggagttcaagaccagcctgggcaacatggcgaaacgccgtctctactaaaaatacaaaaaattagccaggcatggtggtgcatgcctgtaatcccagctatttgggaggttgaggcagaagaattgcttgaacccgggaggcagaggttgcagtgagccgagatcgcgccactgcactccagcctgggtgacagagcaagactccgtctcaaacaaacaaaacaaacaaatccttcaaacaacacagaagtgaaaagtagatasgacatgcagtctcctcccgcctgggactgtgtctctcagtttaatttgcatctgtcattgccaaggagctggacagatcaatgcagatgaggacgacaaagcgctctgtcacgatgaccgtctccacggggccccagtgtgtttacaaagcacgttacattgctgcacgaaggcaggagataggtgttagatcagctgcctctttctgccgaggaaatggaggctcagagaggttaagggagggcctcaaggtcacacagcaagagacacagttggggtgcaagcctctgccctcctgccgagcctcctgttcatcatttgcggggcccccaagggtctctcccctcctcttcctgatgcccgctgggctcaccttgatgcg

SEQ ID NO: 731906 - DNA, 659 bp, Homo sapiens
gagttacgttaaaattaatctctttactgatataattaaattttaaatcctgagaagaaaagagagaagggagaatggtgccgggtgtctagcacccccagccactggcccagcacaggccatggcatctgtgcatccagacacggggcgtggcatgcacaccccaccagggagacccaggccagtgttcccaaagcctgctcacggcaccttctactgcaggacagcagaggggccaacasccagcctgcaggagggaggacttctggcccagatgcaagagcagctgcaacctggcaacaaccagcaggtgactatcaggagaaaggacctggtcacccacatggggtgcagcacagctgctcctgctttctggaaggcctcaggctcagccccaccaggactgcagacactccctgcctggccactgccacaaagagcacttctgccacatggcagagacacgcacgttgcctggccgcccgcggcatgtgcggaagcccatagggaccaagctggctcggtggaggcagggcacaagggcgcagacttccaaaggctccggccccagctgccgcctcacagtctctcccaccatggcgctcagcaggtggtgaccttgtggacatttcgtaaacaagtcagcagccggtgatatg

SEQ ID NO: 731907 - DNA, 659 bp, Homo sapiens
gagttacgttaaaattaatctctttactgatataattaaattttaaatcctgagaagaaaagagagaagggagaatggtgccgggtgtctagcacccccagccactggcccagcacaggccatggcatctgtgcatccagacacggggcgtggcatgcacaccccaccagggagacccaggccagtgttcccaaagcctgctcacggcaccttctactgcaggacagcagaggggccaacagccagcctgcaggagggaggacttctggcccagatgcaagagcagctgyaacctggcaacaaccagcaggtgactatcaggagaaaggacctggtcacccacatggggtgcagcacagctgctcctgctttctggaaggcctcaggctcagccccaccaggactgcagacactccctgcctggccactgccacaaagagcacttctgccacatggcagagacacgcacgttgcctggccgcccgcggcatgtgcggaagcccatagggaccaagctggctcggtggaggcagggcacaagggcgcagacttccaaaggctccggccccagctgccgcctcacagtctctcccaccatggcgctcagcaggtggtgaccttgtggacatttcgtaaacaagtcagcagccggtgatatg

SEQ ID NO: 731908 - DNA, 585 bp, Homo sapiens
tctctaagagacattcgtacacagcccatgttcatgacagcactacttacattagctcaaaggcacagcaactcgagtatccaacaaaagatgaatcaaggccagagacggtggctcacacctgtgaccccagcacttcrggaggctgaagtgggcagatcacttgagcccaagagttccagacaagcctgggcatcatggcgaaaacccgtctctacaaaaaatataaaaattaaccgaatgtagcagcgagcccctgtagtcccagctactgaggaggctgaggtgggaggatcacctaagcctgggggggtcgaggctgcagtgagctatgatggcaccacttcattcagcctgggtgacagagtgagaccttgtctcaaaaaaaaaagaaaaaaagaatggataaacaaaacgtggtggaagacagtggaatattactcagccttgagaaggaaggaacctctgacatgttacagcatggatgggacattatgccgagtgaaataagcagcacaaaaggacaaatattgtgtgattccacttatatgaggtccctagagtagtcaaatgcacagacagaaa

SEQ ID NO: 731909 - DNA, 514 bp, Homo sapiens
agaacttgtatttgattcaggcagatctgagttgtggatccagttcaatatccttttttagattttgagaaagtcacttatcccatttttacagatgaagcagcaggctgagagtcataagcacaagtaaatacttaccctcttgaggtggaaggagcttgtgaggattaaatgagataactcatgtaaaatgttcagtatagtcccaagcccacagtaagcactcgataatggtaacttgctcagatggaaaaccgaattgctaagctaaagktgcagcagtcaggagagctaacccctagttaagtggctcctcttttaatttagattctcatctagtatatggcatggataatccaaatgcagcaaaacagtcaattataggaaagaatgctgatttcattttattttttattttgtttagaacaagttaaagatgatagaagtaaaactttaaacaaaataaatgtaacagagcaaagaatgattcatgggaattgggctttgctctgaa

SEQ ID NO: 731910 - DNA, 551 bp, Homo sapiens
atggctagacataatggtgtgcacctgtagtcccagctgtttgggaagctgaaatggaaggatcgcttgaggcccagagtctgaggctgcggtaagctgtgttcgcaccactgcactccagcctgggtgatagagtgagaccctcgtctcaraaaaaaaaaaaaaaaaagttgtcagcagtcaaaaaaaatagatttagactattacagcagaaggaggaaggccagttgggtgctgttgtggtaatctaggccaatggttcccagacttttgttaaagatacagcttcctattcttttagcacatttgaaatgtacaatacgttattattaactgtggtcaccatgcagggcaacagatcactaaaactaatgaattcagtctaactgaaattgcgtcttcatcaatatctctcctttcccggcctctttcctctatccacccctgctgcccccaccacagcctctgatatcagctttctactctgtttcagtgagatcaacgtttttagattccacttataaatgagaccacacagcatttgtctttct

SEQ ID NO: 731911 - DNA, 551 bp, Homo sapiens
atggctagacataatggtgtgcacctgtagtcccagctgtttgggaagctgaaatggaaggatcgcttgaggcccagagtctgaggctgcggtaagctgtgttcgcaccactgcactccagcctgggtgatagagtgagaccctcgtctcagaaaaaaaaaaaaaaaaagttgtcagcagtcaaaaaaaatagatttagactattacagcagaaggaggaaggccagttgggtgctgttgtggtaatctargccaatggttcccagacttttgttaaagatacagcttcctattcttttagcacatttgaaatgtacaatacgttattattaactgtggtcaccatgcagggcaacagatcactaaaactaatgaattcagtctaactgaaattgcgtcttcatcaatatctctcctttcccggcctctttcctctatccacccctgctgcccccaccacagcctctgatatcagctttctactctgtttcagtgagatcaacgtttttagattccacttataaatgagaccacacagcatttgtctttct

SEQ ID NO: 731912 - DNA, 611 bp, Homo sapiens
aacatccctcggttaacatgtgtatgtatgtggctgcaggtgggcctagatgcctgggacccacctgggctgggggatgagctctacagagtgccttttggtgagcagatggtataaacaggactcttgggatgtgaaaagtagtgtggctggggagggatgggtgagatgtagggacagcactgtggcagcagttgtgttgaagggtcccctgagcatgtcttctgacctccyatgacttcagtcccttccctgatcttcaacgtagtgactcagttttggcaagatgtgtcttggtactaatttctccagcctgaacattggactgcattgttttggcattgcagcagacattgccatcctgcatattaatgatgataacagtccagccaataggctcttaccatgtgcctgtgccctgtgccctctgcccagtgctgtatatgaattatctcatgaaatcctcatggcactccaaggatagtttctcttactgcctctgttttacagataagaacacggaggcttctgaattttaactgtcttgttccttgttcctggtcacgcagctaagtcactgacctgtcttgaactcgtgctctgaattccat

SEQ ID NO: 731913 - DNA, 585 bp, Homo sapiens
atttgatggtctcctggttaagaactactgttctacttcaaatcctttttccctcagttaaggaaacaggttcaataacaagcttatattcatgcaggcagttagagagagctggacccaaaacttaggtatactgtgtctctaacagggttccttccgcaccgtaatgaaagcatagcatagctggtagtctcaaaagattttagtttgaggatcaaatgatattgaggtttaagggaagttcggccttataactagaatgaagttttctgatatgtgytctgtgttaaactgaatataccacgtctgtttagttgggagaacttacaactcctgttaacgaatattctaaatgctcataactaaaaggtaggattagtataaaatctctgattctgataaaagactacttaaaatagcctccagtaagaaaccaaatacaatatggattaatggaaattatgaaaaaagccgttagaagacaaatttctcgcctgatcttcacagtatactctgtttggatatgtaatttaataaaatgtatcaatgacaagtcacccagcgaatttctaaaaaaattgaaat

SEQ ID NO: 731914 - DNA, 524 bp, Homo sapiens
gaggcaggtggatcacctgaggtcaggagttcgagaccagcctggccaacatagtgaaaccctgtcactactaaaaatacaaaaaaaaaaaaaaaatagctgggcatcgtggcacatgcctgtaatcccagcttctcaggaggctgaggcwggagaatcactggaacctgggaggctgaggttatagctaactgagatcacatcactgcattccagcctgggcaacagagtaaaatgtgagtttcatcttccacaatggaagatgaaaaataaataaataaaactatctcaaaaaataaataaaataaaatcattttgaaataattttaagctgatagaaaagttgcaaaaataatagagaagtcccttgtgtatcctttacacaagttcccctcatgttaaaaactcacataagtatcataaaatgatcagaaccaggaaaacagcagtacagtatcactaaccaaactacagtgcttagtcacatttcaccagttttcccccaatgtctttttcctgtttca

SEQ ID NO: 731915 - DNA, 478 bp, Homo sapiens
attttttttttaaagaaaagaaagaaaaccgttatccttaagtacatgtcgttttcaatactgggtgtaatcaaatggggcatacttataacacgcttgctgcaacccgaggtatgatgaatgtctccattggatgattgttctgcttttctgataaattagctccctttagcatgatatacaatttttacttgaaagaaagtctaatagacactggtcattcagatttggatatatttggcagatattttctcaaaaatgaatgaagtgagactgtaatttcaagggaaacaactatttgctgcccataaaaacttatcagcttccatctgaaaatytcaatttttctgatgagatcagtggtgacaattttttttttttttttttttgagactgagtctcgttctgtcacccaggctggagtgcaggggcgcaatctcaactggctgcaacctctacctcccgggttcaagagatt

SEQ ID NO: 731916 - DNA, 551 bp, Homo sapiens
atagccgtaccttcaaattgtatgtgtaatagtaatttgtatagatcttgcaaatttccccacttagaagttataccaggccagtcaggcacggtggctcacgcctgtaatcccagccctttgggaggctgaggcggatggatcaccaaggtcaggagtttgagaccagcctggccaacatggtgaaaccctgtctctactaaaactacaaaaatcagctgggtatggtggcatgtgcctgtaatcccagctactcaggagattgaggcaggagaatcgcttgaacctggaaggtagagtttgcagttagccaaggtsgcagcactgcactccagcctggccacagagcaagactctgtctcaaaaaaaaaaagttgtatcaatttactttcccgaaaacagtatgagagtacaatttctccaccctgccagtataatgtgttatcagaaaaagtgttttataatctttgtcaatctaataggtgaaaaattattccctcagtatagtttttttgtttttctcagtatagttttaatttacatttttaaat

SEQ ID NO: 731917 - DNA, 559 bp, Homo sapiens
gatcttgctctgtcacccaggctggagtacagtggcataatcatagctcactgcagcctcgaagactgaggcttaagcaatcctcgcacttcagcttcctgtagtgggagcagctaggagtataggagcatgccactatgcccagctaatttttttatttttatttttttgtaaagagggaggtctcactatgttgcctgagctggtctcaagcaatcctcccgcctccacctcccaaagtgctgggattayaggcatgagccaccgtgcccagccagggcttgcttcttgaagcactcatattctttggctttcaggacaacacatttgtccagttctcctacctccctggctgctccttctccatctcctttgctggctctttactactagatgttggactcccaaaaggcacagtcctctgacctcttttcttctcaatctacagtcaacccttaggtgatctcttgcaatctactcatttaaaaccccacctttcttctgatgatttccacatttatggctccagctcagacatcttccctaacttccagactca

SEQ ID NO: 731918 - DNA, 553 bp, Homo sapiens
aaggaactttccccggacttttatttgcttggccttcctgggacgaagagcagagtagctcggaagtttgggaaaacaaccctacgcattttcagaaaaccaaaccggaattgtccccaagcccccttgaaatgaatcgctcctgactccccctttacccttcccaaccatgtcccaaacctgacagtgatcgctaaggcctaacactttgcaatttagccataaaaactgtcagcacacccacgtacatatgtgagtgttttctatataaaactcagaaacccgcttccagcggactctgtggcatctcgttcttttctgtttcctaaaactgcaagggctgcaggaatgtgctgcaggaactttgacggtggttcccgtcgccctcggtagcctcgtggcgcaggrttttttaaagaacagctgagaagtttgggacattcctgcagagtaactaggggctggcggcccgggccagtggcgagactgcaactgtagcggcggcggcggggacacgttggtgtgtgcaggaaagtgcgtccgagccgtggag

SEQ ID NO: 731919 - DNA, 469 bp, Homo sapiens
ccctggagattagagtcttagagctctgagattctttcctcggcttattatattctactcttaatacttgtgattgtatttcaaaattcttgtagtgagtttctcagctctatcagatcagtttagttctttcttaaaatgggcattttgtcttttagcctttgtatcgytttattgtattccttagttttcttggattgggttttgactttttcctgaatctcaatgatcttcatttatatccatactctgagttttatgtctgtcatttcagcctggttatgaaccattgctaggaaactagtgtggtgatttggaggtaagtgcactctggcttcttcagttactggagttcttgcaatgatcctttctcatttgtgttggctgatattccttcagtctttgaagttgctgtcctttggatgggtttttttttcttctttgatgcccttgggatttcgattgtgat

SEQ ID NO: 731920 - DNA, 625 bp, Homo sapiens
acatttaattagttttctttatttctcctaagggatacatctatgaaaatctgaactgcattgtggttgaagtttcagtaggcttcagtatcagaataatgttcccaaatggcatatttcctattattagtcaacagtatgagctttgagtattttagtgcaatgtttataggacatggtgccataaggcaatacagctttaaccctgcactctcttgtgmgattttaatagctttgacgtagttccactctctggaagcattagagcacacataaagtgtgcatattcattgtagaaaacatgatcctaggacaatcacagtggtatattgcaaaatagcactaactcttcacctcttcctgtatctatgccttttgtcatatagctttgtaagatcctccccctctaattctggggtcagtcatgtgactagctcagacaaacagggtctaaaaaatcacttgtacaatatggcttactctctttagctctctatcatccataagaaggacacaccaaggctggtttgctggaagatgagacacatggaaaggaatttaaatatctcagccaaggccattcaaagcctccccaactccagcccacccctgacatatggaagag

SEQ ID NO: 731921 - DNA, 617 bp, Homo sapiens
atggctgaggtaatcttgcattatatgctcagctataaggctctagacttcaatggaaagtgatcattttcataatgttaaattccctttgtgagtgtggatcccatttacttgctaccagtcagcattcttgtcactttactccaagctgaatagcttggytatagcaggaaccagtagctgtcttgcccatctccaccaggtgtatgtgtagcacggggggtcgcaacatcatggttgaagctctttagatgacttgtcacgcccaggattcgccctttagttaccaaagtgaggtgaaaagagaaaaaaggattgtctccttgggttttagagtcactttattctctgagtttctaggtgctgatgagaaagttagagctgggaaagagaaaagggatccccatgacttgtccttttatcccgaggggtaatccaatactgcttttctccttttgttccatggcaactgtgcaagagactttagtagatgtccctcagttggggtttataagatgttgattagcctgagttatgagtttttgggaggaagagcacagaggtaaactgccattttcagcatatcatatcaggagcacaaactatcgacgtgattt

SEQ ID NO: 731922 - DNA, 416 bp, Homo sapiens
aaataaataaataaataaataaaacaggttgcagtgaagaagccggttaaaacccaccaagaccaagatggcgacgagagtgacctctggtcgtcctcactgctacactcccaccagcttcatgacagtttacaaatgccatggcaacgtcagkaagttaccctatgtggtctaaaaaggggaggcatgaataatccaccccttgtttagcatatcatcaagaaataatcataaaaatgggtaaccagccaccctcggggctgctctgtttatggaatggtcattctttcattcctctactgtcttaataaacttgcgttcactttatggactcgccctgaattctttcttgcgtgagatccaagaaccctcacttggggtctgggtagggacccctttcctgtaacactatcatt

SEQ ID NO: 731923 - DNA, 416 bp, Homo sapiens
aaataaataaataaataaataaaacaggttgcagtgaagaagccggttaaaacccaccaagaccaagatggcgacgagagtgacctctggtcgtcctcactgctacactcccaccagcttcatgacagtttacaaatgccatggcaacgtcaggaagttaccctatgtggtctaaaaaggggaggcatgaataatccaccccttgtttagcatatcatcaagaaataatcataaaaatgggtaaccagccaccctcggggctgctctgtytatggaatggtcattctttcattcctctactgtcttaataaacttgcgttcactttatggactcgccctgaattctttcttgcgtgagatccaagaaccctcacttggggtctgggtagggacccctttcctgtaacactatcatt

SEQ ID NO: 731924 - DNA, 633 bp, Homo sapiens
tactcattataatgcccttgggatccatccaaattgttgcatacatcaacagttattccttttttatctttttcttttctttttttttttttttgagacagagtctcactctgtcccccaggctggagtgcagtgacgcaagcacagctsactgcagcctcaacttcttgggctcaagtgatcctcccacctcagcctctcgtgtagctgggtccacaagaatcaccatgcctggctaattattttatttttgtagagttggagtctcactgtgtttcccaggatggtctcaaattcctgggctcaagtgatcctcctgccacagcctcctgggtagctgagactacaggcacacgccacctcacccagctaaaggaaattttgaatgcttcctgtttttggctattacaaataaaactgctatgagcattcacatactggttttttttgtgaagatgtaagttttcatttctcttggataaatgcccaggagtacaattgctagttcatatggtgaatgtacatttagatttttaagacactgtcagactatatttcagagtatctggaccattttacattcccatcagcaatgtgtgaggaacccagtttctccatatcctcactagcatt

SEQ ID NO: 731925 - DNA, 610 bp, Homo sapiens
atattatttaccttgattattgagttttttggtgcccctttaagttttgcacctgaggctggtgcctcacccaactcacattagcccctgccctgattatttctaacatgcaatccacaccatatcattagttcctcagcaaatactctactattatcactacttcacagttgcaaaaactgaggcacaactgtgcccaatgtcccaaaggaaggagaagaaaaatctgaacttgaaccccagtttcttcgttttttggttcagagcctgcccagtatagcactacaataagctgaattttataaattgggttttgagttaaggaatcaaaagcttcaggcttaagtcccacctctgccccagagtcttctgagccctccattttcacagacgtcagttgccctaggtggaactggactttaatattctccacatcccttattttttcccaaaacagtttaccagctttttytttcctgaaccaggagcaatagcaaaaattgggaatgggaagaaacaggtaccagccaggacacctgaacgaacttggagctcaggaacccaggaggggattggagagagtggggagactccatggtccacaatgaat

SEQ ID NO: 731926 - DNA, 590 bp, Homo sapiens
tcctaaatgggcatacaacaaataacagaactgcaagatacgtgaagcaaaaactaacagaactgaaaagacaaacatatccatacttgtgcttagagattttagcaaccctatctcaaaaattgacacaattactaaacagaaaatcagaaagaatacagaaaaactcaataataccacctaccaatttgatctagttgacatttatagaatgaaatacccaaaaacagcagaatacatattcttttcayagggccactttacacataacaagacagaccacatcttgggccatgaaacaaacctcaacaaatttcaaagagttgaaatcatacacagtgttttcttacaaccatggaatcaaactaggaatcaacaaaaagataacagtaaaactcccaatacttagaaactaacacttctaaaatctgcatgggtcaaagaatgaaaatacaaaatataaaaatatgtggaacacagctaaagtaatgccaagagggaagtttgttaacattaagtgtgcacactagaaaagaggaaaagtctcagatcaataacctatgctttcatgtggaaaacatagaaaaagc

SEQ ID NO: 731927 - DNA, 656 bp, Homo sapiens
ggccatgaaacaaacctcaacaaatttcaaagagttgaaatcatacacagtgttttcttacaaccatggaatcaaactaggaatcaacaaaaagataacagtaaaactcccaatacttagaaactaacacttctaaaatctgcatgggtcaaagaatgaaaatacaaaatataaaaatatgtggaacacagctaaagtaatgccaagagggaagtttgttaacattaagtgtgcacactagaaaagaggaaaagtctcagatcaataacctatgctttcatgtggaaaacatagaaaaagcaaaacaaacycaaaacaagcagaaggaatgaaatcataaaaacaacaaaaaccaaggaaattgaaaacagaacaatttttaaacatcaatgaaacagggttggttcttaaaagagagagaacaaacgaactaccagtatagattaccaaacagagattatcactacagaccctgccgacatcaaaagaataaggaaatactacaaaaaattcgatatatgtaaatttgacaacttagaagaaatggtccaatactgctaaaagcaaaaactaccaaaatttactctatataaaataggtcatttgaatagctctttacctattaagaaaattgaattcataattttaaaaattcc

SEQ ID NO: 731928 - DNA, 520 bp, Homo sapiens
cttcttttttttttttttgagacaaggtcttgctcttgttgctcaggctggagtgcaatggcgcaatctcagctcactgcaacttctgcctcccgggttcaagcgattctcctgcctcagcctcccaagtagctgggattacaggggcccaccaccatgtctggctaatttttattgtatttttagtagagatagggttttgccatgttggccaggctggtctcaaactcctgacctcaagtggttcacctgcctcggcctcccaaagtgctaggattataggcgtgagccactgcrcatggccctgtcaccttttgaatggtttgctacttagaaatttcctccaccagataccctaaatcctctctctcaagttcaaagttccacaaatctctaaggcaggggcaaatgttttcagtctctttgctaaaacacaagagtcacctttgctgcagtttccaataagttcctcatctccatctgagaccacctcaggctggaccttattgttcatatcatt

SEQ ID NO: 731929 - DNA, 459 bp, Homo sapiens
agccatttccttcagaggggtgagctccctgtctctggaggtgtgcagaggctgcacccaggccacatgtggcaggcaaagacagcaggtcacgcatagggaaggggcagggttgggctggataactgaagccagatcaatcatttggtcctcttgggaaagaattccagacgttcagtctcctgctctccatctctgccctagaagtgcttccacaaagagagagggacaggggcagggcagggcagggcagggcagcaggaagggttcagtcagctggagatggggaggcggccatagcgtgaacrctcagccccaggcaggtgtgctaaaggctcctggtccatgacatcgccagccgacgccggaatatttgtgctgtcctgggccctgggctcagcgtctctcgtctcttaatcatcctgagaaacaggtgcccttattcccaggtgaggcacc

SEQ ID NO: 731930 - DNA, 611 bp, Homo sapiens
agccagcggaggttggagcccgcaggtctcggttccccgaggtggggtgggcagctctctgtgccttgtactctgggggaggaagcagataccctgagaggaagagggggtcccccaggcttccagaccaggccccacaaaaggctcgcagcactaacacctggggaacgcccgaacagcagcctaaatgmtcattcatgcagtaaacctgtcctgggcacccccaagtctgcccaggccatgcaggagaagcgggggctgggaggggtgatgtctcagctagagcttccaggacaagtctgactctgccaggcagagaggtgggaggcagtttcaggcaagaaaatagcatgcgcaaggtgctccaaaatcacaaatgatgcctcatctaagctgctgccgagtgtccagtgggaccaccagtcaggccagaggcaagaggtgagaaggcgagatccgactggctgcggaggcatcagggagggtcccccgccccagccccagccctgcaaatggggctgtgcggccagaggtggaggatgtggggaagcgccagggccagggtgcatcagggctgctgtgtggaggatcccccgcgggagcagagggaa

SEQ ID NO: 731931 - DNA, 611 bp, Homo sapiens
agccagcggaggttggagcccgcaggtctcggttccccgaggtggggtgggcagctctctgtgccttgtactctgggggaggaagcagataccctgagaggaagagggggtcccccaggcttccagaccaggccccacaaaaggctcgcagcactaacacctggggaacgcccgaacagcagcctaaatgatcattcatgcagtaaacctgtcctgggcacccccaagtctgcccaggccatgcaggagaagcgggggctgggaggggtgatgtctcagctagagcttccaggacaagtctgactctgccaggcagagaggtgggaggcagtttcaggcaagaaaatagcatgcgcaaggtgctccaaaatcacaaatgatgcctcatctaagctgctgccgagtgtccagtgggaccaccagtcaggccagaggcaagaggtgagaaggygagatccgactggctgcggaggcatcagggagggtcccccgccccagccccagccctgcaaatggggctgtgcggccagaggtggaggatgtggggaagcgccagggccagggtgcatcagggctgctgtgtggaggatcccccgcgggagcagagggaa

SEQ ID NO: 731932 - DNA, 611 bp, Homo sapiens
tccaagctcttggggagctggaaacaggacagtgcttgtagagaacctggccctggccaggcgtggtggctcacgtctgtaatcccagcactttgggatgccaaggtgggcggatcacctgagtccaggagtttgaraccagcctggccaacatggagaaaccctgcctctactaaaaataaaaataaaaaaaattagccatgtgtggtggtgggtgcctgtaatcccagctacttgggagactgaggcaggagaatcgcttgaacctaggaggtggaggctgcagtgagctaagatcgcaccactgcactccaacctgggcggcaagagtgaaactccatctcaaaaaaaaaaaaagagagagagagcctggccctaaggaggggtctgaatctgaggtgcagggaggcagtgagggcagtcgaatggggtcacatctcagctctgtcacctgccgggtctttgaccctgggcagggtaatgagcctcagcttccctggtttttattctcataagctgtccaacaaaacctgttgctcaacgaattaaaaccaatcaacgaatggaatttatacaagctgggtgtgagcgtttgatggggtcagagtcgc

SEQ ID NO: 731933 - DNA, 565 bp, Homo sapiens
aagtctattccacccataagtgtctcttggatttacttgtaatctcccacgccttgcttgttctaggtgagctgatataatcacattctagatctgaagagctgaggaccagactctaggaggtcctgagacacacttgggaaggccctgactggccagtcagctggagccactgctgcaaagtgggcttgggatggtggcccgggtcggggaagacactctgcagaggtccaagtggggcaggctggatatcgcaggtccccgcagggacctgagctgtgcagaggactttacctgtcagtagaaactkcctgcagggccgcttgttctgctcatccagcaagatggcagctgcatctgcgagagaagagagggacgggattcggatggttcaggctccaccaaaggaggcaggaagtggaagccacaggggcacatggaccctttatctcgacacagctgtgcagaaagaagagtttcctgttccacggaggagtggaagcaggagatgaccacaggtgggagtcctgggcagatggatccgagctgcaggtgacctcaatcc

SEQ ID NO: 731934 - DNA, 585 bp, Homo sapiens
gtggaccaatgggggaacacagctcaggaggaggagactggggagagacacagagacagtcccaacagccaagcaggttgatggagaaagccattcttgcagcagacagggacagcagccattaagtcaggggctgtaatgggatcaggaacagacagtcattcaaaatgaaaacatataaaacctctcttctcccattactgcagagggaccgtgtcccagacacgcacacttgatatattaaatttggcagctctaatacaccccatcttgycaataaacttataggaattggattgaaattgtaagagatgaacgtttaacggccgagtgctaaaccaagccattcagaaagcttgaagctcccagaagcttgctggcgctggagagtaatggggaagggaggggacagggagggtggttctctgggagactggaacagaacggtggctctgcggcctacttagatagacaaaaccacacaggcattgaaaagctgcctgtgtgaccttgggcaagtcacttcctgtctctaggcctctacgttcactgtgggaatatgaggcaatggctgcttgatcagga

SEQ ID NO: 731935 - DNA, 579 bp, Homo sapiens
acctatagtcccagctacttgggaggctgaggcaggagaattgtttgaacccgggagacggaggttgcagtgagccgagatcgccactgcactccagcctgggcaagagaatgagactccatctccaaaaaaaaaaaagacactgctgcttccatctcagtgtcttctttctctgatcacttggtctgggggragccagctgccacactgtgagcagccctgaagggtggcccacgtggcaaggaactgagaccccctgctaacagccacgtgaatacatttggaagcaaaccctctggccgcagttaagccttcagaagactccaccctggctggtatcttgactgcaacctcccaagagactcagccagaaccactcagctaagcagcgcccagattcctgaccctagaaacagtatgagaaaataaaagtttgttgctttaggttggacgcagtggttcattcctgtaatcccagcaccttgggaggccaagaaaggaggattgcttaagtccaggagtttgagaccagcctgagcaacatagtaagaccctatctctacaaacagtttgtttttt

SEQ ID NO: 731936 - DNA, 579 bp, Homo sapiens
acctatagtcccagctacttgggaggctgaggcaggagaattgtttgaacccgggagacggaggttgcagtgagccgagatcgccactgcactccagcctgggcaagagaatgagactccatctccaaaaaaaaaaaagacactgctgcttccatctcagtgtcttctttctctgatcacttggtctggggggagccagctgccacactgtgagcagccctgmagggtggcccacgtggcaaggaactgagaccccctgctaacagccacgtgaatacatttggaagcaaaccctctggccgcagttaagccttcagaagactccaccctggctggtatcttgactgcaacctcccaagagactcagccagaaccactcagctaagcagcgcccagattcctgaccctagaaacagtatgagaaaataaaagtttgttgctttaggttggacgcagtggttcattcctgtaatcccagcaccttgggaggccaagaaaggaggattgcttaagtccaggagtttgagaccagcctgagcaacatagtaagaccctatctctacaaacagtttgtttttt

SEQ ID NO: 731937 - DNA, 553 bp, Homo sapiens
atctgacttcatgggactatacatttgctcctgcactcttggtcgattggactagggtacaagtgactctccagacccctctccatgctaatagcctagtggcccttcttccgtcaattctaatcctcctcgtgatctatcttctcaggaaagctctgcccatttccatgctcagtcactcacaaggcaaaacctcagtcctactgacaatccaacaccaaccatgactacagccagggaaatgagcatgatggcctggggctgtaaatgtccactcagtttgatcacatgtttggatgtgtggctcacgctaactgtatttgtgcccgtggacactgggmctgtttactgggaggtgttgctggttggctcacgggtggatcctgtagtggtcctgaagctgggggctgaggtggtagatgatgctcccatagtggatgtacccaggtcagaggtgtttgagactattccggtcacaggatggctgcagcagaggccatggagtccattccaggggccatggtgacagagctaggggcggtaggactggttc

SEQ ID NO: 731938 - DNA, 574 bp, Homo sapiens
agaggaacctgcggccttccgcagtgtttgtgtccctgggtacttgagattagggagtggtgatgactcttaacgagcatgctgccttcaagcatctgtttaacaaagcacatcttgcaccgcccttaatccatttaaccctgagtggacacagcacatgtttcagagagcacggcgttgggggtaaggtcatagattaacagcataccaaggcagaagaattttttttagtacagaacaaaatggagtctcctatgtctacttctttctacacagacacagtaacaatctgatctgtctttcttttccccayaaggaataggccattttcacttcttttgtggttcttcacttcaggccacctggatgtatatatatgtgcaggtcacaggggatatgatggcttagcttgggctcagaggcctgacattcttgtcttcttatattagtaagaaaaataaaatgaaatagtggtaaagtgttggggcggcgaaaattttggggggtgatatggagagataatgggcgatgtttctcagggctgcttcgagcgggattaggggcgacatgggaa

SEQ ID NO: 731939 - DNA, 633 bp, Homo sapiens
ttttattgaaataatttttttttttgaaacggagtctagttctgtctagtgcaatgatgtgatctcggctcactgcaacctccgcttcctgagttcaagtgattatcctgcctcagactcccgagtagctgggattacaggcatgtgccaccatgcccggttaatttttgtatttttagtagagactgggtttcaccatgttggtcaggctggtctcgaactcctgaccttgtgatccacccgcctcagcctcccaaagtgctgggattacaggcatcagccaccgtgcctggagtaagggctctctttatcagaagggcattacgcttgacctccaaatttggctgacaatctactgataagatgcatagtctttgtgttgcgctggtattttgacatgtttgctgggtcctsagccacatcctggaaggctaacataatttctggatcctgcatggctgcaagaatctctggatcactaagaatttcattgagtccggggattctggccattccagccatgccccctcccattccagacattcttctgggacaattaccaggcactcccgcaggaaagccacttggaaaagagcagtactgagctcctgactgtcttctggcttcttcctc

SEQ ID NO: 731940 - DNA, 633 bp, Homo sapiens
ttttattgaaataatttttttttttgaaacggagtctagttctgtctagtgcaatgatgtgatctcggctcactgcaacctccgcttcctgagttcaagtgattatcctgcctcagactcccgagtagctgggattacaggcatgtgccaccatgcccggttaatttttgtatttttagtagagactgggtttcaccatgttggtcaggctggtctcgaactcctgaccttgtgatccacccgcctcagcctcccaaagtgctgggattacaggcatcagccaccgtgcctggagtaagggctctctttatcagaagggcattacgcttgacctccaaatttggctgacaatctactgataagatgcatagtctttgtgttgcgctggtattttgacatgtttgctgggtcctgagccacatcctggaaggctaacataayttctggatcctgcatggctgcaagaatctctggatcactaagaatttcattgagtccggggattctggccattccagccatgccccctcccattccagacattcttctgggacaattaccaggcactcccgcaggaaagccacttggaaaagagcagtactgagctcctgactgtcttctggcttcttcctc

SEQ ID NO: 731941 - DNA, 645 bp, Homo sapiens
tcttaactattgccaattttgtttatcttctcaaaaaataaatttttaattttgatcttttctatggtttatctagtccctatttcatttatttttgttttaatcttttctttccttctgaaaacttggcatatagtttgttcttttttctagttctttggggtgtaaagttagtttatttaagatcttttttcttttcatgcaggcatttattgctattaatttcccttttataactgcttttgctgcatttcataagttttggtacrttgagtttccattttcatttgcctcagatattttaaatttccattttgacttcttttttgatctagtgattattcaggaatgtgtttaattaccacatattttggatccttccagattttccttctgttataaatttctattttcattcaactgtgattaaaaaaaccactttatatgatttcaatcttcttaaatttaggatttgttttgtggcctaacatctgatctgtcctggagaatgttctatgtatgcctgagaagaacgtgtaccccgctgctttgggatagaatgttctgtacatgtctgttaagtctggctggtgtaaaatgaactttaagtccaatgctccaatgcttttatattattttttctgc

SEQ ID NO: 731942 - DNA, 515 bp, Homo sapiens
agtataaacatgattttttaaaagttcaaaaaggaaaacagtgaattattgaatttctttccaatcctagtacccttccccaaaggtactgccaacagtttttgtatattcatacatttataagttaaatcatatttttccttatttgacatcatatctatgtttggtcttaattctgtcatctattktaaattctccctttagctctcttatatggcctgtgttatctttaattttgtgttttcattttaatagttatcaggcttacagttttggtgattaccttcataactattcagaatattacatccctatttcttgatatattatcaattttacaaaatttctattctgaaaagtaaaaccaattagggcatgtatatattacctcgtctttgatattctattttctaacttgttaatcatcttttctatatcaagatttataacatttcaatatgcttccatagccttatttaaataattctatagctacatagttaaataattaacca

SEQ ID NO: 731943 - DNA, 623 bp, Homo sapiens
ggtaggccttcatggatgatgagtacatagccccactcaacgatccttctctctacacccaatcaaatttgccacaggaaaaccagaaacaagtttaccatgtctttctgctgttttctctgatgagggggtctcaaattctgcctccctactgccccctttccctcattcargttggccgttagtgtaatctttatatccaaaagatacaataaaacatatccctcctgtcttaagtgattgttctgaaattctaaatatctcgattgtctgaggaccagttcattagaccttgctctaaccagaaatcttggtttgaaatttcattcaaacagccagagagaactgattagtcaagtatctgttcgatattatacaagtccttcctttagcagtatacatgatcaagacaatctacaatagaggtatgtgatatgaaagtaccatgaattgaaaacatgaagccaagagaagtaaatgaaagatgttttaactcttaatttcttatggaggaagacaagcagaatacgattgaagcagtgaacctggagcattagcagatactgagttgtcactctctacatcctctgattctctcactaacactttgccttacagcacac

SEQ ID NO: 731944 - DNA, 623 bp, Homo sapiens
ggtaggccttcatggatgatgagtacatagccccactcaacgatccttctctctacacccaatcaaatttgccacaggaaaaccagaaacaagtttaccatgtctttctgctgttttctctgatgagggggtctcaaattctgcctccctactgccccctttccctcattcaggttggccgttagtgtaatcttyatatccaaaagatacaataaaacatatccctcctgtcttaagtgattgttctgaaattctaaatatctcgattgtctgaggaccagttcattagaccttgctctaaccagaaatcttggtttgaaatttcattcaaacagccagagagaactgattagtcaagtatctgttcgatattatacaagtccttcctttagcagtatacatgatcaagacaatctacaatagaggtatgtgatatgaaagtaccatgaattgaaaacatgaagccaagagaagtaaatgaaagatgttttaactcttaatttcttatggaggaagacaagcagaatacgattgaagcagtgaacctggagcattagcagatactgagttgtcactctctacatcctctgattctctcactaacactttgccttacagcacac

SEQ ID NO: 731945 - DNA, 627 bp, Homo sapiens
ttattaacccattaatggattaaaccattcatgagggcagaggtctgtctcataaaccaatcacttccttaaaggccttgttaatattgccaaactgggaattaaatttcaacatgagttttagaggggacaaatattcaaaccataacmctacagttttacagaatgggaattatattagtcatctcgtttttaaagaattaacatattagatttatttgaatttataggaaataaaggaatctaaaaaatctgaatgtcacctagacatctgtaatatgacccccatcctctaaaggatccctctaaaaattaagaaaagtttacaaaaaaacagaaaggagttggagggctcattaaataagctcaattttaggcactatctattgatttcttgctgtgaaatgtggaaatcagcatggatacacacatgtacaaatatatatatacacatatacatacacacacactccctctgccacaaccaatttttgttaactgcttttatttggtaaaaatgtacatagtttacattatatgaattatgaactgtaattccatgactgcttaatcctggatctacattaaactagattccatgctcaacaagagtcctttttaatcaca

SEQ ID NO: 731946 - DNA, 624 bp, Homo sapiens
taatggattaaaccattcatgagggcagaggtctgtctcataaaccaatcacttccttaaaggccttgttaatattgccaaactgggaattaaatttcaacatgagttttagaggggacaaatattcaaaccataaccctacagttttacagaatgggaattatattagtcatctcgtttttaaagaattaacatattagatttatttgaatttataggaaataaaggaatctaaaaaatctgaatgtcacctagacatytgtaatatgacccccatcctctaaaggatccctctaaaaattaagaaaagtttacaaaaaaacagaaaggagttggagggctcattaaataagctcaattttaggcactatctattgatttcttgctgtgaaatgtggaaatcagcatggatacacacatgtacaaatatatatatacacatatacatacacacacactccctctgccacaaccaatttttgttaactgcttttatttggtaaaaatgtacatagtttacattatatgaattatgaactgtaattccatgactgcttaatcctggatctacattaaactagattccatgctcaacaagagtcctttttaatcacaactcctcta

SEQ ID NO: 731947 - DNA, 627 bp, Homo sapiens
ttattaacccattaatggattaaaccattcatgagggcagaggtctgtctcataaaccaatcacttccttaaaggccttgttaatattgccaaactgggaattaaatttcaacatgagttttagaggggacaaatattcaaaccataaccctacagttttacagaatgggaattatattagtcatctcgtttttaaagaattaacatattagatttatttgaatttataggaaataaaggaatctaaaaaatctgaatgtcacctagacatctgtaatatgacccycatcctctaaaggatccctctaaaaattaagaaaagtttacaaaaaaacagaaaggagttggagggctcattaaataagctcaattttaggcactatctattgatttcttgctgtgaaatgtggaaatcagcatggatacacacatgtacaaatatatatatacacatatacatacacacacactccctctgccacaaccaatttttgttaactgcttttatttggtaaaaatgtacatagtttacattatatgaattatgaactgtaattccatgactgcttaatcctggatctacattaaactagattccatgctcaacaagagtcctttttaatcaca

SEQ ID NO: 731948 - DNA, 466 bp, Homo sapiens
atttgcattatggaattcctaagaggttgagcaatatatcactccagtgggatcatcctacagttaaaaaccactggtgattagtcccaacaacttgtacagacatttcaattcgctttttattagctagtctaaattaccaacaccagttatcaatcaccagacattttaaggaatggctctgataagaaagaaaaagacaaacagtcacatttaaatgaatttggtagagattatgcaatgagatgaaaacttaaaaacaaacaacataccaccattaatatcttgagagasaaaagataccatgccattgcattcatgaagaacaaggtatcagtttttaaaaatcagaagacaaaagactcctaaaaattaaaatgtaagaaaattgaaaacctcaaatagaacagctgtaaatcagataaagaaatctccctgaaagtaagcaaagttaaaagacaagaaa

SEQ ID NO: 731949 - DNA, 588 bp, Homo sapiens
aatatatatttcttgagcagctctcaaaaagtaatcttaggatccctttaaactcttaattagtgagaatctccaaatagtttttatttatgtaggttttatctattgattagatttttattagaaattaaaactgaaaaatttttaaggctttatttttttcagagtagttttagattcacaacaaaactgagaggaaggagaacagagatttcccaatactctctgccccaacatatgcctagcttcctgttatcaacattcctyaccagagggtacatttgtttcaactgataaacctacactgacacatcattatcattcaaagtctacagtttacattatggttcacttttggtgttgtacattctatgggtttggacaaatgtacaatgatacatatctgtcattatagtatcatagaatattttcattcccctaaaagcctatgtataaactattcaaaacagtaatgttaaaccttctacctgttaacacaaatcatgtattttatgaaaaataactatttccatgccaggcgcagtggctcacgcctgtaatcccagcactttgggaggccgaggcggg

SEQ ID NO: 731950 - DNA, 588 bp, Homo sapiens
aatatatatttcttgagcagctctcaaaaagtaatcttaggatccctttaaactcttaattagtgagaatctccaaatagtttttatttatgtaggttttatctattgattagatttttattagaaattaaaactgaaaaatttttaaggctttatttttttcagagtagttttagattcacaacaaaactgagaggaaggagaacagagatttcccaatactctctgccccaacatatgcctagcttcctgttatcaacattcctcaccagagggtacatttgtttcaactgataaacctacactgacacatcattatcattcaaagtctacagtttacattatggttcacttttggtgttgtacattctatgggtttggacaaatgtacaatgatacrtatctgtcattatagtatcatagaatattttcattcccctaaaagcctatgtataaactattcaaaacagtaatgttaaaccttctacctgttaacacaaatcatgtattttatgaaaaataactatttccatgccaggcgcagtggctcacgcctgtaatcccagcactttgggaggccgaggcggg

SEQ ID NO: 731951 - DNA, 507 bp, Homo sapiens
ttctaataaacctctgcaagcgttgtaagatcaactcagatcttttagcaccatattgggcaggcccagggaaaatagttccccaaaattaaaaaaaaaagtaactttcagggaaatcatctaggggtcccccttatttggggcaccttcaagttccctgctcattgcaggaccttaggcaagtaaaaggagacttagactgattttctaatgmcccgaaataggtatacagagactttccaaaatttaactcaggtatttaacctcacacgggaggatgttatgttgctgctaactcaagccctcactgcagctaaaacaggcagctctgcaagcagaagagaattttggagataagcaatatgtctcctacagtacgccaaaagggaaaagaaaaaatagggaaggcaaagaaatagaggaaacactattcccaataggaagagaggcaatacttcttgaaaaccctaactggaattcctttctatggtgtttttccttctttcg

SEQ ID NO: 731952 - DNA, 507 bp, Homo sapiens
ttctaataaacctctgcaagcgttgtaagatcaactcagatcttttagcaccatattgggcaggcccagggaaaatagttccccaaaattaaaaaaaaaagtaactttcagggaaatcatctaggggtcccccttatttggggcaccttcaagttccctgctcattgcaggaccttaggcaagtaaaaggagacttagactgattttctaatgacccgaaataggtatacagaractttccaaaatttaactcaggtatttaacctcacacgggaggatgttatgttgctgctaactcaagccctcactgcagctaaaacaggcagctctgcaagcagaagagaattttggagataagcaatatgtctcctacagtacgccaaaagggaaaagaaaaaatagggaaggcaaagaaatagaggaaacactattcccaataggaagagaggcaatacttcttgaaaaccctaactggaattcctttctatggtgtttttccttctttcg

SEQ ID NO: 731953 - DNA, 614 bp, Homo sapiens
cccaggaattaaaaggagatggatccctctcaaaatcaaaggctctattctgttttgcattgtgttatctactgtgttttaagtttggggggtatcaaattacttcacattatgaaaagctttggtgtgtaataactaagtagaaaatacactgtagggatggctaatagtagttataaattagaaagcatgctcttggccacctggaagataaggaaacatccctaccccccactgggagatgagcctcccatcagggatggactgattacaaaataagccaattggctttgggttgccttgcaatgaaatgcatggtagaagaactacagtgtcttctcccatratatttatatgttcttttcataaattaagcattgaaataaacgcatagcaagagggtcttaaggcactaatctgccctttagtaaaaaggttataaaaggtttgtaaagatttttacctcatggtcaaagtggataaaattagatgaaataatccataaggtttcatttaaactaattggggttaacattaataaactagtgcaagggtaaaatttggatttaaacaaaattttcatgtcacagtaaaggctaatgaaagatttttgc

SEQ ID NO: 731954 - DNA, 536 bp, Homo sapiens
ggatcactggggactactgagattggggaggggagtgcaataaacttcattcattgagaataaagaactcaggaacaagaaggagatggtcgtgtgactctttggaggaagagcctccccatcagaggaacagccaaggccagatctccaaggcaggaagcaagcttgatctgtccagagggcaagaggcaggctcgtacgcctggaggttggccacacagaacacagtggagaggagaccaggaaggcaggggctgtgtcaggttttaaaagaaatagaaagtcctggaaggcttcaagtggtaaggggtccagtttatgtttttaaaagatgttagctgctgagtgcagaatggattgtaaagggagaggagtagaagcaaggagmccagtttggaactgtgtccactgggttagagaaatggaaggctggttgggcacaggtgatatggtgaaatcaagagaagcaaatgggtttggaggcaaggctcctggtcctctctgatggatggggcttgcccatgagaaaaagagga

SEQ ID NO: 731955 - DNA, 603 bp, Homo sapiens
gacacggtgtgctgtccaagcatgaagggagggtacttagctcagccaagctgcagatggggcagtcacggaagaattctggcatcctctcatctaatggatggctcctggaagcataatttcttaatactcttttwaaaaacagagtcaggaatgcaactgaggaaatcagtcagcaaatggaaaatagttcagatatcagatttaatgtgttcagatattaaatattgttgatagaaaatccgaaagaatctacaggtaaagtcttagaattcataggtaaagttttcaaggttgcaggatacaaggttaataactgcctttctatacatggtcattaaacaaggaaaactggaaataaaattttgcaggatacaaggttaataataactgcctttctatatatggtcattaaacaactggaaataaaattttgcaggatacaaggttaataataactgcctttctatatatggtcattaaacaactggaaataaaattttaataaatgcatcacagataggaaatttccatgcataactgtagtgaaaaatgaggcgatctctgtgctgaaaattagaaaacatgatagaaataaaggaa

SEQ ID NO: 731956 - DNA, 499 bp, Homo sapiens
ctccaacatttgttgtttttttttactttttaatagtagccattctgactgatgtaagataatatcacattgtgttcttaatttgcatttctctgattagtgatgtggagcattttttcatatgctagttggccatttgtatgacctcttttgragtctgtcttttgcccactttttgaagtgtgtcctttgctcactttttaatgaagtcatttttgttattgttgttgagttgtttgcattccttgtaaattctggatatcagtctgctgttggatgcatcatttgcaaactttttctcccattctgcaggttatctgttcactctgttgatattttgctgtgcagaagctttttagtttaattaagttccatttgtttatttttgctttagtcgtctgtgctttcgaggtcttaagtcatgaattcttttcctagaccaatgtccagaagagttttcctaggttttcttctagtatttttataatttcaggtctta

SEQ ID NO: 731957 - DNA, 476 bp, Homo sapiens
gtgtgtgtgtgtgtgtgtgtgcgcgcgcgtgtatattatctgttaacccagagtagtatcatcagtcttactatggtaaagtttcatgaataaaaatcattaaaagattttacttttcttaaagattctctcacaaattctttggagacattcaagcacagttttttttttcttttctgactcaaatcacaaaaccacttaagagtccctctgctttcatccttcccgcgctgggacacagctgctyctgggaagccccccagttgtctgcacagccgcatggggcctgttgaacagaaacattccttttgtacaaactttagtacttgagaataccagttagtaaacaaacaaaactatttaatgagggtgtttagctcttcacacactttaattaatggaaaacaaaatggaagtgtgtgaggctcacacaggaggatgaaactggaaaaaggaagcttggaatcttaggctcc

SEQ ID NO: 731958 - DNA, 483 bp, Homo sapiens
aaatccagtcaattcagttagctttgcctgatgtgattgtacctatgataccttatctcattgttttacaacttgtctgatgaaacaagtacctctatcactagcaatctttccaggtatgtcccatgagagaaacatgtttcctaataaccttttgtctactgttacagcacgagactttttgaatggaaaagcttctatacaatcagaaaacatgcattgaaaatggcaatggaatgaaatccctctaaaaatgtttcagtggcctataatgtagcagaaatgtacatgaagttttgattgccttcccaggattgtagatttgacaaaccaaacattggrcataaactattttagcaatttagaacatgccaatattctatttggatcatcttacctcttccatgatgggccttggagtgtagagcttttagtaatggaagctttaaggattcaggaaggaccaggcatctgtccaggctc

SEQ ID NO: 731959 - DNA, 506 bp, Homo sapiens
aaatccttttcccattatctggattttcagctaccacagtgaggatgtgtgttcagaggaaggttttccccacctcacacactgggaactcagttttttgcctgtgtctcatggaatttgcaatgatatgctgcttctttcaaaggattcgtgaattctttgttttcctggtacatcctacaatggttcttggagcaaaagttgatggtgtgagtctccgcgcactgttctgtccttccaagtgggaactgcacattagtcctgcctcctgtctgccgtcttcctccaattttttktttctggctattgtaaatgggattgccttcttgatttccttctcagctagatagtagtttttttttttttttatatagaaatgcaactggtttttgtacattgattttgtattctgaaactttactgaatttatcaaatccaagagcttttttgtggggggatccattaggtttttctagagataagatcatatcatgaacgaacaggga

SEQ ID NO: 731960 - DNA, 628 bp, Homo sapiens
ggtttagaccaggcttgttccccattgtctgtttcgtgctttcagtgtggcttctgttaaacgcaggcaccatcctgcagctaacacagtcacagcacaaaacagaaaacgcctggcttcctctgcctgtgagtggctcagcctgggaaagaatggctgctatttacgtggggactccacatctgtactcggttgtgaaaagtcattagcttaccaagcaggggatgcctttctcaaacatctgtgcagatgtcatgtggttgagtctgagactcagatgcatgtggcagtttaaaaagartaggccttctgcacaagtctaaagaggccatcagacctgggaccttgcccggctcctgctgggcacacccatcgcaggtgctcccggctggcagtgcacacaggctgggtaatccagctttccttcctctcaccccctccagtaggaggcagggcaggtccttgggactcagcagggaatgaatcacagcacacacaactcaagcttcctttgatctattcaggttgaaaaacctgggtgtgccctggcaggaactgtttataaaatgaaaaagtatatatatgaaaacatttctgccatttccaaggtcatcaaccatagctctaa

SEQ ID NO: 731961 - DNA, 624 bp, Homo sapiens
ctcccttggccgcctccaggccttccactgtactggtttggatttgccatggtagatttgttcaactaccagttttgtatcctgaagcacggaagccacatgacttccacacctgagtaccttagagaacaacagaagtgctgttctttggagcaaggatggctaggccactccggggtcctttccctgcagttccctccacatactgggtctcatgagaaggagacccctgcccttccctgggcttctgtgtgaagccctcagtaaatgacagtagcggggcagagctctcatttcccctgtgaaaacctctcttcagttgcagcaacaccgggtagagcagttgtaacttacactgaagttactctttgtccgccagccctaacaaaattgtcagaggcctcygaaccagagcaactccatcttgaataggggatgggtaaaataaggctgtgtcttttcttatgttaaagcaaagggggaaaaatgttggttttgaatacacactagccagtcttttttgtgtttttactcaaggcttcagtgcagggtgtatccagcagcctcccagcccccaccacaatgctcctggcccctgaccctgtgctcctctttccccctgtg

SEQ ID NO: 731962 - DNA, 624 bp, Homo sapiens
gagaacaaagaaggggactgagcatactctagcaatgaccagtggcacgactaggaaagttctctgccgagatcacttcctcctggcaaaaacaagggctccacagggcttagggtagagagcagagactcacaatgaatcacggggctgcagtgagccaggcactcagtggtgtcacytcaggaggttccgatgacctcacatcaaggtggtgtgccgatgcaggagcaatgcaggccctgaatgttgccccacctgatgcggccactcagctgaccgatgagactccagcccagcccctgctttgtcccttagattgtgcagagtttgagaagcccagctcctgagggcaaggccagatctcacaaccagaggcctggggacccgggccagcacctagccttctctccaccaaaagcttggtctctatttttactccttgttctaacacacccatgcttaaaggatttctgaaatgtgttctggaatgccgtgtggctcagctgagaccctgaattccatgtcacactgtcgtagcagctgcactatcaagcacaagcacaaaggcaggagtgtttccaggcggcccacccaagacagcagtcctttaaattgactcctcat

SEQ ID NO: 731963 - DNA, 538 bp, Homo sapiens
agctttgttcttttttcttaggattttcttggttatacaggctctcttttggtttcatatgaaattttaagtagttttttctaatcccgcgattagaaaaaaaaactactattactacaaaaaaaaaagctactattgtagcttgatggagatagcattgaatctataaattactttgggtagtatggccattttcatgatattgatttttcctattcatgagcatggaatgtttttccatttgtgtcctcttatttctttgagatgtggtttgcagttcttcttgaagaggtccttcacatcccttgkaagatgtattactaggtattttattctcttcgcagcaattgtgaatgggagttcattcatgattggggtctctgcttgtctattgttggtgtataggaatgcttgtgatttctgcacattgattttgtatcctgagactttgctgaagttgcttatcagcttaaggagtatttgggctgagacgatggggttttctaaatataaatcatgtaatctgcaaacagagata

SEQ ID NO: 731964 - DNA, 633 bp, Homo sapiens
gcacactatctaactcaatctgaattaaatgccattaagggaagcattatagttatccatttagtgaataaaaatatgaatctccaaaggagaaaataacatcaccaagggcatgctgttgaaagtgaagttggattttgagccaaatcattcttattcacaaatccatattttatttacttcactgacaagcgagaaatggaaagcagctaaacacaatttttgaactgtacttagcaycaacggagtaaaaaaataaataaatgctaaagatttggcttcattcacacttcattcattcggcgagactcacttggagcagtgaactgaccaaggcccaggcaaagaaacaacaaatgtgcctgcagccttctctacatatccttgctccctgggaaaaccagactgcctgcctcccctgtcatggttattgcagtctcttggcttttttggctttcaagtcactgtcccttcaagcctttggtttgagaatatagtaaatgttcttggcaacctgactagcaggcactctttttttttttttatttttgccttccagagaagcctgagtcagtttggtcaggtttccaaacatccttcatgtaaattatgtgcctcaaaagaagggtgact

SEQ ID NO: 731965 - DNA, 644 bp, Homo sapiens
tccagccacaaatgtgattttaggaactcaaacttcagctctacctttgtttgacaaagaaatccattctgtgttaccacactataaagcaaattgcatacattttctcctcatttttaattactaattttgtcacataagaatatcttatacaaaatatgaatttaggtattttccagaaatctccattgtcaattgtataattttattttaacaggatttcttagagatatgttttcaacctatctggttacatgattcaaattgaacattattacacagaatcaaaaaataattaaattacaagactacctagggaatgtcctgttctgcaatgtccatggtcatcactagccacatgtggccatttaaatttaaatkaattaaaactgacttctggtttctggttccacatgtaagaagcttggaaattgccaccccattctaacaacacgtaaaaagctatacaatcagaaaaatcagtaactcttcttgaatccaaaagagagaggcaggacacacaacaaactgctgccccaagattggaaagacagttggaataccagcagtcacagcttagcacaactgcctcacaagcagaaacctccaaggcaacccaggctggagtaagaaacctaactgta

SEQ ID NO: 731966 - DNA, 694 bp, Homo sapiens
ataggaatcatcagacggttcacactcggggggtcaaaattattaagtttcttatttaccagtagcaggaaacaacttgaactaacaagcacaaagggcaacatataggaatgattttgagagtctttacttagaatcctcttccctcagatacgtctcagtttttcttgtttttccttaaaattgttattcaaatgtaactttcttagtgagttcttacatgacctcttttaataaaattataatcccctatagattctcaactccttttacttaacatattgcatattgacttatttatattgtttattttccrtctactctcactaaatataagatccatgagggcagagattttatacaattttaagatttatatatagaccaattgctttggcctcagcaactaaaacgaatgactggcacacaatgagcattcaaatatttgttgaataaatgattgaaattgaattttataaaatctgagaaaaaataaattttgacttcagaaagaaccagggccatgtcctttcaaaacaatactctttagattttttcccctggagacctaccattaacatggaagcccatttttatggatagaatgtgtctaaagtcccgttcgatgttcattctctgttagcatacccaaacagttagtttggaggaagatacaactaacttgcctatcatc

SEQ ID NO: 731967 - DNA, 480 bp, Homo sapiens
ccacacagatgtctcataagtacaacatcttaaaaaataaacttgttttcctctcccatattccatgtcaccaacaaacaaacaaaaaacaaaaaacactcccactgacattttgcttacgtaagtactgccacacattcacttgaaaatgcctgaacccatcctctcctctgttcttccactcttgctgcttaatatataatctcaatatttttttggctaacctactgcaataatcttttcctaattgctctcccctacctccagtttttcccacttccaactgtatttcagttgttgccagagtgaaatttytaaagtgtacatttaaacgggtgacacccacataaacaatttcaatagcccgttactgcctaaaagataaagttctaattacatagtatatccatagctcctttatagctttgcttcagactccacacttctaacccagtctcctgccactactaccatgcatat

SEQ ID NO: 731968 - DNA, 576 bp, Homo sapiens
ggactgatgggagaagtgcttgcaaaccaagatcaaggtgtcatttctctgctaatactgtctaacaagctgacccttacaaaaacgcacgtaaaatcaggcaggtttagctactgtgttgcaagagaaaccaggacctttctaaatagttctctccattaccatttattctctcaagggaaacttaaaaaaaaaaaaaagaagaaaaagaaaaaacaacacattagtctggccacctcataaatcgaacaagcattgctgtggcatttcagtggaaaaggaaacttgagggggaaaaaaaccatcaacgttgtaagaaaggcttccaatttaaccgtccctgtccctatttatccacyttaactcaccacccaagaccatccattattctagagcaccctgatctataaaaggggtcaaagcatcaggaacaggcaaggagtgagaaccaaaagacatcaagaaaccgatttgcttgagaaaagcagtgattcttcctcttatagcctccatggctgagagagaaaatgcccaagagattatccatgtgacttggagactgcttatttattgcat

SEQ ID NO: 731969 - DNA, 615 bp, Homo sapiens
acacaatttgtatgaattttgtttgttccatatacaatttgacagaatggtcaaaaaatggtctcatcttggtcccttactttaagccaagatgaaggaataggtggaaatttatgcttctagctattaagaggaatgctccaatgaccatctttgaagctgtctattttagtccactttagccttcacctaatcttttaataagagaattaaatatgtttatacttttttggtgtaaattgcacatccaacttaatgttgttaccttagatttgctttccctttttttattcccttcccccctttttattgtgttatatattctgtatactttaatttccctaaagactttttacttagaatgatttttgatatgtgcactagttttaaattctacttttakgtgttaacgttaacctgcaatttatttatatgataattttctttttctttttattaattaactggaaatgcttttgatacattttatagaaagactgtatatgaggtttattttggaattatttaatatggaatagtatttcttttgcctttatgataatatatcgtttaatattgtgaaggtgagatctgaagtctgatctttttttcttt

SEQ ID NO: 731970 - DNA, 500 bp, Homo sapiens
gccaaggttgctgggacttggggatgcaaagatggaagaggaaagaggatgcttttccctctctccctcatgtacctctgaagaaggaatttatgaattttacaagtataatcaaagacaaccaaaaatgtttactttttccttccaaagctaactgtagtgtagccccaccccgtagtgtaagttagagaaaaatactaactgcctgtttttccttttgtgctcagcgagccttatctgtacttgctagtttcacattccttgaggctcagcgagttcctgcttcacctccctagcacagctrcaaagttacaaggttgacacagaaatggtttatacagttaatggtttcccaaagatgtgaaacatgtaatataaataaatgtaaaagactgatcaactgcctttgctctcacttctgtaagtacacttcctgcatcacatagttcccggccactggctgcttaaaaagtggctgttttctttgtccggggctcaga

SEQ ID NO: 731971 - DNA, 653 bp, Homo sapiens
taggaggttcgagtctgttttgatgcggtatccaacaagcaaggatctgttcagcttttgccccttatatccatactctaatagtgctatctcaagcaggaaggtgttaaaccatttatccaataaagaatttctatttttaacatttctccagtcacaaacactctctacatttatgtgcacgggtgcacactcccctgtgacgttagytaacatttgttgagtacttggtgtatgtcagcacatttctaagtgttttacctgtactgactcactgaagctcccaagaaacctgtgagttggtactactggtatcatcaacctcattttacaactgaggcacaaacagattaagtaatttacccatggttacataaccggcgagtggtggaggcaggcttgaaatccagaccatctggttccagggtctttttgcttaacctctttgctgaacctcacgaggcgcacgtgtgcacatgcacacacacatacacacatgcacgtactcagagtcactcagagtaagaggtacagggagacaggttggcccagatgaagctcaaagagaagttgaggctgttccagctgccttcttaagctataccttaagcttaaggtgggagaagtcatgttttaagaaatctccaaggatt

SEQ ID NO: 731972 - DNA, 653 bp, Homo sapiens
taggaggttcgagtctgttttgatgcggtatccaacaagcaaggatctgttcagcttttgccccttatatccatactctaatagtgctatctcaagcaggaaggtgttaaaccatttatccaataaagaatttctatttttaacatttctccagtcacaaacactctctacatttatgtgcacgggtgcacactcccctgtgacgttagctaacatttgttgagtacttggtgtatgtcagcacatttctaagtgttttacctgtactgactcactgaagctcccaagaaacctgtgagttggtactactggtatcatcaacctcattttacaactgaggcacaaacagattaagtaatttacccatggttacataaccggygagtggtggaggcaggcttgaaatccagaccatctggttccagggtctttttgcttaacctctttgctgaacctcacgaggcgcacgtgtgcacatgcacacacacatacacacatgcacgtactcagagtcactcagagtaagaggtacagggagacaggttggcccagatgaagctcaaagagaagttgaggctgttccagctgccttcttaagctataccttaagcttaaggtgggagaagtcatgttttaagaaatctccaaggatt

SEQ ID NO: 731973 - DNA, 464 bp, Homo sapiens
tgaaatcttgtggattctttttggtaaatagctggtgacactttgcactggctggggtcaattcctcccatatagctttataactaactcagtatcacttaatgaaaacaaacctcagagcaagttctatgttgcattaaacggacacaraaggttcacaagatctgctccttgagttaaaagaaatcctacctttctgcctttatagccaatccagacacatcttgggtgaaaagtttacacaggcagaaactaaaatattccagtggcaggtctgctaccctttggtctctgtataacatgtagattgcccttagaaagcattcattcagtatatgggatgtagagattgcctgcgaaaagtgcttactccctctatatggtatatagattgccctctatatattttaaggacagtcgctgtcatatgttccttgttttcatttaactttttgggctaatga

SEQ ID NO: 731974 - DNA, 603 bp, Homo sapiens
taaaaagtacacacacacacacacacacacacacacacacacactataatattccatttctgtgaaatacgtgtgttcacaagaaactaggctgaaaacaagatctatgtctaagattaacttgcaggaatgcccatgagaaattytaaaaaaaaaaaaaagcaaattgtaaggtgatgaacacagtaggattccatttggataaaaacaaacaaaacacctgcatacattcatatctttatgggcatgaagaaggtcgtggaagattatactctagattgggcaggattattctttatgtagtcccacttgtgataagcattattactttgtgattttatacaactaaataaaataaaaatggacaaaaatcgaggggaaacagatacatcttgccatatagctaaaatatatttgatattttcatttgtgctacagttgtctctgccaataaccattattatcaggaccataatgaaggacaagagatctgctaatgtattgtcaacattcttgtcaccctattcactcagttcaaacattctgcctaggctcagaaaccaaggcaggctcctcgggggaggccacaggaactgtccgctt

SEQ ID NO: 731975 - DNA, 617 bp, Homo sapiens
cgagtatgaaccgttagatagcagtactggtccatggtaactgttcgggtttgaaaattgtactgggttatgtgagaaaaccccctctcacaggaggggcatgctcatgtgcttagggggttaaggatcatgattcctgcaacctgctttcaacggttccccccaaagtcatacgtagatatttatggaacaagttgagacaaacgtggggaaatgttaacaattggtgaatctaggtgaagaatgtacagatgttcattgcattattcttgcaacattttgtagattcaaaattttttaaaatataaagttgaaaagaaaatgctaagtgtttcaagtaacaaaggcttagttgctttgacctcaatcagacacttctrtggtgctcacaatttctcaggcactgtcactactttcaaaagtgcatcaccgatctcacaattacagaacaagcgaattacaactgtcctttccaattcccctgaaccgaaattctgggtaaaactttacgtgtgttaataacaaaatgaaaatcttacaagattaaaaaaaattcccctaaggaagcaccttaacgctgatttagagttactgtgtgaagctcccccgctatctgc

SEQ ID NO: 731976 - DNA, 574 bp, Homo sapiens
ttctccctgataagcacgatggtgtggacaggaaggaaggatttcattgagcctgcttatggaaactggtattgttagcttaaatagacacacaaaggataccttcaagtcttattttcagactgttttcatcatcttggttgtgtagaaactagtttgatgtggacgggtgcggtggctcacgcctgtaatctcagcactttgggagagtgaggtgggcggataacttgaggtcaggatttcaagaccaggctaggcaacatggtgaaaccccatctctgctaaaatacaaaamtcagctgggcatgttggcaggcacctgtaatcccagctactctggaggctgaggcaagagaatggcctgaacccaggaggtggaggttgcagtgagctgagatcgcgccactgcactccaacctgggtgacagagcaagactccctctcaaaaaaaaaaaaaaaaaaaaaaaggaaagaaagaaagaaactagtttgatgttttatccctggtgtttattgtcccttcatgaacaagctggctctgtgctgataggacagaacaaagccctgctgtcat

SEQ ID NO: 731977 - DNA, 506 bp, Homo sapiens
tttttgatgttccatgaactcctccacaccccacctatctccgggaagctcagacctccctacctacttggtgaaaagaaggaaatttagaacatttgagctcgcaggctgcctacttaagactacccgaagaatgagctctgcttacccctgttccttcgtaggtacatgaatgagtcgtcaaaaattcactaatagttgatyaatgcagttgtgacagtatgaaaaacaacaaaaggagtgcagtgctgaagaaattctagatcttgcagatttaatgcatccacttatatccataactcaatcccttttcatatgacactagttattgttgttactgtcttccataaccattcctaccacgactccagtccaggccatacccccttcttcttgtcacaagaacatcaacactctgcagtcttttcttctttatcatgtcttcatccctccatactttgctcaccaagatgtgtttttccatctgtcatatttgtctaatcctg

SEQ ID NO: 731978 - DNA, 636 bp, Homo sapiens
gctttgttctttcgctctttgcaataaatcttgctactgctaactctttgggtccacactgcctttatgagctgtaacactcacggcgaaggtctgcggcttaactcctaaagccagcgagcccgcgagcccacagggaggaaggaacaactccagacgcccgccttaagagctgtaacactcaccgrgagggtctgcagcttcactcctgagctagcgagaccacgaacccaccagaaggaagaaactcggaacacatccgaacatcagaaggaacaaactccagacatgccgccttaaagaactgtaacactcactgcaagggtacttggcttcattcttgaagtcagtgagaccaagatcccaccaattccggacacaaaaactacagaccaatatctctgatgaacatagatgttaaaatacttaacaaagtactacctaaccaagtcaaacaacatatcaaaaagataatccaccatgatcaagtgggtttcataccagggatgcggcagtggtttaacatatgcaagtcaataaatgtgatacaccacttaaacagaatcaaaaacaaaaatcacacgatcatctcaatagatgcagaaaaagcattcaacgcaatccagcatcccttta

SEQ ID NO: 731979 - DNA, 636 bp, Homo sapiens
gctttgttctttcgctctttgcaataaatcttgctactgctaactctttgggtccacactgcctttatgagctgtaacactcacggcgaaggtctgcggcttaactcctaaagccagcgagcccgcgagcccacagggaggaaggaacaactccagacgcccgccttaagagctgtaacactcaccgggagggtctgcagcttcactcctgagctagcgagaccacgaacccaccagaaggaagaaactcggaacacatccgaacatcagaaggaacaaactccagacatgccgccttaaagaactgtaacactcactgcaagggtacttggcttcattcttgaagtcagtgagaccaagawcccaccaattccggacacaaaaactacagaccaatatctctgatgaacatagatgttaaaatacttaacaaagtactacctaaccaagtcaaacaacatatcaaaaagataatccaccatgatcaagtgggtttcataccagggatgcggcagtggtttaacatatgcaagtcaataaatgtgatacaccacttaaacagaatcaaaaacaaaaatcacacgatcatctcaatagatgcagaaaaagcattcaacgcaatccagcatcccttta

SEQ ID NO: 731980 - DNA, 636 bp, Homo sapiens
gctttgttctttcgctctttgcaataaatcttgctactgctaactctttgggtccacactgcctttatgagctgtaacactcacggcgaaggtctgcggcttaactcctaaagccagcgagcccgcgagcccacagggaggaaggaacaactccagacgcccgccttaagagctgtaacactcaccgggagggtctgcagcttcactcctgagctagcgagaccacgaacccaccagaaggaagaaactcggaacacatccgaacatcagaaggaacaaactccagacatgccgccttaaagaactgtaacactcactgcaagggtacttggcttcattcttgaagtcagtgagaccaagatcccaccaattccggacacaaaaamtacagaccaatatctctgatgaacatagatgttaaaatacttaacaaagtactacctaaccaagtcaaacaacatatcaaaaagataatccaccatgatcaagtgggtttcataccagggatgcggcagtggtttaacatatgcaagtcaataaatgtgatacaccacttaaacagaatcaaaaacaaaaatcacacgatcatctcaatagatgcagaaaaagcattcaacgcaatccagcatcccttta

SEQ ID NO: 731981 - DNA, 626 bp, Homo sapiens
aaagctctagaagtgataaaagaattcagcaaagtttctggatacaaaatcaatgtatgcaaatcaatagctcttctatacaccaacagcaaccaagctgaaaattaaattaagaactcgaccacggccaggcgtggtggctcacacctgtaatcccagcactttgggaggccgaggtgggcagatcacgaaatcaggagttcaagaccagcctggccaacatagtgaaacctcgtctctactaaaaatacaaaaaaattagctgggcatggtggcatgtgcatgtagtcccagctactcaggaggctgaggcaggagaatcacttgaacctgggaggkgggggttgcagtgagccgagattgtgccactgtactccagcttgggcaatagagtgagatttcgtctcaaaacaacaacaacaacaacaacaaaactcaaccccttttacaatagctgcaaaaaaataaaataaaatgcttaggaatatacctaaccaaggaggtgaaagacctctacaagcaaaatggcaaaacactgctgaaatatatcatagatgacacaaacaaatggaaacacatttcatgctcatggataggtagaatcaatattgtgaaatggccaggtg

SEQ ID NO: 731982 - DNA, 490 bp, Homo sapiens
tgttctcactcataagtgggagttgaacaatgagaacacacagacatagagaggggaacatcacacgccaagacctgtcggggggtggaggctaagggagggataacattaggagaaatacccaatgtaggttatgggctgatgggtgcrgcaaaccaccatagcacatgtatacctatgtaacaaaactacacattctgcacatgtaccccagaacttaaagtataaaaaaaaaaaagaaaagaaaatggtggcctaatcctacagctggtccccaggcagcagtggcagaggctgcagggcaggaggcagagatggttgttgctgggtggcggtggccatgttgcaagcagccagtgggaacaccagactctaccatgcagtgagcggctcctggtttttcagacatcaaagttatactacaaggtataatcctgattcttttacttattcaaaaatatttgagtacctactttctgtcaggcactgc

SEQ ID NO: 731983 - DNA, 635 bp, Homo sapiens
tcccagcactttgaaaggctgaggtaaggaggattgcttgagcccaggagtttgataccagcctgggcaacataaaaagaccctcatttctaccaacagcaacaaaaaatcagccaggaatggggctcacgcctgtagtcccagcactttgggaggccgaagtgggaggattgcttgagcccaggaggtcaagactrttgcacactgcactacatagcctgggcaacagagtgagaccctgtctcagaaaacaaaacaaaacaaaaaccctgaactataaaataagtgcgatattgttcattaaagtctgcttttccctcttatagctacttaggcggtttttggctttttatgatgccctaagcacatacttagtttgctctttgcttagtctagtctgcgataccaaatgtccatctgtaaattttctttggcattgtgccctacttgtatacttttcagttgatttgaaaaccagtcatcagttgatacactaaccttctagatgacaattgtgattcggttctcaagtggagagaggttatattctcctgaccttcaaagggaataatacaagctacagaaggttccctgctcctaccccaggtgggtagaacagttggtatggaatggga

SEQ ID NO: 731984 - DNA, 640 bp, Homo sapiens
acaaatttaaattattaacctactaccatttaactattttaatcagtacctttaaaagaatttataattagccaggcacggtggctcacgcctataatcccagcactttgggaggctgaggcaggcagatcacctgaggtcaggagttcgagaccagcctcaacatggagaaaccctgtctctactaaaaatacaaaattagccgggcgtggtggtgcatgcctgtaatcccagctastcgggaggctgaggcaggagaattgcttgaacctgggaggcggaggttgcggtgagccaagatcgcgccattgcactccagcctgggcaacaagagcaaaactccatctcaaaaaaaaaggatttataattaacaaaattatacactcagtgaaactttacaaatgttctgctctagcagaaggtgctggtaaagctgttccaacagccttcactggtaatattaacaggctgacaaagccaattttgcctctcaggagagtatctaactgcataccgatcaccattccaaacagtaaggtttttcttgggagttattttaatatagataccatgagtctaactaggaaatgagaagtcatataaaatgaactctgaggaggtgcttatgcttttcagcaag

SEQ ID NO: 731985 - DNA, 602 bp, Homo sapiens
tgtggatcccaccatcagcagcttttccaaaggacccaggcaaaatggtcaatattgccttctctcctcacttttacctcacctttcagcctcttggtcccttcctccactcccaccctaagatgcttatagtctatttgtcatcctccagtggtttataattcctgtttcactaccttatttagcctgttgccttttacagcattccaaaatgctcatttattctcttttatgactcatccaatactaaccctatttaccattctaaactgaagtagactgcacctctttttctcaagtactaatgtagaatttcagttttatttgtccaatttcaaacactaggaaagtttaagaaataatcttcgtgccttcctgatagtggcaattgaacatttttcttgacataraacaatatttggtcttaactgatctttgctgtggaccaggcactgttctaggtattttatacttgccagcaaaatctcacagcaatctttgggagtagttacttttattatctcattttacagatgaagaaatgtagaaagatagtctaacagcttgcccaagattatacatctaataagcagctgggtcag

SEQ ID NO: 731986 - DNA, 609 bp, Homo sapiens
accccaggctgccgcatttctcgtgggggcagcctggccaccgcccgctcccgttccgctacgccccctctggctgcggcccacgcggcgctcagcctgaacctgaggaaggcgaggggcgaacggacgccgcgagaggcagtgaggaacagcaacacgccgtcgcgcaccagcaaagcgggcccttttgtagcttctctttggtgagaatatttaacaaatggtatgaaagtgcaatattggaatgtttgaatccttatttatatatggccactgtggtctctgatacaagataaggtaacgcttatttatattgtaattactgcagctctaaaccccagtagaaatcagtcctaagcattctcctagctttttcagtgttccaggctgtcggctcatgtttaatccagagcaatgcccayagctattcttctagagacactattgctgatggcctcataggccttggtatagggaggactccgtgtgctcatatttttcacagaacagctgagaaggggctgtgacttttaacatctggaatttgttgcagtgttagattaaaacagaaacacaacttacagggtgaattccacctgcctcagtctt

SEQ ID NO: 731987 - DNA, 638 bp, Homo sapiens
tcccaaagtgctgggattataggcatgagccaccgcaccagtgtggattttgtagatttaaacagatatcctaagtgatgtcagatactgcaaaacacatttttctttcctaaagtaagactattcaagatccttaaagagcagaatcagttcacatctagcaagagctttcaagagtaaacagagacctgttttacttttgacttcaaggcatttgatgctgtcatactccagacaaaattcttagttggaaagaagttaagatacctgttgttgaacatttgttcactgggatttggctgtcagcaacctcctcaacattctytctgggagtgagtttagtactcctgagagttgaaaaatatttctgttttgtaaaaaaattgagactttggattgtgtttatgtatgcatatgcatgccaactcaatttgcatcttatgatctaccaatctgaaatcaaaagcaatgtaagaccataaccagtattgctggggacattgctatgacagacagtttcaacataaaatttgaatctctttgaaaaatacttaaatgtccttaaagccaaattattttattgtttcaattcttgaactaaatcaagatactttttcttgtttaaagcaggtgcttcc

SEQ ID NO: 731988 - DNA, 667 bp, Homo sapiens
agcagtgatattggtggatagtatagtagttctatttttaattatttggtaagctttcatactgttttttgtagtggttatactaatttacattccgaaaaatcatgtataaggattccattttctctacatcctcaacagaattttttttgtccttttgataatagccattctagctagagtaagatgatagctccttgtgattttgatttgcatttccctgatgattactgatgttgagcattttaaaaatatatctgttggctatttgcatgtgttcttttgagaaatgtctactctgattgtactagtccccttgcattgccataaagaaatgccttaggctggataatttataaacagaaaagtttaattggctcatggttctgcaggctgtacaagaagcacagcactggcatctacttctgatgagggcattaagagscttgcaatcatggtgaaaggcaaagcggaaacaggcatgtcacatgaagagagcaggagcaagagacaatgaggaagaggagccaggctcctttaaacaactggcactcatgtgagctaacagagcaggaactcactcattacaatagggagggcatcaatccattcatgagggatccacctccatgatctaactagaccccacctccaacattggaggtca

SEQ ID NO: 731989 - DNA, 586 bp, Homo sapiens
aaaaaagaatcttataccaatttttgattaacttcacgagacatagattaaaacattttcattactttttgttttccatacagttctataactaattttttttttttttttttttttttttgagatggaatcttgctctgtcgcccaggctggagtacagaggagctatcttggctcactgcaacctctgcctcctgggctcaaacrattctcctgcctcagcctcccgagtagatgggactacaggcgaacgccaccacgcccatctaatgttttgtatttttagtagagatggggtttcaccatgttggccaggctggtcttgaactcctgacctcaggtgatccgcctgcctcgacctcccaaagcactgggattacaggcgtgatataaccagcatttaattgatacattcttgcagatccaagccaggttactgagacttgaaaaaaaattcttaagttgcttttagttttttccatctttagtcacatggagggaagttgggttttggcacaagtttattgtaaactcataaactcataaacaatcaaaaactgaagaaaaaaataaggcccacgatacc

SEQ ID NO: 731990 - DNA, 565 bp, Homo sapiens
tttaatgctctcttagctttgttttcctcatccctacaatgaatgtgttcctctataacttctcaggtccctccaagatctaacgttttgaggctgagtgaccagaatgatgaaggtaacatgaacagaagtcccacagaggaacctgatcccaatttctgggatttagatgattctgttgaagctgtttgaccttggacaaattacttaaccyttctgtgtgtccatttccattataaaatggtaataataataataatactgcctacctcgtagagttgtcctacataaacctataggggggtgcctagcatatcattaagtctcaacagatgtgaacaaccaacaaaaatgccatctgttcttaaaactgatcacaactatgcctcacggtttcatcagagagactctctagacaacaaaacttttgtcataaaatccaacttttatgacatcccctcatatatattataggagcagatgttggatgtttatagaaatgtgacatgtaggattttgagtagctgagtcactagactttcagagttgaagccttcagatacta

SEQ ID NO: 731991 - DNA, 622 bp, Homo sapiens
cctcaaacacacacatacaccacacacacaatcacagttctcaaacacatacacacaccacactcctgacacatgtacaggccccacagatcactcgcagatgcacgcactccacacacacgtctatttattgcgctggaaggaaacagatgctggaatggtgtagaaccggggcccggcaccttggctccccartggcggctgcagagctggagccagcccctctaaggctgcagtggctgcgggtcccaggatgtgaacggaagtcatctaccctctccaggagaaagggcgagggaatgcaggacaggacaagggtgctctgggaggcccacgtgtgcggcaccacgccaggcctgcccatcttcagccaaggtggcatgtcactgtcacccacagctctgtggctattccccgatggcactttccggggacatcgggcatggctctgaggtgctgctgccttcttgtagccaggagggttggggcagtcgggatgggcgggggccgcctgctctgccgagcttccccgctcactcttcccagggcaccctggacttctgcttcctctgcaagacggccactcatgcccattccgggccctcgccctgtctttacctgg

SEQ ID NO: 731992 - DNA, 622 bp, Homo sapiens
cctcaaacacacacatacaccacacacacaatcacagttctcaaacacatacacacaccacactcctgacacatgtacaggccccacagatcactcgcagatgcacgcactccacacacacgtctatttattgcgctggaaggaaacagatgctggaatggtgtagaaccggggcccggcaccttggctccccaatggcggctgcagagctggagccagcccctctaaggctgcagtggctgcgggtcccaggatgtgaacggaagtcatctaccctctccrggagaaagggcgagggaatgcaggacaggacaagggtgctctgggaggcccacgtgtgcggcaccacgccaggcctgcccatcttcagccaaggtggcatgtcactgtcacccacagctctgtggctattccccgatggcactttccggggacatcgggcatggctctgaggtgctgctgccttcttgtagccaggagggttggggcagtcgggatgggcgggggccgcctgctctgccgagcttccccgctcactcttcccagggcaccctggacttctgcttcctctgcaagacggccactcatgcccattccgggccctcgccctgtctttacctgg

SEQ ID NO: 731993 - DNA, 599 bp, Homo sapiens
gggcgacaagagtgacattctgtcttaaaaaaaaaaaaagggctgggcgcggtggctcacgcctgtaatcccagcactttgggaggctgaggcaggtggatcacgaggtcaggagattgagaccattctggctagcatggtgaaatcctatctctaggaaaaatacaaaaaattagccgggcgttgtagccagtgcctgtagtcccagctacttgggaggctgaggcaggagaatggcgtgaacccgggaggcggagcttgcagtgagccaagatygcgccactgcactccagcctgggtgacagagcgagactctgtctcaaaaaaaaaaaaaaaaaaaaaaagaagaggtcttgcagatgtgactcagttaagaatctcaagctgagatcatccaggatgaatccggtgggccctagatccaacgacgagcatccttataagaaccttaggagaagacacaggggagaaggggctgtgaagacggaggcagagacccaatgctgctgccatgggccaaggagtgccaaccacctccaaagctgggagaggaatggtcctctcctagagccttcagagaaagcagggtcccccaacac

SEQ ID NO: 731994 - DNA, 621 bp, Homo sapiens
tcccgcccaggtccctcctgctacatggccatgacccaagagccccacggcatctagggcgcatgtcgcccgcggcccaggcgggacgcccagctctataaccttgcccacaacggtgagcccagcagagccaacagtcccaggacctgcaccacaccctgtgccggacatcagtcacagccagtgcccccacacctgtccctcggcgtgctgggagcccccagcccaggacttcaggtcacactgtggggtcgacaacacagccacagggtcccgcccttgcacatggacattggagagccgggaccgtggcctctgacgtgcggtctggggccagaaaggggccagctgcccatgaaaagggtgggcctgattctccaacaccccaacccctctattgagaggcgggaaccaaaggtgttcagagctcggggccaayaaggacctttactactacccagtggcctccgtgaccatttcaaaatgcaacatttacatggtgctgaaaaatgcacctcgtgggactcaaaaaaagccgcgggcaggaagcaccccacatgggcagggaagggcccacagctacaccaggcactaccatgaggggagaagggaagaaagtgg

SEQ ID NO: 731995 - DNA, 587 bp, Homo sapiens
tatatgtgtgtgcatgtgtgtgtctatatacacacatatacagacacacatataattgtatatagcacatgtggagttttaaaacataggatattaccctacaaattattttataatctacttttaacacttatggagtattggaatatatcatgaaaggcttactatgccaatgaatggtcatctagtagaataacagttttacaattgcgttctgtgatgccttgrggctcttggtagatgcttcaggtgttggggaccagagtaggggagaatataaaggtcaggtgaaaggcaggaagagggcaagcagttggggtctgtatctgtcaatctcattcaacagagctccttttatttgttcaaagattcagttctcgtgtaacatagcatttaaaaaaggaattccatcaccaaaaataaaataaaaacggaaatcaagatctataacatttttctcatttctgcttaatttcttttcaaaatgaaaatagctttattgttttatacttgtaaaagtgacagctacacatttttcaagattcaaataatccaaaattatagaataaaacattgaaagtcaccca

SEQ ID NO: 731996 - DNA, 626 bp, Homo sapiens
ccagagactgaaggaccttggggaagggaaatacccagttccagccttctctagccttcctgtctcacctaaagaggaaaacaaggctgacaagcacctttgaaggtcagggaccaagggcagaagcccactaaaatattaatcacaggagtgtagaacacttcccctcctcccacacatttccaattagactactgaatagtaataagggattacagctgaaataagtgcaaagctcagactctacttaagaaagagtctaaaaggaaatccaaagacaaaaggaggtgcaataacaaagatactagaagaaaattttagcctctgacacctgtagatacagcctaaccccagccagataatacaaaacttcatactaatggcctatttatttcaacaccttgtacctgatatgtcacttctggctttgaacagcaacagcaaaaycacaaggcatgctaaaaggtaaaaaataataatctaaacatacaaattcagcatcacaattagatttagaggtggcagaaattggaattttcagtctgaaaatagaaaataactattaaatatcctaagtgctctcttgaaaaagtagaccccatataagaaaagatggatgccataaa

SEQ ID NO: 731997 - DNA, 579 bp, Homo sapiens
ctatagaatttaaataagactctgagtcataatatagtattcaaaatgtccaggataacaaccaaaatgacttggactatgaagaaccaggaaaatgtcaacactcacgagaaaagacaatcaacagttgctaacaccaagaaaacacagatggtggagttattaggcaaagattttaagacaattgttataaaaatgcctcaagaatcagggcaaagagtcttgaaataaatgaaaagatagaaagtctcaacaaataaatagaaaatataaagaagaaccaaatgaaaattttagaactgaaaaatgtgacaaataaaataaaaacacctctctagatggtctcaatagcagacgtgaaatgacagatgagtcagtgaagttgaagatgggtcaacagaaatgaatcaatctgaacaacagagaaaaaattgttttaayataaataaacagagcctcaagacctatgggacaatactaaaaggccaaatacttgtgccaataggatcccagaaaaagaggagaaagagtgcagtgcagaaaaggtatttgaagaaacaatagctgaaaactccctaa

SEQ ID NO: 731998 - DNA, 446 bp, Homo sapiens
attttggcagctcagattcttccagcgtcacctaaagtgagggtggcacgaaggggatccatctgctgttctttcgcattgctggccccacagaggcttgtacaagttcgagcttcttagaaaagacaccatcatgcctataatcccagcactttgggaggccaaggtgggcagatcacctgaggttaggagttcaagatcaacctggccaacatggcgrgactccgtctctactaaaagtacaaaaattagccaggtgtggtggcaggcacctgtaatcccagctactcaggaggctgaggcaggagaattgcttgaaccccagaggtggaggttgcattgagctgagatcacaccacagcactccagcctggacaacaagagcaagaccccgtctaaaaaaaaaaaagacaccaatgtgatactgggcgctattcttgttcatg

SEQ ID NO: 731999 - DNA, 603 bp, Homo sapiens
taagtaaactccaggtaggactctagagcatcctggatgcatgtttgagtcctagctacagacacaacttaggcaccagctgggactttgttaaaaaggtcaagaatcaggatagtataagaatgtgacctaggggagaaaaagaagcagaatccrccctaaacatgcactgtgtaggcacacagtccctcagttgaaagggggctttggggtacatttcttgggtagagaagccatgatgtctccaggtggtcaactagaatccactctggcagcaaacaaaaggtgtgataaaataatctggacttctcaataggtatagtgacttcctgcatttgtatcaatccttgggtcctcattccttttgtggccttctgcttcgaacttaagatttctgattttttcttttcttttcttcttcttctttttttctttttttttttttttgagacagggtcttgctctgttgcctgggctggagtgcagtggtgtgatcatagctcattgcagcctcgacctcctgggctcaagcaatgctccatctcagcctcaggtccaagtagcttgggccacaggtgtgtgccacaacacctggctaatttt

SEQ ID NO: 732000 - DNA, 657 bp, Homo sapiens
[327 bp omitted]acctctgcaggttagtccagcatacaaccaggtttgacaatcactggcttaaggcatagggtgggtccacaggagactgtgaagtcagacacaagtgggtttgcatcccagtcctgccatttattagctgtatgaccttgagcaaatgacctagtctctctgagcctcagtttacttccttacaaaatgggaataataattattatcttgctgagattttgtaagaagcaaatgaaaacctactcaatttacttcatgtagctggtatatggaatgggctcattaattatttgttaattaaatgcatgatgatggtcaataacagcagca

SEQ ID NO: 732001 - DNA, 522 bp, Homo sapiens
ccatccatctacatgtacacctatgcatccaccagctatcagtccatctgttcccccatccataatatttattgagcacctatagtatatcaggcattgcacgggctgccttggttgccttagactccgggggaataagtcagctatggtctctgtcctcatgaagcttacaatcaattaaaagcaaaatgaatgtttttcctttcttctgtcccccctttccttcctcccatctgccctccatcctgtttcctccccstctctcctttcctttttcacctctggttttgggaaagaattgatcccacaccaaggttgggggaaaagccaaagttgtgggaggcctagcttcgcatagagagagatttgctgtggtggagagtgcagtggccagtagccggagtaagacctcgtgatgaaaattaagtccttgtttgaaccactgcgagaagccagcaggggtccctaagatctagctccaggcctctctatgtattgcctctctgggattggcctgaccca

SEQ ID NO: 732002 - DNA, 614 bp, Homo sapiens
cccccagagggaaaccccagggaggggtctgaggggcgtccttgtgaggcagggggctccagcagccctggcaggagtccccattgcttgctcctcactaggtcccgggcacgaaagggcgccacactgccaggtcccgggcacgtgtgcgggcctcccaggctctgtgctcctggcacaagagggcaccacactgaggcatgccctgctcggaccccagacgctgtcatggccggagctttgtcataactggggctgggacggccctgggagcacagagccttttgttttcaggctgactgggaagacggtcacagggtgtggggtgcagagcagggaccagaggtgtggggttcatcrgtcggggagaagggggtctgttggttctctcacctgtggggtcttgccagcctggctctgtccttggggccgcacggggaccccaggagttcttttgaggttcagacttgactgggacagttttgctttttcactgtgccgtggttgggcccctggagaaccctgggtccttggaggcgtcctgcagagctggtacgcggctcacctgcctgctgtggttgcagggtggactccgacgaccagtggggagagta

SEQ ID NO: 732003 - DNA, 614 bp, Homo sapiens
cccccagagggaaaccccagggaggggtctgaggggcgtccttgtgaggcagggggctccagcagccctggcaggagtccccattgcttgctcctcactaggtcccgggcacgaaagggcgccacactgccaggtcccgggcacgtgtgcgggcctcccaggctctgtgctcctggcacaagagggcaccacactgaggcatgccctgctcggaccccagacgctgtcatggccggagctttgtcataactggggctgggacggccctgggagcacagagccttttgttttcaggctgactgggaagacggtcacagggtgtggggtgcagagcagggaccagaggtgtggggttcatcagtcggggagaagggggtctgttggttctctcacctgtggggtcttgccagcctggctctgtccttggggccgcacggggaccccaggagttcttttgaggttcagacttgactsggacagttttgctttttcactgtgccgtggttgggcccctggagaaccctgggtccttggaggcgtcctgcagagctggtacgcggctcacctgcctgctgtggttgcagggtggactccgacgaccagtggggagagta

SEQ ID NO: 732004 - DNA, 560 bp, Homo sapiens
tgaggtgacacaagtatgaaccccattaagtccccccaaaagccaagaatcttggatttccttcacaagtgaatgacccccccaaatcttgaaggaaaatcattctagcagcaaatcctagacaggagttactatcagccagatattgccatctgccttaactggtttaatcctgacagtgaaccccartgatgtagaaaatgttaccaccattttttttttttaatacagagtcttgctctgtcccccaggctggagtgcgctagtacaatcttggttcactgcaacctctgactcctgggttcaagtgattctcctgcttcagccttccaagtagctggcattacaggggcacgccaccacacctggctaatttttatatttttagtagagatggggttttgccatgttggccaggctggtctcgaagtcctgacctcaggtgatctgcccgcctcagcctcccaaagtgctgggattacaggcgtgagccaccgtgcccggctgttatcaccattttacaggtggagaaaccaagacacagaacaatgcagtggctc

SEQ ID NO: 732005 - DNA, 560 bp, Homo sapiens
tgaggtgacacaagtatgaaccccattaagtccccccaaaagccaagaatcttggatttccttcacaagtgaatgacccccccaaatcttgaaggaaaatcattctagcagcaaatcctagacaggagttactatcagccagatattgccatctgccttaactggtttaatcctgacagtgaaccccaatgatgtagaaaatgttaccaccattttttttttttaatacagagtctygctctgtcccccaggctggagtgcgctagtacaatcttggttcactgcaacctctgactcctgggttcaagtgattctcctgcttcagccttccaagtagctggcattacaggggcacgccaccacacctggctaatttttatatttttagtagagatggggttttgccatgttggccaggctggtctcgaagtcctgacctcaggtgatctgcccgcctcagcctcccaaagtgctgggattacaggcgtgagccaccgtgcccggctgttatcaccattttacaggtggagaaaccaagacacagaacaatgcagtggctc

SEQ ID NO: 732006 - DNA, 560 bp, Homo sapiens
tgaggtgacacaagtatgaaccccattaagtccccccaaaagccaagaatcttggatttccttcacaagtgaatgacccccccaaatcttgaaggaaaatcattctagcagcaaatcctagacaggagttactatcagccagatattgccatctgccttaactggtttaatcctgacagtgaaccccaatgatgtagaaaatgttaccaccattttttttttttaatacagagtcttgctctgtcccccaggctggagtgygctagtacaatcttggttcactgcaacctctgactcctgggttcaagtgattctcctgcttcagccttccaagtagctggcattacaggggcacgccaccacacctggctaatttttatatttttagtagagatggggttttgccatgttggccaggctggtctcgaagtcctgacctcaggtgatctgcccgcctcagcctcccaaagtgctgggattacaggcgtgagccaccgtgcccggctgttatcaccattttacaggtggagaaaccaagacacagaacaatgcagtggctc

SEQ ID NO: 732007 - DNA, 560 bp, Homo sapiens
tgaggtgacacaagtatgaaccccattaagtccccccaaaagccaagaatcttggatttccttcacaagtgaatgacccccccaaatcttgaaggaaaatcattctagcagcaaatcctagacaggagttactatcagccagatattgccatctgccttaactggtttaatcctgacagtgaaccccaatgatgtagaaaatgttaccaccattttttttttttaatacagagtcttgctctgtcccccaggctggagtgcgstagtacaatcttggttcactgcaacctctgactcctgggttcaagtgattctcctgcttcagccttccaagtagctggcattacaggggcacgccaccacacctggctaatttttatatttttagtagagatggggttttgccatgttggccaggctggtctcgaagtcctgacctcaggtgatctgcccgcctcagcctcccaaagtgctgggattacaggcgtgagccaccgtgcccggctgttatcaccattttacaggtggagaaaccaagacacagaacaatgcagtggctc

SEQ ID NO: 732008 - DNA, 601 bp, Homo sapiens
cggtttcacagaaaacagtttttccatagaccaggctggggtggagttggtttcaggatgattcaaatgcattacatttattgtgcactttattattattacattgtaatatataatgaactaattatacaactcaccataakgtagaatcagtgggagccctgagcttgttttcctgcaactagatggtcccatctgtgggtgatgggagacagtcacagatcattaggcgttagattctcataaggagcaggcaacctagatcccttgtgtgtgtggttcacagtagggtttgtgctcctatgagaatctaatgtcaccactgatctgacaggaggcggagctcaggcggtaatgcttactcacccactactcactcctgctgtgcggcctggttcctaacagaccctggaccaataccccatccatccatggcctgggagttggggatccctgatctacactacagcattactgataattcctgtcatccttagattgagaaggaagcaaaaacaaaaaaaatctcaaaaatcaattcagtcataacagtactttcacatataagtgttccttctgtatttgatttattatgttacat

SEQ ID NO: 732009 - DNA, 628 bp, Homo sapiens
gcagttgtgattacattttatgacgtgaatccttttaaatgcaatagggaagcttatttaaagaaagctggtggcgaatatggttgtcaaccaaatggtctgttatgtatgtctggtactttatgtatcagagtgcttttctccacgtcacctcagtttgatccttacagcgtcctgtgaggaagggaagatgctgttactgctattttctaggtgaggaactggacttgagaggtgatacagggtcaaaaccagatccaaactagattgttaaagtccgtagctctatatatttattttctaagtctctatctgtaaacaatgcatttacttgaatcgacccaggaacctgccaagcttagtgagtttcagtagsggccttcccgcacatgaatgagatcactaagggggaggtttgtaaccacctgtggtgggggcagccaggagtgtattcttcctcctgggttagggcgtcccccttttccctctggttctggtgttatcctcagcgtgacgtgtgtgggctcgtgttcctgtttacctcagggagaatgagaaacggttatgttaccccatcagtgagttctggctaagtaggaataaaagttgtcatagagacttttaggac

SEQ ID NO: 732010 - DNA, 615 bp, Homo sapiens
aaatacaaaaaaaaaaaaaaaaaaaaaaaatgctgagcgtggtggtgtgtgcctgtggtcccagttactctggaggctgaggtgggagaatcgtttgatccccggaggcggagactgcagtgagctgaggcactccagcctgggtgacagagcaagacttgtctcagaaaaaaaaayaaaaacaaaaaaagaagctgctgagagcaggcaaatggaagcccagagggagaaacgcccgcacgaaaccaggagtctgtgtttgtttagcaaacagagcctgctctttgggtcagagggaaccatgtggttgagccgtgagcttcctcttgcatctcacttccgccagtgctcgtctcagagggcggtggctgatccctggctgagaccaacccactcgttccataaactcacacgccccccgcacggggcgtcctcctcctcaacaagaacccaggatgccaggcatcaatgcctgcggagacccgagtccgggaggtgcgtgcggagacccgagtccgggaggcgtgtgttggccacagaactgccctcagcagtgcccctgatcccccgcttctccgctcctgcagggatcccgacccagcccctgcctggcgt

SEQ ID NO: 732011 - DNA, 626 bp, Homo sapiens
aacagggagatggtgaactttaataactgaaaaagtacatattaagatctgtcttcacactgaagctttgaaacacaactttttggccaggagcagtggctcacgcctgtaatcccagcattttgggaggctgagacgggcaggtcacgaggtcagaagttcgagaccagcctggccaaaagagtgaaaccccatctctactaaaaaatacaaaaattagccgggcgtggtggtgggcgcctgtagtcccagctactcgggaggctgaggcaggagaatcgcttgaacccgagaggcagagcttgcagtgagccgagattgtaccactgcactccagcctgggtgacagagtgagactcmgcatcaaaaaaataaaaatacaaaaagtatctgggtatggtggcacacgcctgtggtcgcagctacttgggagactgaggcaggtggattgcttgagccagggaggtcgaggctgtggtgagcactgcactccagcctgggtgatagtgagaccctgtccaaaaacaaaacctgtgggcggcaagccacccaggcaccaaggcaagagaccgaggacacgagctgttctagtataataaaatataaaacaagaatagttataccag

SEQ ID NO: 732012 - DNA, 560 bp, Homo sapiens
gctctggatgaaatttgccaaggctgttgcacatctagacagtgacatcatatacatgttattgaggtccagggtggggcacagaagacaggcccagagtcatgggggcagggaagaacacagaagggaaccccacccactgtctgcctggagaagacctgattctgttgtcactcatttgtctgacttgaggaaatttggtctcctcgtttccaaactgccacagactgcagtgacctctgtgatcagggggtactttgattaaagctctacagtaagggtcactctagtttttttctctgtctccagggttaagcttggtgcatggacacaacagatattcaggataagtwtgttgttgaacaaatacaagtaatgcatttgtgagacctcattctcacttcctttgttttacaaagtcagttgcacatcagcctaaaaacccaggacataattcacagaaatggagcttgaaagcatgactagccagtattaatcaaaggccaagcggctgagcgggcgtggtggacaagcctgtaatcccagcactttggaaggtc

SEQ ID NO: 732013 - DNA, 519 bp, Homo sapiens
tgacccaatcaaagccagtaagacagaaccccaagactcctgacggagtggcctggacacatagactcatttctgcaggacttagagctgggagctgggaagctgagcgcctgatgccactggtaccaccctgtggaaagggacttcytgatagtgaagccagcatggaggagaatgcagaataggcaaagaagaaagagaacaaacctgagtcctgatgacactggccaagctcctagatcaagccttacctgaagtagtcatattgttagacatcttaattatgtcaaccaataaactctcttttctactaaagaaagtaagagttggagttctgtcacttgtagccccaggagcccagactagtacaatctctagggaatggctgaggtcctctaataaaaaacaatgtctaactcattttcccagtgcccaaatcatagtgtgaaacatcttataaacatgtgttgcaatgaaattcaacttctaagtttcaaaatgcttttatgagcacctgct

SEQ ID NO: 732014 - DNA, 628 bp, Homo sapiens
acaggtgtcggtgaggatgtggaaaatttggaacacttgagagctgttgatgggattgtaaaaatggtgcggccgctatggcaaacagtatggagtttcctcgaaaaattaaaaatagaattaccatatgatccagcagtccacttctgggtatatatccccaggaaccgaaaacaggatctcaraaaaatatttgcacactcatgttcattgcagcattattcacaatagccaagatatgaaaacaacccaaatgtccatcaacggataaacggataaagaaaatgtcgtatacaacagaatattattattattgttattttcagacagagtcttgctctgttgcccaggctggattgcagtggcgcagtcttagctcactgcaacctccgcctctcgggttcaagcaattctcctgcctcagcctcctgagtagctgagactacaggcacatgccactacacctggctacatttttgtattttttttttttagtagagacagggtttcaccgtgttagccaggatggcctcaatctcctgacctcgagatccacctgcctgggcctcccaaagtgctgagattacaggcgtgagccaccgtgcccagcctattattatcattatta

SEQ ID NO: 732015 - DNA, 506 bp, Homo sapiens
acaatacattattccctaaacaattccctaaacaactatttatgaggaatttacattgtgttaggtattataagatttataatatatttataatatatagtatatttataatataatgcctaataaaatggtattgagtataccaactagattacttataatacttaatacaattagtacaaagtatcagtaccaactgattacttataatacttaatacaattagtaaaaagagaatgtgcagaggttatatgcaaatactatgccattttatataaacttgagcatcagtgggttttggtatctgtggaaggtcccaraaaatcccctatggatactgagggacaactgtacttacaacaggggagtttacttcactaatgtggaattttcagcagattgctgatgcccattagagaaagattgattggtgttccctgggacactaatttttggaacaggtgattcccaggcaagaaggattgaataatctttacagttagaca

SEQ ID NO: 732016 - DNA, 625 bp, Homo sapiens
cccccctttcctttcttctcagaggaagaaagagtagctccactcccgctggtccctcccctaggggaaggggaaggagaggggagaacagtagcataagtggttggcagaggcagggaaagactagcagagaggagaaagggggaaagagagagagagaggaaagaaagagagaaagaggcagagagagagaggaggagacaaagayggagtcaaagacagagagaaagagtgaggcagagagagagaaagagagacacaaagagggagtcaaagagagaaagagacagaaagtcaaagagagaaagaaagagagagagatagaaatagtaaagagaaaacagtgtaccctattcctttaaaatccagggtaaatttaaaacctataattgataattgaaggtcttctcctgaccctataacactccaataccaccttgttgtcagtgtaaacaaggcccgaaagcactgaggccactgacaaccagtagccttcctatcaaaaatctttaacctagtaacccgcagatggcccaaatgcattcaacctgtagcggcaactgctttgctaacagaagaaagcagaaagtctaaaaagacttttagaggaaacctcattgtgagc

SEQ ID NO: 732017 - DNA, 559 bp, Homo sapiens
cccgcatgaactggattcaatgaggaaagagcatgttccatgaaaatggccttggcagaggggcctcttgccacctttgctttaagaggaaatagatggagactctgttttggtctgatgtcctttgagaggcagaaggaggtaaatcacttccagataaagatggtggtggggatggtggcagagggagcattatgatgggaatagcagtagccaacccttgtagggcttgtaaggcagagacccccaggctgtcatagggatcacatctgttttcytagagtttaaatgagagccagagctctataagtgctaagcagtactttaaaacaccagactggtcctaaagtattccaacaatacataagcttattgtagggtttggagataagtttcatcttgaggcctagagtgttatgttgaaaaatgtcaaagaggagtactggctccactggatacaatgtagtgacagattcacaatgtaccatgggttggatgggtggagcaacagctcatcccacttatccaccatcccttccttgtttgcttcaccttccaa

SEQ ID NO: 732018 - DNA, 559 bp, Homo sapiens
tccagtatggtagctcctcaaaaaattagactcagaattaccattgatccagcaatttcacttctgggtatatgtgtaaaataattgaaaatgggatctcaaagaagtatttgtacacccatttttattgtagtattattcacaatagttaaaatgcagaagcaacccaaatgtctactgatggatgaacagataagcaaaatgtgttacgtacaaacaatatagtattattcagccttaaacaggaagggaattctagcatatactatgacatggatgaatcttggggatattgtgttaggtgacataagccagtcacagacagacaaatgttgtatgattctactgatatgaggtacttaaagtagtcaaattcacagagttgaaaagtagaawgatggttgccaggggccagatgaaaggggaatcgggagcttttgtttaatggatacagagcttcggttttacaagattagttatggagatggatggtgttggtgactatacaccaccactgaactgtacacttaaaaatagtcaaggtagtaaagtttacatt

SEQ ID NO: 732019 - DNA, 571 bp, Homo sapiens
taacatgtttaatcatagttgattgaagttctctctctggtagttccagcatctggatccactctaattcttgtagactgctctgttgattgctttgtctcttggtttttgttttttgttttgttttacctttccttttttatgtgagttataattttggatttaatgttgggcattaggttatagggctatagcttttaagcctagagatgaacacatttctactggagttgagctaggtttggattctcttgctgttatggtgcaccagtggtttcaaatttgtttagtgttactwtgtccttgagtttgctggaagattattctcagtgttcctgctccactcagttttaggccttctctgtgctcttgtgcttcagcagggtctcttcatgttctcatctctcctccaaatgtagattgctattggttgttcctcactgtttgctagcctggcagttgggaggagggcacttagggctttcttgtcctggtcaagcttcaactgcttggttactgtttatcatctctggctcattttcaaattttcttttgtttgaaagtttttaaa

SEQ ID NO: 732020 - DNA, 493 bp, Homo sapiens
agatccttggagaatggctgactcaacatcttggggcttgaaaaagtcaacctgggagtagaacatcttgtttttgccagtaggtgaggactttatgagacaattcctgagtatttcttttaggagcaggcatgcaccaagttgtagcaattccatcaaaaagcctaaaaacaaatgacatttagtaaaaaggactggatgatagctatraaacaaaaataaaaatataacaatatgtgactgttcttgttaattataatgcctatgggatagttgatataggtgagtgagtgttgttcctatgaagtatatattgaatttttctttacctatgtgggcaagaatgggtagattaaggaattgtgagcaagcaagatatttctgggaaaagaagagattttattaagaatcagaaggacagggaacaaccaggttgttccacagagtgtatcaatatgatggacaagcagagggagaaagcagtctccttgga

SEQ ID NO: 732021 - DNA, 493 bp, Homo sapiens
agatccttggagaatggctgactcaacatcttggggcttgaaaaagtcaacctgggagtagaacatcttgtttttgccagtaggtgaggactttatgagacaattcctgagtatttcttttaggagcaggcatgcaccaagttgtagcaattccatcaaaaagcctaaaaacaaatgacatttagtaaaaaggactggatgatagctataaaacaaaaatraaaatataacaatatgtgactgttcttgttaattataatgcctatgggatagttgatataggtgagtgagtgttgttcctatgaagtatatattgaatttttctttacctatgtgggcaagaatgggtagattaaggaattgtgagcaagcaagatatttctgggaaaagaagagattttattaagaatcagaaggacagggaacaaccaggttgttccacagagtgtatcaatatgatggacaagcagagggagaaagcagtctccttgga

SEQ ID NO: 732022 - DNA, 583 bp, Homo sapiens
ttctaagcagcaaggcattcaagatgtgacttgggtgcccttaaaagcattcagtttcattcattcacaaagatatggtttggaattgaaacttatacttaaaatggaagcagagcataaaagtttgaaaaatttgcagctgacaatgcaatagaaagtgaaaacccattttctgaggagaaattcaagccagctgcagaagtttgcrtgagtaatgagaagccaaatgttcactgccacgacaatggggaaaatgtctcccgagcatgtcagaggtctttatggcacctcctcccatcacaggcctggaggcctgggtggaaaaatggtttcctgggcagagcccagggccctactgcttcgtgcagtctcgggacttggtgccctgagtcccagccatggctaatagggtccaatgtacagctcaggccattgcttcagagggtacaagccacaagctttggcagtttataaatggtgttcagcctgtgggtgcataaaagtcaagaattgtgatttggtaacctctgcctagatttcagaggatgtttggaaatgtctgatgtccaggcagaggtgtgct

SEQ ID NO: 732023 - DNA, 650 bp, Homo sapiens
gaaaataggtaaagaaaagaaaaatggaaaggtggttgtagaaaagattctatttccaggatcatgaggcttttaaagaagaactttaattatcttaatatatccaagaagggaagtcaagggaagccctcaggaagcccaaggaaaggggaccacgtgggagaaacaagtattaactgtgacttaactaaacatattggctaactagagttctcatttccctaaaggcacaaataacatcatttatatgtgtaagatctgtagtgatattctgtaagtatcagcaaactactgatactataaaaagcacccagtatggaacaagaaaaattgtggaattgtttccaagtactaaaagataatttttataagaagatgacgctttcaaataycaagctttgtaatgcttcaaaagaaagatctgaatgtcatgctttgtaaaagagattttgtgagcaagtttgtactctgtagaacagccgctcatcttgagaccatttgcttcgaatggttttaaatgtgatggtgtcacggtatgtgagtaccatcatgcccctggaaacatgtagcacaatccccaagactaggagaagaatgttcaacgtacatctattaggaagtgctcccgctcttgaccatcggaaactcta

SEQ ID NO: 732024 - DNA, 507 bp, Homo sapiens
cccacagcattgcctatctccctgtgatagcttgattctaaagataacagcctgcctttactcagaaaccaggactgtgacgtgttttgcacacattctcttttcactttcacagtgtgtgactatggcatgcaacttatgttctctgtgcctcagtttactcaagtgttaaacaggaatactcacatgaggattacatgagttaaaatggataaaatggataaaagtagagagtaaattatttaaactttatcaaatccttggkacatgaccttaatacaattaagtatttgttaaatacatacattttaaagaaacgtcatcatatccacacacctatgaggcacctgcccaggaccacagagccaatcaatcaggtgatgagtgattccaggccagcaggaaaccaccgcccactgacacagggactgcaccatccatccttggtttgcatggtgcctgccatgcttcctgtattactgttaaatacatggggcaggcctttgg

SEQ ID NO: 732025 - DNA, 553 bp, Homo sapiens
caacctcggttatgaatgacccacatggagcccaaccccggacccaggctgaccagaccagcttcctgtgccccaggactctctgggggcctggatgggactaggaggtagctctgtgagtctccaccttaacctgagagatctcaaggtcagcctgtctgacctgacacacagcatcagctgcgtgtgagattccgggtcacgttcctggaagatgccccccactttctcatctgtgtgtccctggggcacttcccaagttctgtgcccctgagcccagcttggtctcatgatctccccagcactcctaggaaggtggccctatctgtagcctgctggaggcgaagagctggcccagtgacccctaaggaccctattatctaggagctaaaaatcctccacacagacacacrggtatgtggcagagacacacacaggcacactgacctcaggcctgtgtgagtcagagcagcccgcagtggtgcacctgtggcccctcacccaggccagcctcgtggacaaccccaagaactagcggaggccaggttgggac

SEQ ID NO: 732026 - DNA, 622 bp, Homo sapiens
gctacaagtgttgagacagagcaggaacctctcttaggggtctgccaccagccccccattcaatgcacgaaaataaagaaacatttgagtcccttcaagggaaattccaggcacctagctagccctgcaaccagcaattagggaagtgaatgaatgayctgctaagcaagaaagtagtaatagtttaaacaatagtacccaaataagagtcacaaaacgttagcttccttatagaaactgaagatgacatcttgacatatgtccttgagttgtttttcagaaattaggacccccaccggtgggggtcacttccactctctgggcctgtttccttcttacagagcagacttcctccagattggcatcccatgaccaagggtatttcagaggtggaaagaatggagaacctctgggatcctatttccactaagaaaaaaaataccagggggagaggctgcatatgtgtttgcaaatacacaggaaaaaagtgttaggagaatactcctcaaacttttctcagtgtaaacaaaaaggattttgagagtggaataggggaatgaaggagaacgttcacattattatctgaattatttatttttaaagataatttaatgcttttgta

SEQ ID NO: 732027 - DNA, 719 bp, Homo sapiens
ggccacaaagacgataaggatccaggtctcccgcgtggaaggctcatctatcggtcggttcaggaaatccacccagggtgtctcctggtgttatcagaaaggggtcccgatccaggccctaagagagggttcttggatctcatgcaagaaagaattcagggcaagcccatagagtaaagtgaaaacaagtttattaagaaagcaaagaagtaaaaggatggctactccataggcagagcagctccagggctactggttacccattttttggttatttcttgattatatgctaaacaagggttgaattattcatgagtttcagagaaaggggtgggcagttcccggaactgaggcttcctcccctttttagaccrtatagagtatttcatgatggtgtcatggcgtctgtaaactgtcatggtgcttgctggtgggagtgtcttttagcatgctaatgcattataattagtgcataatgagcagtgaggaccaccagaggtccctcccattgccatattggttttggtggcgtttagccagcttctttactgcaacctgttttatcagcaaggtctgtatgacctgtatcttgtgccaaccttctgtctcatcctgtgacttagaatgcctaacctcctatgaatgcagcctcattttacccagcccttattcaagatggagtaattctggcttaaacacctctgacactggggcaaatg

SEQ ID NO: 732028 - DNA, 719 bp, Homo sapiens
ggccacaaagacgataaggatccaggtctcccgcgtggaaggctcatctatcggtcggttcaggaaatccacccagggtgtctcctggtgttatcagaaaggggtcccgatccaggccctaagagagggttcttggatctcatgcaagaaagaattcagggcaagcccatagagtaaagtgaaaacaagtttattaagaaagcaaagaagtaaaaggatggctactccataggcagagcagctccagggctactggttacccattttttggttatttcttgattatatgctaaacaagggttgaattattcatgagtttcagagaaaggggtgggcagttcccggaactgaggcttcctcccctttttagaccatatagrgtatttcatgatggtgtcatggcgtctgtaaactgtcatggtgcttgctggtgggagtgtcttttagcatgctaatgcattataattagtgcataatgagcagtgaggaccaccagaggtccctcccattgccatattggttttggtggcgtttagccagcttctttactgcaacctgttttatcagcaaggtctgtatgacctgtatcttgtgccaaccttctgtctcatcctgtgacttagaatgcctaacctcctatgaatgcagcctcattttacccagcccttattcaagatggagtaattctggcttaaacacctctgacactggggcaaatg

SEQ ID NO: 732029 - DNA, 743 bp, Homo sapiens
aatggaaaaaggcattcttgtttttgtttttgttttggagatggagtctcactctgttgcccaggctggagtgcaatgccaccatctcggctcactgcaacctctgcctcccgggttcaagtgattctcctgcttcagccttcgaagtagctggaattacagatgtgcgccactttacctggctaatttttatatttttagtagagacggggttttgccatattggccagcctggtctcaaactcctgacttcaagtgatccacccacctcagcctcccgaagtgctgggattacaggcktgagccatggcgcctggcctggaaaaaggcattcttaatttaaactatattttgctctaaagataatagtccactcataaattctttctgaaattaattgcacaagagaataacaatacagatagtctgtcacaagccgatcacaagcctttgtaataaaatacactattcttagctctaatatcctacacaaacaagcattacatttgaggtagggcgttcttcctcttgcttcctgaggataccctactctaatagattagtttctaataaaccatttaaactttactgtactttgcgactcaccctaaattctttcctgtgcaagatccaagaacctgcccttggggtctggggtgaaaccccttttctggtaagagtactgttacatgggatccacactatgggctcagagttggtccctttccagcgttaatccagaa

SEQ ID NO: 732030 - DNA, 743 bp, Homo sapiens
aatggaaaaaggcattcttgtttttgtttttgttttggagatggagtctcactctgttgcccaggctggagtgcaatgccaccatctcggctcactgcaacctctgcctcccgggttcaagtgattctcctgcttcagccttcgaagtagctggaattacagatgtgcgccactttacctggctaatttttatatttttagtagagacggggttttgccatattggccagcctggtctcaaactcctgacttcaagtgatccacccacctcagcctcccgaagtgctgggattacaggcttgagccatggcgcctggcctggaaaaaggcattcttaatttaaactatattttgctctaaagataatagtccactcataaattctttctgaaattaattgcacaagagaataacaatacagatagtctgtcacaagccgatcacaagcctttgtaataaaatacactattcttagctctartatcctacacaaacaagcattacatttgaggtagggcgttcttcctcttgcttcctgaggataccctactctaatagattagtttctaataaaccatttaaactttactgtactttgcgactcaccctaaattctttcctgtgcaagatccaagaacctgcccttggggtctggggtgaaaccccttttctggtaagagtactgttacatgggatccacactatgggctcagagttggtccctttccagcgttaatccagaa

SEQ ID NO: 732031 - DNA, 628 bp, Homo sapiens
caccatcaccctggggttaggtttcacatatgaattctggaaaagggagagacaaaaattcagacaacagcaggctgctcaatcacaccttttctcaagaagggaacacttagagtacaggtcacttacactgttgaatgtcaggataaacccagttgagtgtggacagaatatatcaccaatctaaatccgattgtaagcagggttaatatggttcttttgcttcttcctttgaagcggcattcgttcatctagaattttcctccctctctttcccaccaagcatgggcctccaaactgctccccacaacctgccttttcccatcccatcaccacatgatggaggagaggaaaaatcaagaagacaaacatatatatatatatatatatatatatatatatatttttgttttgagacggagtcttgctttgtcactargctggagtccagtggcgtgatctcggctcactgcaacctccgcctcccaggttcaagtgattctcctgcctcagcctcccaagtagctgggactacaggtgcccaccaccacgcccagctaatttttgtatttttaatagagacggggtttcaccatattggtcatgctggtcccaaactcctgacctc

SEQ ID NO: 732032 - DNA, 647 bp, Homo sapiens
ctggattaagaaaatgtggcacatatacaccatggaatactatgcagccataaaaaacgatgagttcatgtcctttgtagggacatggatgaagctggaaaccatcattctcagcaaactattgcgaggacaaaaaaccaaacaacgcatgttttcactcataggtgggaactgaacaatgagaacacttggtcacaggaaggggaacatcacacactggggcctgttgtggggtgcgggaatkggggagggatagcattaggagatatacctaatgtaaatgacgagttaatgggtgcagtacaccaacatggcacatgtgtacatatgtaacaaacctgcacgttgtgcacatgtaccctagaacttaaagtttatatataaaaaataaaaaataaaaattcccccaaaaaaagaaacaaataaccctattagcagacacattttctcctaacacttaaccaacagcgtccagtcctgctacttgttagaggcgctgtgttctgctcctcctgcccagcttgtgacccagagccctgcagaaaggatagggctgaaaagcaggcataaaaggaaacactgcacagaataaaacagcaaagcaatcctgaatatccaggtaatgcctgttcattctttgcaacgtg

SEQ ID NO: 732033 - DNA, 647 bp, Homo sapiens
ctggattaagaaaatgtggcacatatacaccatggaatactatgcagccataaaaaacgatgagttcatgtcctttgtagggacatggatgaagctggaaaccatcattctcagcaaactattgcgaggacaaaaaaccaaacaacgcatgttttcactcataggtgggaactgaacaatgagaacacttggtcacaggaaggggaacatcacacactggggcctgttgtggggtgcgggaattggggagggatagcattaggagatatacctaatgtaaaygacgagttaatgggtgcagtacaccaacatggcacatgtgtacatatgtaacaaacctgcacgttgtgcacatgtaccctagaacttaaagtttatatataaaaaataaaaaataaaaattcccccaaaaaaagaaacaaataaccctattagcagacacattttctcctaacacttaaccaacagcgtccagtcctgctacttgttagaggcgctgtgttctgctcctcctgcccagcttgtgacccagagccctgcagaaaggatagggctgaaaagcaggcataaaaggaaacactgcacagaataaaacagcaaagcaatcctgaatatccaggtaatgcctgttcattctttgcaacgtg

SEQ ID NO: 732034 - DNA, 551 bp, Homo sapiens
gatgggagacaccaagataaaccgcctggatttatttctctgccagtggggtcctgtcccacatccttccctctctcactgagagagcagcagacgcaggggaggggaaggagcctgggctttggatttgcatagacctcagtttgcatgtggctaggccacactcaaactttttaacttgagagcgcatcagaaacacttggcctctggcttcaggatcatttaatcatgaaacattagatggagccatagttttacaytgggcactggggactaaacacatttgaacagaccccaattctgtccctgagaatatctcaggagcaactacgatgcactgcactaagtatcacattagacatattacgaaaggtcatggaagccaaagagaaaaggatatttgtcctgcatgcaaggaaacaaaaggtttggaaagcttcaccaaggagggtacatttgtgatgggccttgaaaatacatagaaggaagagaaaggacaccccaaatagaaagaaaagtacagaggcagaacaataggtggcaagcttgga

SEQ ID NO: 732035 - DNA, 630 bp, Homo sapiens
cagcatatttttgtggattcatttctgggttttctattctattctattaatttgtaagtctgtgctttcaccaataccactcatcttgatcaatgtagttatataggccttgaaatcgagtagatagactcctcacacttttttttctttttaaaaatggtttaactgttctacttcctaygattttctgtatacattttagaatactctcatctatataaaaaatcttgctgggatcttgatagaaattgtgttaaatctgcatataattatagggagaactgacatatttgctatgtttcatcttccaatccatgaacacagtatgcatctccacttatttagatgttatttgatttctctcatggcactgcatagttttcagcatacaagtcttgtacctacaagtgttgttagatttacatctacatatttcaccttgttatatgttgtaaatatgattttatttttatacaggaatagaattgattttgtatgtttatcttatatactgtgaccgtgctagaactcatttattagtctagaaattttgttaattagcttccttgggattttctatgtagataaccatgtcatctgcaaaagggacaattttacttctgtcttttt

SEQ ID NO: 732036 - DNA, 630 bp, Homo sapiens
cagcatatttttgtggattcatttctgggttttctattctattctattaatttgtaagtctgtgctttcaccaataccactcatcttgatcaatgtagttatataggccttgaaatcgagtagatagactcctcacacttttttttctttttaaaaatggtttaactgttctacttcctacgattttctgtatacattttagaatactctcatctatataaaaaatcttgctgggatcttgatagaaattgtgttaaatctgcatataattatagggagaactgacatatttgctatgtttcatcttccaatccatgaacacagtatgcatctccacttatttagatgttatttgatttctctcatggcactgcatagttttcagcatacaagtcttgtacmtacaagtgttgttagatttacatctacatatttcaccttgttatatgttgtaaatatgattttatttttatacaggaatagaattgattttgtatgtttatcttatatactgtgaccgtgctagaactcatttattagtctagaaattttgttaattagcttccttgggattttctatgtagataaccatgtcatctgcaaaagggacaattttacttctgtcttttt

SEQ ID NO: 732037 - DNA, 619 bp, Homo sapiens
aaaagttcaggctacagtagtcagcctgcagctggtatttaagccatggactgaattagctcacttacaacataaatgtagatagagaagccacccaaggaattaaccttgacgcagcacagccaacctagaaggagcctccactgaagaagaaccaagagttgtacctcatacccaagtgaagaagatgttttaagaaggagggagtggccaaccatgtcaaatgctgcagggtgtcaaatatgatggcttctggatttggccaatgtggaggtattgggtgatcctgacaaaagcaatgccattggagttgtggtggggtgcaggactggtgtagactgaagagagaaaactgagtctccatgtaaaaaaaaattatgttaagaaatttttctacaaaagatatctaagaaatggggcaatcactagaggagacgrttatgtcaatacatggtttctttttaaaaatggaggccattagagcatatatgcatgtgggtaagaataatccagtggaaaatgaataatcagtcatgcagtgggggggcagcacttgcaagcaaagttcctgagaaggtgagagaagataggatccatttcaccagtaaggatgctagcc

SEQ ID NO: 732038 - DNA, 566 bp, Homo sapiens
gcgtgctgcacgacgacctcagtcatttaattatgcattatatacatctctccagaggacaaaaacctagactttttaataatggcatttgaaaaagtacaagtcacaaaagcaacactcgatgatagtaaagaacagaaacgccgaatatgtaggtggagcaagtggcgtcccrtcccgccagcagacgcggccctcgtcgctgtgccacgccggaccctgaaggacagagcatggagagggagctgcagggtctgggaggcaaacatctttgtgacttctgatgctcattggaaagttgcccccagaagcgacgccatttgacagccccacccttagcgctgcgtctgtcccctcagatccctgccagcgctatgtatttttattcttttttccctttgccagtgtgataggctgtcgtgttttaatttgcatttctttgattctttgcagggttgaatggcttcgtttgtttttggcccttggtttggttgtctttcctctaggccggcaggggcggggtgcgtgtttgcggatgtccttggtgttcttggcaggatcactga

SEQ ID NO: 732039 - DNA, 452 bp, Homo sapiens
gtcggcccttggaacagcagagtaagggcttgggagcgtggagtatggcgggtggtgggtcccaagctgggctctgaggacttggttgggggcagtcacagcccagaagcttagatgtggggccagagggcaatcaagccagccccttgatgtgcgtggctttcaccaccctccctaacaacccgtctgtcaagagctcccctccctaccagataggatgctttagcagggtgctctcccaacctctcaggcacccaaagcttctrtggtttcttgggaactcctcccccttaaatctccccacccaacccctctccagacccccacactctgcaagcccaggtgctcactccacacaagtctaataatccaggcagggactcttccaccagatccatgcttaagtccaactcgaggaatattctttccttaatctcaactctgaggtcagg

SEQ ID NO: 732040 - DNA, 452 bp, Homo sapiens
gtcggcccttggaacagcagagtaagggcttgggagcgtggagtatggcgggtggtgggtcccaagctgggctctgaggacttggttgggggcagtcacagcccagaagcttagatgtggggccagagggcaatcaagccagccccttgatgtgcgtggctttcaccaccctccctaacaacccgtctgtcaagagctcccctccctaccagataggatgctttagcagggtgctctcccaacctctcaggcacccaaagcttctatggtttcttgggaactcctcccccttaaatctccccacccaacycctctccagacccccacactctgcaagcccaggtgctcactccacacaagtctaataatccaggcagggactcttccaccagatccatgcttaagtccaactcgaggaatattctttccttaatctcaactctgaggtcagg

SEQ ID NO: 732041 - DNA, 575 bp, Homo sapiens
taacaagccttctgcaagttaaggttccacatggtagccgtggtacagaggcatttctctagggtggagaggcttgtgctctacaccaggactgcccaccgccctggctggggccacacaaagaggggagaaaggaatccctcagaagccagcccccaactgtgtcccagagaaaggcggggcacctgggacacctaggccggcagcgaccacagcctccctccgctttgtgccgagaagccgcacagtgtggtcccgacattccacctgtccttgcccatgtgtggggaggcacatggccccaagtctattaaacagcargtgaaatcttcctcatcttggataaacccacaactgtaattccacgtaagtgtgtctatgtgcacacacagtaccccacgttctaccgtagaatgtaaggcgcctgcgtgccaggtgatggctctaaggatgtggtagagaaaaccggagtagacatgagcaagcacagggtaaggaaagaaaacacacgggcctttcaaaagggaagagcaaggggctgggtgaggagaaaggtgacccacagaagggcttgg

SEQ ID NO: 732042 - DNA, 486 bp, Homo sapiens
cctggtttctacttctaagagatggagactgctgaacttcatacccagacaagttaaagaaattgaaactctaagttcttatatacatattttatgaaacaaaattctcagaaaatgcccagtttacccatgggctacatttttacaagttycaatttgtttaaaactcagggtttgttttcctatcagaggtgtggttgggggctcgggctggggctggctgaaacctgagtgcctgctgtggaaagtagcaacaggaccagcacctggtggtcccatctgcctgtgggaataagtagggggcagtgactcgtcattgagtggcgcggggggatgtgagagcccctcttccagggacttgggggatggcacctggtagctttaaggacctaacctgttgatggtgcttattctcccagccacattctgttgagaacattggcctttccctgttctcagtagacctgtgccgtggcacgtctttca

SEQ ID NO: 732043 - DNA, 560 bp, Homo sapiens
ttgaaaggaatccctttttttccctggaggagtaagtctcaacggtaggcttaaaatattcagtaaacatgccataaacagatgtgctgtcattcaggctttgttatttcatttatagagcacaggcagaatagatttagcacaattctttgttttgagacagggtttcactcctgtcacccaggctggagtgcaatggcgtgatcttgactcackgcaacctcagcctccaggctcaagaaattctcctgcctcaccctcctgagtagctgggactgcaggcacacttcaccacacctggctagtttttgtatttttttgtagagatggggtttcaccctgttgcccaggccagtctcgaactcctgagctcaagtgatctgcctgcctcgacctcccaaagtgctagaattacaggcatgagccactgtgtctggcctgggtttagcataatttgtaagggtccaaagattttctgtatggaaaatgagcaattggcttcagcttaaagccaccagttgcattagcccctaataagacagtcagcctgtcccttgaag

SEQ ID NO: 732044 - DNA, 560 bp, Homo sapiens
ttgaaaggaatccctttttttccctggaggagtaagtctcaacggtaggcttaaaatattcagtaaacatgccataaacagatgtgctgtcattcaggctttgttatttcatttatagagcacaggcagaatagatttagcacaattctttgttttgagacagggtttcactcctgtcacccaggctggagtgcaatggcgtgatcttgactcacggcaacctcagcctccaggctcaagaaattctcctgcctcaccctcctgagtagytgggactgcaggcacacttcaccacacctggctagtttttgtatttttttgtagagatggggtttcaccctgttgcccaggccagtctcgaactcctgagctcaagtgatctgcctgcctcgacctcccaaagtgctagaattacaggcatgagccactgtgtctggcctgggtttagcataatttgtaagggtccaaagattttctgtatggaaaatgagcaattggcttcagcttaaagccaccagttgcattagcccctaataagacagtcagcctgtcccttgaag

SEQ ID NO: 732045 - DNA, 622 bp, Homo sapiens
gtcatcacggagtatcttcttgccttctgtctcgacctcttggctatctttccaataagtttccatagtgaagaaggcagttgtacttaaattagatcttccccatctctttaaaacacccttgttctctctcctccaagccactgagtcatactttcccatcttctcaaagacttccctgtcactggagatgagggctaggacttggcactttctccttttctgattttacttcctacttcaacaagaaattaatatcacaacttgaaaagccttcctaactggtaaaatcgttctgctggaaaagctcattatcttttttcttttttytttttttctttcctgattaacctgcttctcacctatcctctgtccttcggaatctttttctttgtatggctgtctcaactcagcctaactttctttcaaagccctgctgagaagaactttaaaacattttgtatgccaggcacagttgtgcacgcctgtaatcccagcactttgggagactgaggcaggtggattgtttaagcccaggagttccagaccagcctgggcaacacggcaagaccccatctctacaactacaaaaaaatgtatctgggcctagtggcacgtgcct

SEQ ID NO: 732046 - DNA, 613 bp, Homo sapiens
aacaacatggcaagtcctccaaaaattaaaaatagaactaccatgtgatctggcaattccacttctgggcatttttccaaaataattaaaatcaggatctcaaagagatgttagcactcctatattcattacagcactattcacaatagccaagatgtgaaaataaccctaaatrtccactgacagatgcatggataaatgaaatataataaatacatagaatgaaacattattcagttttcaaaaagaagaaaattctgcaacacgcaacacggatgaatcttaaggacgttaggctaaatgaaataagccagtcacaaagagataaatactgcatgataagataaatactccacttatatgaggtatttaaaatagccaaatttacagaatcaaagagtagaatggtagttaccaggggctggggtgagggggaaatggggagttactaatcaatggcattaaatttcagtcaagcaatttgaataagctctagaaatctatagtgtaacactgtacatgtagaaaacaattcattgtacacttaaaaatttaagagggtagatctcatgttcttcccacaattttttttttaaagacttccttgaggcta

SEQ ID NO: 732047 - DNA, 613 bp, Homo sapiens
aacaacatggcaagtcctccaaaaattaaaaatagaactaccatgtgatctggcaattccacttctgggcatttttccaaaataattaaaatcaggatctcaaagagatgttagcactcctatattcattacagcactattcacaatagccaagatgtgaaaataaccctaaatatccactgacagatgcatggataaatgaaatataataaatacatagaatgaaacattattcagttttcaaaaagaagaaaattctgcaacacgcaacacggatgaatcttaaggacgttaggctaaatgaaataagccagtcacaaagagataaatactgcatgataagataaatactccacttatatgaggtatttaaaatagccaaatttacagaatcaaagagtagaatggtagttaccaggggctrgggtgagggggaaatggggagttactaatcaatggcattaaatttcagtcaagcaatttgaataagctctagaaatctatagtgtaacactgtacatgtagaaaacaattcattgtacacttaaaaatttaagagggtagatctcatgttcttcccacaattttttttttaaagacttccttgaggcta

SEQ ID NO: 732048 - DNA, 664 bp, Homo sapiens
ggatatgtggtcttctaacagaccttatataagcagtgatgccatttcatttagccaaactcctttggtctcccagacacccaaagaataaaatccaagttcctttgcttagatgtaaagctcttcatgggctggcccagatctgcctttccagactcttttcatgttacccataattatcatactgagcttctcaaaggtgccaagatatatcaattccrtgcctttgtacaagccatgtcttctacctgaaatattctcactctcctggcaaactcttatttattcttaaagatctagctccaaatgtcacctactctaaaaagttcttattcattcctccaagcagagttagctactgagttttgggattacactttaccttagattataaatctaatagtatcttcatcagattgtcttgtaatttatctgttcacatgcctgtttcttccactagaaaaaaaaagctccctgagggaagatcttattcatctttgaatccccagtcccaagcttggtaaatgagtaaaactacatatccctaagtaaatgtaatatcataggcactaaatatttcaggagtgaatggattccacaatctgaaaaaaaaaaaaagaagaagaaaaaacaaatgtgctttctttaaaaagttaaaaggcat

SEQ ID NO: 732049 - DNA, 633 bp, Homo sapiens
aaaataaaaaattggtaagttggactttataaaaattttaaacctgaacatctaaaaaaaaaaaaaaagaccagtccagagattggaagacaatatttgcaatgcacatatctgataaaaacttataaacagccaaaacaacccccacaaagcagtaagcaataaacaatccaattttaaaagggtacaggtacaacttgggcatttcacaaaaggagatatatgaatggataatcagtatgtggaaatgataattaacagtgttaatcatcagagaaatgcaaattaaaacatggccacggccgggygcggtggctcacgcctgtaatcccagcactttgggaggccaaggcaggtgggtcacctgaggtcaagagttcaagaccagtctgacctacatgggagaaatcccaactctactaaaaaaaaatataaaattagccaggtgtggtggtgcatgcctgtaatcccagctacttgggaggctgaggcaggagaattgcttgaactcgggaggtggaggttgcagtgagccacgattgcatcactgcactccagcctgggcaacaagagtgaaacatcgtttcaaaacaaaacaaaaacatacaaacaaacaaaaaaaatggccacaag

SEQ ID NO: 732050 - DNA, 591 bp, Homo sapiens
ttcaaaacaaaacaaaaacatacaaacaaacaaaaaaaatggccacaagcattaaaatggctaaaactgacacgactaataacaccagtggttggtaataatatgaagcccttggaactcccatacattgttagtaggagtgtaaaagtgtacaaccatttttggaatattgcttgacagctatgattcagcaattcctctcacaggaaatttatccaataaaaatgaaaataaatgttcacaaatactctcacagaaatgttcactgcagttttatttaamcccaaatgccacagagaatggataaacaaactacgatatattcctacattgaaatactactcagaaataccaaggaatgaattactgatcccacggtaacaaagatgaactcaaaaaatactgttgcatgaaagaatccagacacaatggggcacctactgataattctatttatgtgtagaagaggtaaaactaatggacaatgatagaaatcaaagcagtgatcagggatagggagtgagggaaatggaggagaaatgtatactaaggaactttccagagtgatcaaaatgtcctttatctttattg

SEQ ID NO: 732051 - DNA, 544 bp, Homo sapiens
agcctgggagaccaactgaaccacggaaataagggccaaggtgggagatggtaaggctgaaaagggcataaggtggaaggagatagaacttacccaggtgagagatgagaaggagctgaaaaggaagtaacagaaaggacacaaattagattcaactttgatttttttgaaaaattgagaggtcatagtgaagacaaaagccaggcttcatatttggataatcaactgaattttagtgccaataactgagattraaaataaaaatacagggccgagcgtggtggcttatgcctgtaattccagcactttggaaagccaaggcaggcagatctcttcagctcacaagtttgagaccagcctgggcaacatggtgaaaccatgtctctacaaaaacaaacaaacaaacaaacaaacaaacaaaatatatatacacacacacacacacacacacacagaaattagccagggttggtggcacatgccagtagtcccagctacttgcaaagctgaggtggaaggatggcttgagcccgggaggcagagg

SEQ ID NO: 732052 - DNA, 544 bp, Homo sapiens
agcctgggagaccaactgaaccacggaaataagggccaaggtgggagatggtaaggctgaaaagggcataaggtggaaggagatagaacttacccaggtgagagatgagaaggagctgaaaaggaagtaacagaaaggacacaaattagattcaactttgatttttttgaaaaattgagaggtcatagtgaagacaaaagccaggcttcatatttggataatcaactgaattttagtgccaataactgagattaaaaataaaaatacagggccgagcrtggtggcttatgcctgtaattccagcactttggaaagccaaggcaggcagatctcttcagctcacaagtttgagaccagcctgggcaacatggtgaaaccatgtctctacaaaaacaaacaaacaaacaaacaaacaaacaaaatatatatacacacacacacacacacacacacagaaattagccagggttggtggcacatgccagtagtcccagctacttgcaaagctgaggtggaaggatggcttgagcccgggaggcagagg

SEQ ID NO: 732053 - DNA, 550 bp, Homo sapiens
tctaaattaactgagacctgtgtcaaattttgggggttcacagaacttaggaggttgtaggtgactttagaaagagcagttatgactctcttggtggatggattgctgtggggactctcttggtggatggattactgggggttgaggtgtgaagtgaaggtaaggtaggcattgaggatgtagattactctgtttagaagtctggatgaggaaggagaaaagtaggatgatacctaggagggaccrccaggccagtggatgagttttatggtattaggggaaggtagagagggagaagctgaggatgctgcagaagaggggagattgttaatgaagcccagacctggaggggccaagagggcacagatccaggctctctctgtgctcttattgcctgatcacttgtccatcctctacatccctctactagtcagggagctccatatatgctgtgctgagagtgttgcctggcacacagccatggcatacttgctgagtgaatggataagtgattcatacttgctgagtgaatggataagtgattcatact

SEQ ID NO: 732054 - DNA, 420 bp, Homo sapiens
aaatagtccatacatatacattaaacagacataattttgtaaccaaaccctaaatagatgcccgtcgtgctgtgggtcacttctctgtgtgctatggtggatggcagttggagaggttgcctgggacgtgcaggcactccatgctgctggaaactgctgactatcaatacaaccctgaatcaccaaccgtgtttccataatctttgcccaagtaactaaacactgttccccaaatgatatctcccatttcttcctactcccagctgttgtgtgtactgktcccttccctggaatgccagcctaccctgtgtccctttcagcttctctgtttgtcaaagctggaggcttagaagccatgggacccatagagaaagagatgggaaatgaacaggatgggaagtaccaggaagagatgccagt

SEQ ID NO: 732055 - DNA, 633 bp, Homo sapiens
tcaagtattctatcatcttaccagcattcattcactctgcttaggataattatttattctggcacattttagaattccaagaccgcttatagtgtctggcacatagtaaggactgaaggatgtttgatggatggacttgaattgggattcgaggattgatagaacttgtgaggacccttgggtgcctccaggaagagaagccaccccaggaaggcttggcyagggagtcccacctgagcatgggagagacggttctgcgcatgaggatgtggcccaggtttagtcggctgggcagccctgggcagtgtagagctggatttgactttaggtcttgtctctagtcagtaattcgatcaagttagcacaggattcgatcaagttctgagctttttgactagtctgcgagctccttgagggagagactttgtcttttgttgctgcattttcagtagtctatgcaagttttgataccataaccactcagcaaatgttattctcaattgaaggacaaaggaaataacagtgtaagcacttggctctctcttgtctgcttgctgtgaggctccaaggtaaactcgtggctggatccatgatccatcattcaaatcattcattggcagaggaatagaagcc

SEQ ID NO: 732056 - DNA, 633 bp, Homo sapiens
tcaagtattctatcatcttaccagcattcattcactctgcttaggataattatttattctggcacattttagaattccaagaccgcttatagtgtctggcacatagtaaggactgaaggatgtttgatggatggacttgaattgggattcgaggattgatagaacttgtgaggacccttgggtgcctccaggaagagaagccaccccaggaaggcttggccagggagtcccacctgagcatgrgagagacggttctgcgcatgaggatgtggcccaggtttagtcggctgggcagccctgggcagtgtagagctggatttgactttaggtcttgtctctagtcagtaattcgatcaagttagcacaggattcgatcaagttctgagctttttgactagtctgcgagctccttgagggagagactttgtcttttgttgctgcattttcagtagtctatgcaagttttgataccataaccactcagcaaatgttattctcaattgaaggacaaaggaaataacagtgtaagcacttggctctctcttgtctgcttgctgtgaggctccaaggtaaactcgtggctggatccatgatccatcattcaaatcattcattggcagaggaatagaagcc

SEQ ID NO: 732057 - DNA, 564 bp, Homo sapiens
tgactctgccctaagtttctcatgtaatacagtgaggtcgcccaagtcacatggttcactgctgaaaaagtcaggcagcctggcttcagtggatcctgcttaaccactattctgttccaccacaaacatagtacattcccagtaaataattattgaatcaattaaagggagctttttagcaggcaccagggatagtcaggatttatgggctgcatttttagactcaagtccttatgggcarcactggctactgaacagtgcttgggctttgaggttgggcttggcttcagtggtaaagggctcggtctttcccagcttcatgtttttcatctgaagaatggaggcaaattatctcctggattcattaagctttaagctggggttccatggaggaataggagtgttccaatagggagagggtggagaggagcaaatacggggggaggggctacaggcaggagagtggtgtgtgccagtgccatgcattaagtggcattgtggttgctggcaggcatctgacgaggctgcagtgccgagagtgagaggaaagtggcttgaactgag

SEQ ID NO: 732058 - DNA, 499 bp, Homo sapiens
agaagtaactaaagctttggtgtggtcatcaaccctgaatagtttgaaacaacaaacttttcctcccaggttgattagcatcttttcccgttaatcctatctggttaatatttaatccttaaaatttcccaaacttctttaacactcaatcaatcatttataaatttccaaaagaacaacattattaacatcaataacagctgtgattcacaagtttctcttgagcctyattattgggcttcagaaacaaagactttcgtttctcagaaagtctttgtgatcatttatctgagacagcacatggcctgacccctcagcctcagacctgagaaaggattcctggctccttacctgctaatggcaagtggaatctcttgagtattttggttttctaacagatgagttgattcaggcttcctctggttatgaggaactatataaaacagtgacataatttggtcaggttgcaaaagaaaaataattgagaaccattagaagc

SEQ ID NO: 732059 - DNA, 621 bp, Homo sapiens
ggcttagctttaaaaaagagaatagcagagctggcagagacaaatggggcctgaaacacaatagctggaaccacaaagaccatccagggtgagcacagcccactgcaaaaggctgcagctgtctaactgcctaccattgatacagttgattgccagatgtaaatcatggcttctgccttagggaaggcaactcatctcactcacagtgccttaccaacagctggcagagacggagcaggcactctcctgcatggttcggctgcagaagctctgattgccaatgttccttctgttttcagagcaatatccttctgtggttgattacatgggacttgggcatcactaatgatgatattaccacccatgtgggccctgctaaaaatgaatttgaaagcacatctctctttcagaggcaaagccatgtcatttatcgtggtatccccagtgtctcctatggggctgtgcaggtttttgccccrtcaatagtcaaatgtcaaccctgtgactttaagttacctaacttctctgaagcgtggtgaccttaggtgcccagtgagtatggaagtactatttattgggcacatgtgccatccactgggcttggtactttactcttctgag

SEQ ID NO: 732060 - DNA, 614 bp, Homo sapiens
tgttttcaataatggctgtaccaatttacattctcaccaactgtgtgcaagggatcgcttttctccatattcttgccaacacttgccatcttttgttttttgtgtgtgttttttaagtaatagtcatcctaagaggtgtgaggtgatatttcactgtggctctgagttgcatttccttcatgaccagtgatgctgagaaccacttcctatatatgtgttggctacctgtatttcctccctggagaaatgtccacccagatcctttggacatcttccaataaggtcactcattttttagctcttcagttgtatcagttccttgtctatattgaacattaacccttatcaggtatatagtttgcaaatattttctcccattttgtagtttgcctttctactccgttgattctttcctttgctgtggagaagctttttagtttgatgtagccctacttgtttatttktgcttttgctgcctgtccttttggtctcatacccaaaaagtcattggcaagatacaatgccaaggatcttttccctatgttttcttctaggagttctgtagttttgggtataccccaagttgatttaatccaccccaaattgatttcctt

SEQ ID NO: 732061 - DNA, 615 bp, Homo sapiens
ttttgctccatgcatgtttctctacgtgtggcctttccctactaagtcattggataaattttttgccatcatgaactttgttgtcacccctgtcttaaatcctgccatctatactttaaggaacaaagatatgaagtttgcaatgagaaggctgaatcaacatattttaaattctatggagaygacataacacatttggttgatgagagcacaggataaatgccatggaccatcaagactcctgtgatcaccatgatcaccatgatcactatggaacgcgcacatttttagtattgcctgaaaaaactgaaaaatctgcaaaaaggatgcattaaatctaagaattgtatttcagataaagttgcaacattttttgttaatcataaaaagtatatatttctatctaatgtgtgtatctaattaacagcaatgactatctttaattttgatgtagttattttatatctgtatataagcacatacacatatatatgacctaggtttatttatcagtatttttatgctgataataagcatcactggaaattaattttcttatggaaattatgtggatccaatggataaaatatgagtttatataaattagtaaatgcc

SEQ ID NO: 732062 - DNA, 620 bp, Homo sapiens
tcaccatgttggccaggctggtctcgaactcctgacctcaaatgagccacccgccttggcctcccaaagtgctgggactactacagtcgtgagccaccacaagccgcccaaattagccttttaattaaccctgaggattagaatatttgtttcctctttttcctccatcctgatttcatctccagccttctagtactcatgttttttgttttttgtgtttttcttgagattgagacagggtttcactctgccacccaggctgcagtgcagtggcacgatctcagctcactgcaaccttcacctcccagttcaagtgattctcccacctcagcctcctgagtagctggactacaggtgcgcaccaccmcagccagctaatttttgtattttttggtagagatggggtttcaccatgttggccaagctggtctcaaactcctgacctcaagtgatccacccgcctcggcctcccaaagtgctgggattacaggcgtgagccagcacgcccagcctactcatcttttattgaaatgaaggcaaccacacaacacacacacacacacacacagacactcctacctcccacagacggttgagacttcgcttcctactcacccaca

SEQ ID NO: 732063 - DNA, 607 bp, Homo sapiens
taaaggagggcaatggagcagagtgtagaatctctaaatgcagacagatccttaaaaggtgaggaaggctgctcggttttccctcccaatctcttaaacttatatgtctctctgcctcggaaaatgaaaatatatgaaggagggatatagtagccagaggaatcccttctagcaaatgcaatggagattgcttattttaactgtgttcaaataacacagttacaataattcaaataatgtaacataatattcaaaatatcatgtartctgtttttcatttactgttacaaaattttctgaaagaaatgagatagtgcactattattgtggcttgaaatatgttgaattttgctttatatgttttgcattctaactgcagatacatatgaattcatgactgctatagctttttgttggattttcacatttatttttgtgaagtatccagaacaggatttcatattacattcagttctcacattttttaatcttttaagataaactaggtattcagtctgtctttgccttttataaaggatgtaatccattattttacacaatatttgccttcatttttatactttttaaaaaggtttagaattctagg

SEQ ID NO: 732064 - DNA, 598 bp, Homo sapiens
tatatttacacattttccttaaaaaagcgaaaaggacaaatctggaggcattccattacctgacttcaaactatattatatggctgtagtctccaaaacaggatggtacaggtttaaaaaataggcacataggccaggcgcagtggctcaggcctgtaatcccagcactttgggagtccaaggtagggggatcacgatgtcaggagttcgagaccagcttgatcaacatggtgaaaccctgtccctactaaaaatacaaaaattagcctggtgtggtggggggcgcctgtaattccatctactcaggaagcygaggcatgagaattgcttgaacacgggaggtgaaggtttcattgagtcaagattgcgccactgcactcgagcctgggcgacagagtgggactccgtctcaagaaaaaaaaaaaaaaaaataggaacatagaccaatggaacagaatagagaacccagaaattaagccaaatacttaacagcaaactgatctttgacaaagcaaacaaaaacatcaagtggggaaaggacgtactattcaacaaatggtgctgggataattggtaagccacaggtaaaaaaatgaaa

SEQ ID NO: 732065 - DNA, 611 bp, Homo sapiens
tttgttgagtttctaggtgtatagcttactgttttccaataaatttggaatattttcaggtattacttctttgaatattattctgcttttttcattctcctttctttctctggaagtcccattacacttctgatggtgtgttcaaccatggctatatttatcttaggttcttttatttttcttgattmatttttctctatattcttcatttagcataatcgccattgacatgcctttgagttttattattctttctttgcaagttgaaatatctttttgaattgttttggagaattattcatttcagttattgtactttttaactgtaaaatttccttttagttctgttttacaacatttgtctctttattaatattatcaaattcatgaatcattgtaatcagaactttctttaataatagttttcttttttaattttgtgaacatgattataatagcccctttaaattctttttctgatacatatgacatctggtcgccttgacaggctgtttctgttgcttgcttttttctagtgagtaagtcatgctttccggtgtttttgcatgcctcaaaatttctgttggaaactggctatctttgataatatg

SEQ ID NO: 732066 - DNA, 630 bp, Homo sapiens
agcaatgaagaaaatcattcatcatatgtcagacatatcatttatattattgtgataatacctggaatataatgtgaaaatgtctagattgtactgaaattagaatagtgatcaagaaggctattttaaaagcctaagcacgtgaggaagagttaaagaatccattaatgggatctaggaactctttgtaccattcttgcaacttacctgtaatcttgaaattatgaacaaattaaatttttaagttatcaaacatctggccactttttaatctaatatactgtttttttcaaggttcatcagtcatataaaatattatagaaaaagaaaaatattaagtgtggtgctccatggcctccattgtacctacatatttccttcattaatrttagacaaatacataaaagttcaaaatgagtaagaatgaccaagaaagatgagacattcgatagtttaaaggatagaatcataaagaaaaatgagagaatgtagttataacctaaacggaagttcttcaaggaaacaaatatatctaaataatattaataacttacttcactgggaggatttaaacaatcttctcgagacagctgaaggcttgggctgaaggccatgaggtccgtcttgggc

SEQ ID NO: 732067 - DNA, 577 bp, Homo sapiens
ggcggctgcatgaggccgggagctgtgctgtcgaggcattcactttaccttcctgaatttttctcaacaagtgtcttcgagttctcgaagctgagaccctgggcattactaacgtcacctgggctgctcaagtagctccttcgaataaccaccaaaagaactcaaccccagcctgaccaacatggagaaaccccgtctctactaaaaatacagaaaattagccgggtgcggtggcgcatgccagtaatcccagctactcgggaggctgaggtaggagaatcgcttgaacccaggaggcggaggttgcagtgagccgggatcgcgccactgyactccagcctgggcaacaagagggaaactccgtctcggggaaaaaaaaaaaaaaaaagaactcaaccagtgaaaaaagcaggccccacctcagtcatacatagacttctgctgcatttcttagaaaatgctcctttgccttcttttgccagcaggtgagtgcacgcatttgtctaagcgacagggaactgcccgtgcaaggaaggagggccgagcgggtggagagggatgtggaaatgggagccac

SEQ ID NO: 732068 - DNA, 606 bp, Homo sapiens
tttcttgtgtgtgatgagtcacttctctctgctttcaagattctttatctatgtctttcaacaatttgattgtaatgtgtttcagtctaggtatctttgagcttatcctatttgaatctcattgagtcttgaatgtttatatttatgccttttgttaaatttggtaagttttcagccattatttcctctaataatctctctatccctttcccactttttttctcctgagtcttttgtagtgtgtatttgatcttcttgatgatgtccacagaacccttaagctctgctccttttcttcgatcttttttctttctgttctccaaagtcartaatttaaattttcctgtctttcaactttgctgattctttcttctgcctgctcaaatctgccttttcatttctttagtgaatttttcatttcaattattgtacttttcagctctaaattttttggtttgtttttaggttttctatgcctttatttatgtttccattttgttcacacatcatgttcttgactctcttcatatcttcctttaattctttgaacatctttaaaacagttgttttaaagtctttgtctagtagatctacctttgtgccatt

SEQ ID NO: 732069 - DNA, 645 bp, Homo sapiens
ggctacttaatgtgtattctagatattgaaaatagagttaaattaagttgtctgtcaagtaggttacccaccgttctttgttatttccctataattgggctgtttcatttgtgctttctcccaaagagtgaaaaaaccagtttccttttgcrtttgcagagttggtttgtccaggatacatgcaaacacttggtggaaaattaaagcctaatgcaatcgcttcaaacttcctctaacttttccccttatcactatgttatttaacatgaaaacaatgtgtagaaaaatgttcaagtgtttctaataaacgtagctaattggattctcaagtctcttctgtgacataaaaactgaaatagttttgaagctgaagcaccaattaatagggctagtcatggaaagaacacttacaggaacaaaacttaataccacatctttagatttgtgtaatggtttgctggcaagccaagtctttttcccctgtttcttttgcttatgttaaatgctctaaaagggcggaggcaagtattcttgtcagcagagacttggcaactaatgtctccttcctggtcccctgtgccttgcttcagcctcaagacagtgagacagccagccagccacccaggcaatgttttatgaatctga

SEQ ID NO: 732070 - DNA, 645 bp, Homo sapiens
ggctacttaatgtgtattctagatattgaaaatagagttaaattaagttgtctgtcaagtaggttacccaccgttctttgttatttccctataattgggctgtttcatttgtgctttctcccaaagagtgaaaaaaccagtttccttttgcatttgcagagttggtttgtccaggatacatgcaaacacttggtggaaaattaaagcctaatgcaatcgcttcaaacttcctctaacttttccccttatcactrtgttatttaacatgaaaacaatgtgtagaaaaatgttcaagtgtttctaataaacgtagctaattggattctcaagtctcttctgtgacataaaaactgaaatagttttgaagctgaagcaccaattaatagggctagtcatggaaagaacacttacaggaacaaaacttaataccacatctttagatttgtgtaatggtttgctggcaagccaagtctttttcccctgtttcttttgcttatgttaaatgctctaaaagggcggaggcaagtattcttgtcagcagagacttggcaactaatgtctccttcctggtcccctgtgccttgcttcagcctcaagacagtgagacagccagccagccacccaggcaatgttttatgaatctga

SEQ ID NO: 732071 - DNA, 579 bp, Homo sapiens
caagttcctgtgagcccgcgtgtgagaataaaggaaacttgcatctttgtgggtgacagaaacaccagttctgttagcagaggcctccccaggaaattcagtgtctgtaattctcttattgtgagaagataaatagcattcttattttgtgaatttgaacccatcaaagttttgtagttgagaatgccacattcatgtccatccaaggagcattccctgactctccacagtagggctggcctgtgytgagagtgggacacagggaaagaacacatagtcccggcctcttcagtagcaaacagaagagagacatacaccaagaaaaaatggcatgaaatgacattcgccacagtgaaaaagcaatgggccatgaaatatggggcacagattcagtcactgaaatcggggaggttccagaagcgagtgacatcgaagctgagtgttgagggagaactgttagcagaagaaggggcatgagcagacaacattccaggcaccatcaaaaaggcagagaagcaagaagaagagctcaaagtttaaagaacatcatcttattccaaataattgagaaaatgttgc

SEQ ID NO: 732072 - DNA, 575 bp, Homo sapiens
gagattcagaaacagttagcattcttatggatggacaacagtagacatttacaggctgttaaccctgctctccattataatataaccagaagggacagtccaaagaacttcacactggtgcactatgttgatgacatcatgttaatcagacctatggacaagaagagcaaatattctatatgtttcattaagaaacacactagaaggtgggagagcaacctgcaaaaccttagggtcctgcsattttggtgaagctgccttttgggaccagtagtctggggttttctcaaacatcacttaaaaagtaaaggacaagttattgcttagcggtagcaccttctaccattaagaacaaagcacattaactggaggtctctacaggttttagagtaacacaaaccacgcctggcaatactctgacccatttattaggtgacatggaaactattagttttgagtgggcccagagcagtaaaggccctgcagaaggtttagactgcagtggaaatagctctgcttggactataacctggaagaatccatgcgaccaaaggcatttgtgttaggaaaagtgt

SEQ ID NO: 732073 - DNA, 575 bp, Homo sapiens
gagattcagaaacagttagcattcttatggatggacaacagtagacatttacaggctgttaaccctgctctccattataatataaccagaagggacagtccaaagaacttcacactggtgcactatgttgatgacatcatgttaatcagacctatggacaagaagagcaaatattctatatgtttcattaagaaacacactagaaggtgggagagcaacctgcaaaaccttagggtcctgccattttggtgaagctgccttttgggaccagtagtctggggttttctcaaacatcacttaaaaagtaaaggacaagttattgcttagcggtagcaccttctaccattaagaacaaagcacattaactggaggtctctacaggttttagagtaacacaaaccacgcctggcaatactctgacccatttattaggtgrcatggaaactattagttttgagtgggcccagagcagtaaaggccctgcagaaggtttagactgcagtggaaatagctctgcttggactataacctggaagaatccatgcgaccaaaggcatttgtgttaggaaaagtgt

SEQ ID NO: 732074 - DNA, 543 bp, Homo sapiens
attttgataaagcccaatttattttttcttttatagtttgtatttcttatgtcctattcaaaaactccttgcctactgaaaacttatgatgattttctcctatattttcttttagaagttttatagttttaccatttataattkggtctatgaatccttttgagttgatgtttatgtatggtgtatggtgtgaggtaacaatgaagattcatatttttttccaaaggaatatccaattgtctctttggaaaaatatgctgagaaggctatcttttccccaccaaataatcttagcaccttaatcaaaaatcatttggccatggacatatgtaggtgtgggttttttctgggctctctgtgttagatggatagatagacagatacagatatataactgtgtttacacatatgtaactgtaaacacagttatatatctatatatccaccaacagttgaatgagaataaactattgttataagcatatatacacattgtatatatatgtgtacatatacatattgcatatgtatgtatacatatat

SEQ ID NO: 732075 - DNA, 489 bp, Homo sapiens
agctactcaggaggctgaggcgggaggatccctagagccagggagttcaaggctgcagtgagctctgattgcaccattgtactccagcctgggcaacagatcaagaccctatctttacaaaaaagtagagactctgtctcaaaaaaaaaaaaaagaaagaaaaaatatatataaaataacgtgggttgtgtattccagtatgtcaaagaaaatctatttctcagaatctaaaatctctctcacaactataaagagatatttatataatggtcaytgcagtattctttgactagtttttttttttaaattggcaataatctaaatgtctgtattaatcagggtccctgctatggtaaattgattgcaaaactggtctcaattcttcatgctgtcccggcgcggtggctcaagcctgtaatcccagcactttggagggccaaggcaggtggataacttgaggccaggagttcgagaccagcctggtgaaca

SEQ ID NO: 732076 - DNA, 636 bp, Homo sapiens
gatctaagtagaccctggatcctaccatgttgtatccacttcttaattcagtcccttcccctcagtctgagctcttaggtttccccctatggttgcacacttggttcatctgggcatgctcagcttatgtgaccttcaatctgtgctttatgacaactgaaaagcaactaccacattgtgacatgaaagctgagccagattggtctggtgtggtcacactctgagcccgtgcttctcagcaaagaatgggaaactgttatgaaactaatggaaatatgtagccacaaagagtttcaaagagacacagaatactttttttttttttgagacagggtcttgcaccgttgcccaggctggagtgtagtgatgtgatctcagttcactgccgcctcagtctcctgggttcaagcaattctgccacttcagcctcctgagtagctgggaytacaggggcatgccaccatgcctggctaatttttgcatttttagtagagacagggtttcaccacgttagtcaggctgttctcgaactcctgacctcaggtgatccatgcctcagcctcccaaagtgctgggattacaggcatgagccaccactgtggctggctgagatgcagaatactcttttatctatgt

SEQ ID NO: 732077 - DNA, 636 bp, Homo sapiens
gatctaagtagaccctggatcctaccatgttgtatccacttcttaattcagtcccttcccctcagtctgagctcttaggtttccccctatggttgcacacttggttcatctgggcatgctcagcttatgtgaccttcaatctgtgctttatgacaactgaaaagcaactaccacattgtgacatgaaagctgagccagattggtctggtgtggtcacactctgagcccgtgcttctcagcaaagaatgggaaactgttatgaaactaatggaaatatgtagccacaaagagtttcaaagagacacagaatactttttttttttttgagacagggtcttgcaccgttgcccaggctggagtgtagtgatgtgatctcagttcactgccgcctcagtctcctgggttcaagcaattctgccacttcagcctcctgagtagctgggactacaggggcatgccaccatgcctggctaatttytgcatttttagtagagacagggtttcaccacgttagtcaggctgttctcgaactcctgacctcaggtgatccatgcctcagcctcccaaagtgctgggattacaggcatgagccaccactgtggctggctgagatgcagaatactcttttatctatgt

SEQ ID NO: 732078 - DNA, 670 bp, Homo sapiens
tcttctggagagtgagagaagcttccagttaaggtgacattgaagccaagtcctgaaagatgaggaagagttgtatgagagtggggagggaagggggaggtggagggatggtgaatgggccgagatgggatagcgcaaactgcccgggaagggaaaccagcactgtacggacctgaacaacgaagatggcatattttgttcagggaatggtgaattaagtgtggcaggaatgctttgtagacacagtaatttgcttgtatggaattttgcctgagagacctcattgcagtttctgattttttgatgtcatcatccatcactgtccttgtcaaatagtttggaataggtataatgatcacagtaaccccaagcrtaatatttcattaattctcacagaatcacaggtaggtgccacagttatccccattttatgaacggagtgatgaagccttaggaataatgaatgatttgcccaagctcacctggatattaagattgagtcaaatgttgggtttggtctgactttaatgtttgctttgttcatgagcaccacatattgcctctcctatgcagttaagcaggtaggtgacagaaaagcccatgtttgtctctactcacacacttccgactgaatgtatgtatggagtttctacaccaaattcttcagtgc

SEQ ID NO: 732079 - DNA, 553 bp, Homo sapiens
atagtttgtatcaaattgtgataacatatttgaaattaatatttcaaattaaagcaaaatcacaaatttatactttatattatgaatgagattcacaaaaggagcatgataatatattctgttgtcatcacatacaaaataataacatatagagtatgaatcaataatttttcaaatacaaagctattacaattaggaatacaaagaaatcataattaggaatacttctacaatattaacacacaatagtggtaacacttgcaaaatgatggtggtgttttttttgttgttgttgttttgttttgttttccccgacagagtcttgctcttgttgcccaggctggagtgcaatggcgtgattttggctcactgtraactccacctcctgggttcaagcgattctcctgcctcagcctccctagtagctggtattacaggtgcctgccaccacacccagctaatttttgtatttttagtagagatgggggtttcaccatgttggccagcctggtcccgaactcctgaccttaggtgatccaccagcatcggcctc

SEQ ID NO: 732080 - DNA, 648 bp, Homo sapiens
tacaaaaaattagcccggcgtggtggcgggcacctgtaatcccagctgtgcgtgaggctgaggcaggagaatcgcttgaacccgggaggcggaggttgcagtgagccgagatcgtgccactgcactccagcctgggcaacagggtgagactccgtctcaaaaaagtcttcctggcatttttatgttcatgtcccaataaaaagagttagaarcactgcaaatatatgcaatgctcagctaatccactatgagctttttcctggaaaagatcaaaaggcagggatctatttacacaagagaagagagaatactccagaagctcatctggaaaaatcagagtatcaacataattactaatagggagaagtaataaataagtacaaatcctgcagatttaattttaaatgtacaaaactgttgttccttagaacaatttctgtactatccaaatgtttttgtatcaggtgctattaaatacaagtattcaaaagaatgactgtttaataagaatatcatattaatcaccatactaggcttattaattattttaaaaaattaagagattgaattaattctaaaagaaatctgcttgctaactaggccgtattttctgctaactgataattaagcacagtaatatatcaatga

SEQ ID NO: 732081 - DNA, 451 bp, Homo sapiens
ctggtgactcaggtatccaggcacattcatctctgcgggtctgccatcttgacacgaggtcattgcagaaggagagagggtgtagagtcatgccagttcttaggtgctcctgacaaggagatctgcagcactctgctcacattcctgttttccagaactcagccagtacccagtgcaactgccaaagagtctgggaagcatagagagtacacggatagctggagatcgytcatcactactgtcatgatatgttcatttatgcaatacagatcaatgggttcaccccagtcaggctgactccaagaggctaagatgacttcaccttgggtggtttgcagctgggaaagaaaggcaagtcgacaccgatcgaacagatcattcacttcagtgggctgtcgagctgtgctagaggcaggtgcagtgtgctgcagaaatacagatggtgactact

SEQ ID NO: 732082 - DNA, 677 bp, Homo sapiens
aagagatcacaacactatatttgtgtcagggatccacaagactgcctccatgtttggagatttgctagaaggactcatgggatcagcttagggttgtaatggctaagatttattactgtaacatagtatggatatatagtagaaagatctcaatggcaaaagacactgacagagtctggaaaaatccatgtaccggcttccttatgtgctgtgccttccatgaggatcacacagactaccttctttcccccttaatgaaaatacaacaacctatgtgacttcccaagaaacacagkttttatctcggctgggtcacatatgtgtactctgcctagcatgtgtgaaatttccagactcacaaaaagaatagcaggataagccacattatttccatagtctagatacagtaaaccatgattaccagttatggaaccctcttgaaattcaagtcctcagaagccagcctaggaccaactgtgcagacagacagaccctccttcacaggataatataatagtctcagatctgctttgttaatttttgtttgcatagagttttataattggaagatgtctcaaatgctacatatttctgtctaatggactttagtaagagtgttgtatagtatacaacatggaattattctccattataggcaggctgtgataagtgttcta

SEQ ID NO: 732083 - DNA, 671 bp, Homo sapiens
taaattttcagaataaagtgtgtgtgtgtgttaaaattctcctgctaaaataatctttctatgttcttacatatttaggtttggaatatggttcatgatggcagaattgtccaggtcaatatagtaaaatactctgaccaagacagtaggacccagactcaagctggggaagagataaataagctcagttaaaaagaaaaagagggccaggaatggtggctcacacctgtaatcccagcactttgggaggccaaggcgggcagatcacctgaggtcgggagttcaagaccaggctgaccaacatggagaaaccctgtctctactaaaaaatacaaaatcagctgggtgtggtggtgcatgcctgtaatcccagctactcgggaggctgaggcaggagaatcrcatgaacccgggaagtggaggttgcggtgagccaagatcatgccactgcactccagcctgggcaacaagagcaagactgtctcaaaaaaaaaaaaaaaaagaaagaaagaaagaaaaagaaaaagaggttgggcataatgtctcaagcctgtaatcttatcactttgggaggtcaaggcaggaagatggcttgagcccaggagttcaagactagcctgggcaacacactgagaatccatgtctacaaaaaactaaataacttagtggag

SEQ ID NO: 732084 - DNA, 584 bp, Homo sapiens
atatcttacttagcaagttctctattagacatatgtctgctgaatgaaacttaattacagatatttttgaacatttattaaatttaaattatatttgtacttgtaagaaatatttaaacaatgctttgtttttctaaaataaaagaaaaccaatagcacaaaccttcattttctaagtgtgtcaagttgttttgttttttttatttgcttgtgtgtttgttttttgagactgagtctccctctgtcgccaggctggagtgcagggtgcgagctcggctcactgcaacctccaacttgctggttcaagtgattctcctgcctcagcctcccaagtagctggaattacaggcatgtgcccctgcgctcggctaattttttttttttttttttttgtatttttagtatagaccaagtttcaccacgttggccaggatggtctcctyctgacctcgtgatccacccgcctcggcctcccaaagtgctgggattacaggtgtgagccactgtgcctggcctattttaactgttttatgtcttctggtttcgtgtgacaatgaaataagttaatatttcctgcctgcacc

SEQ ID NO: 732085 - DNA, 487 bp, Homo sapiens
acaggagaggcggcaggaggagcagaagaggctgcatgccattcttttcgggctgcggagaacagggagctaaacatcaccatcatctaagagcgggtcaagaaattgaaaaaaaaaaaaacaaaacatttaaggggttaatatcctacacaattcatttacttcatttgaatgttagagccacttatgtttatttgtgtttctaatttatagtttaaatttatttgtgtttctaatttatartttaaatttatttgtgtttctaatttatagtttaaatttatttgtgtttctaatttataatttaaatttatttgtaaaaagttaaatgagagtgggtctttctctcatgttcactctggcatcttttagcatttttttaatttgataattataggacgttagcatgcatatcgagtttgcccttatgtggtgggagttcaaacacacaaagacccactgtatgcacacaactgttcttgctggt

SEQ ID NO: 732086 - DNA, 355 bp, Homo sapiens
attacaggggtgagccaccgcacctggcccaaaagctttgtgtttttaaagatattagacatgtttcttgtttttaaaagaaatcttaacaataatgtaggagaataagacaaacatttttccaaaaaagagaaatcattgtgattattttctgttattggaatgtcggatactatagtcrgcttcattaatcatcaagaatgctatggattttccatttttataggatctatatctcagttaaggtaatacttgtaattcttgtgctccatttgaagatgaaaaatataggccaaaatcatagactttgcatagaagctggataatgaagacagctctggaggaacacatagat

SEQ ID NO: 732087 - DNA, 486 bp, Homo sapiens
cctattctagcatctgggagcaccataccagagccatttcttgtgtcaatgtcatggtgacagaactatgtccttcatctctccttgagctattcctccaccacaggtcaggcagctttttttttttttttttttttccaraacacagagcatctgcctgggctccctgtccctgaacagttagcctggcttccttcagtgacctcgagaaactttgccaaacttagggggactgatcaagggattctcagttacccattattccaggggtgaaatctagattccaagacaatatttctggtgcttctcactcaaggaaagaggaggagaatttaaaaatacaggttgggtttctagaagagcatcttgctatatgtcagttccttgtgggcaaggaccacatctgattcacaccagggtccccagagcccatccaggcctggcccagagtttcctttggtgagtgtttggaggatgaataaagag

SEQ ID NO: 732088 - DNA, 597 bp, Homo sapiens
ccacacagagctggcaggcacccttggccttccaggcagcaggctggcatggggacttcatccatgtggacatatttgagggccacctgtggtccatggttgagaagggccagggtactgtattgctcctcaacagtgtgcctgtgactgaygcacagccccacaaggtcagcatccacatcaacattcaccagctagaaatctccatggaccagtaccccacatgtactttgaaccgaggagtcctcagctacctggagccacgtgacagtctccttcttggggagctggtgcagaggcctctcgtcacctccaggaacaccgctcaggcctgacaccaggggctgccaatgcctccctgctgggctggctgcatggaagacctcagtgtcaatggctagaggcaggggctgtgggaagccttgctgacgcacaacatggtggctggctgcagactggaggaggtggaggagtatgaggacaatgcctatggccattatgaagctttctccaccctggctcccgaggcttggctgtccgtggagctagctgagccatgcgtgcctgagccagggctacctcctgtctttgccaatt

SEQ ID NO: 732089 - DNA, 597 bp, Homo sapiens
ccacacagagctggcaggcacccttggccttccaggcagcaggctggcatggggacttcatccatgtggacatatttgagggccacctgtggtccatggttgagaagggccagggtactgtattgctcctcaacagtgtgcctgtgactgatgcacagccccacaaggtcagcatccacatcaacattcaccagctagaaatctccatggaccagtaccccacatgtactttgaaccgaggagtcctcagctacctggagccacgtgacagtctccttcttggggagctggtgcagaggcctctcgtcacctccaggaacacygctcaggcctgacaccaggggctgccaatgcctccctgctgggctggctgcatggaagacctcagtgtcaatggctagaggcaggggctgtgggaagccttgctgacgcacaacatggtggctggctgcagactggaggaggtggaggagtatgaggacaatgcctatggccattatgaagctttctccaccctggctcccgaggcttggctgtccgtggagctagctgagccatgcgtgcctgagccagggctacctcctgtctttgccaatt

SEQ ID NO: 732090 - DNA, 560 bp, Homo sapiens
actattattcatgctttttgagataatgcaaatttgtaatttttatgacagcaattcttaataatttattgtccaagagatctgataaaatttttgatattattggtctctgggactcaataggcactgaaatgttttaattcagttgaaaagttgactcaggattgctaccctctcttacctgttaggaggttgttgtttaacctgacctgaaattcccatgaataagaacctgttttttttctttttttttttttttgacagagtcttgctctgccgcccaggctggagtgcagtggtgcgatcttggctcgctgcaacttccgcctcccargttcaagtgattctcctgtctcagcctcccaagtagctggagtagctgggactgcaggcacgtactaccatgcctgactaatttttgtatttttagtagagacggggtttcaccctgttagccaggatggtctcaatctcttgacctcatgatctgcctgcctgggcctcccaaagtgctgggattacagacatgaaacaccgcacctggcccagggaatttctaa

SEQ ID NO: 732091 - DNA, 625 bp, Homo sapiens
gcttttacttacttgattagtaggactaatgaatattttgaatttctttttcttttttctttgagacctgagtcttacactgttgcccaggctggagtgccgtggcacgatcttggcttactgcaaccttcgcgtcccaggttcaagcagttctcctgcctcagcctcccaagtagctgggattacaggcatccaccaccacgcccagctatttttttgtatttttagtagaaatgggktttcactatgttggccaggctggtctcgagcacctgatctcatgatccacccgcctcggcctcccaaagcgttgggattacaggcatgagccaccgcgtcagcctttttttgaattttattacttgtatttcttgcgaattgcccagtcgtgttttgtccatggtttattggggtgggggcattctaactgtttcgtatcattaatttaagcttgttgtatgacatatttgctctaagaatttcacctcatttcattgtataggtaattatcttttgtgtagtgaaaagtcccattatttcttttagttcatttaagattttattcaattatttatagaagtagtaagataaatatttgtagataggtaaacaaagcattagaatt

SEQ ID NO: 732092 - DNA, 648 bp, Homo sapiens
gagagcccaaggagtccggaagaggaggagccccacctgctgagcagcttggctgcagtccagaccctggccaatgtcatccggccttgctatggcccccaggccggcagaagttcctggtgaccatgaaaggagaaacagtgtgcacggggtgtgccactgccatcctcagggccctggagctggagcacccagcggcatggctcctccgggaagcagcccaaacccaagcagagaatagtggggatggcacagccttcgtggttctgctgacggaagccttgctggaacaggcagagcagctgctgaagttcggcctgcctcgcccgcagctccgggaggcytacgccacagccactgcagaggtcctggccacactgccctccctggccatccaatctctggggcctttggaagatccgtcctgggccctccattctgtgatgaatacccacaccctgccccccatgaaccacttgaccaagctggtggcccacgcctgctgggctatcaaggagctagacggcagcttcaagcctgagcgtgttggggtgtgcacgctgcacggggggacactggaggattcctgcctcctccaggggttagcaatatctgggaagctctgtgggcaaatggccgcagtgttaa

SEQ ID NO: 732093 - DNA, 580 bp, Homo sapiens
tgcccagctgtaaatttttgtattaatgtttttccatattattgacctataaagccattgaagcatagtgccttgaaaggaaagcaaaaaagtaaaaataataataatttaaaaaaccctcctctgaattgctcatgtagcctactattgggtcaactagaagagtgagaaatagccagcagttagaacattccacatattctgagtgtcaaattttattactttggtgagacatgacttcccgctttcagcactatgggttttttgtttgtttgttttcaagatgaagtcttgctctgtcacccaggctggagtgcagtggcgcgatgttggctcactgcaacctctgcctcccaggttcaagtgattctcctgcctcagcctcctgagtracagggattacaggcgcataccaccacacccagctaatttttgtattttagtcgagaccgggtttcaccatgttggccaggctggtctcgaactcctaacctcaagtgatctgcctgcttcggcctcccaaagtgctgggattataggtgttagccactgtgcccggccagcactatgtattttagaa

SEQ ID NO: 732094 - DNA, 585 bp, Homo sapiens
tgcagaataagcccaagctggtggcattctgttcagttacaggtaattttctgaatcttccctcaaatttttctcaaacctctataatcaaggggaaaatgtttcattttgttttgcttttttgagacagggttgcctataatggagtgcagtagcttgaccatagctcactgtagcttcaacctcccaggcacaagygatcctcctgcctcagcctccaagtagctgcgattacaggtgcatgccaccatgcccaacttattttttttccttttttttttttttttgtttgatagaaacagggtttcaccatgttgctcaggctggtctcaaactcctggactcaggcaattcaccagcctcagcctcccacagtgctggggttacaggagtgagccaccatgcccagttaaaaatacattttttattaaaaaaaaaaaaaaagaatattccttatatttcctttatattttttaaactacatacccaaaataaagcatatcaaaaactgtaaaaaaaaaaaaaaaaaaaaaaaaaaaaaaccctaatatcagatattccaaacacaacaataccataatttaa

SEQ ID NO: 732095 - DNA, 585 bp, Homo sapiens
tgcagaataagcccaagctggtggcattctgttcagttacaggtaattttctgaatcttccctcaaatttttctcaaacctctataatcaaggggaaaatgtttcattttgttttgcttttttgagacagggttgcctataatggagtgcagtagcttgaccatagctcactgtagcttcaacctcccaggcacaagcgatcctcctgcctcagcctccaagtagctgcgattacaggtgcatgccaccatgcccaacttattttttttccttttttttttttttttgkttgatagaaacagggtttcaccatgttgctcaggctggtctcaaactcctggactcaggcaattcaccagcctcagcctcccacagtgctggggttacaggagtgagccaccatgcccagttaaaaatacattttttattaaaaaaaaaaaaaaagaatattccttatatttcctttatattttttaaactacatacccaaaataaagcatatcaaaaactgtaaaaaaaaaaaaaaaaaaaaaaaaaaaaaaccctaatatcagatattccaaacacaacaataccataatttaa

SEQ ID NO: 732096 - DNA, 487 bp, Homo sapiens
gaaagttgtagttcgtaatctatttaaaattcaggtactgtttagaataatacctgatgcttattagtaaacaagtagggtacagccaagggtaaaagtgtgtcctcatctaagtatctgctctatgcttcaactgcctcataagtaaaacagagctgagttacaagacttctcatgagtgttactctttcagccatcaatcataaactatcaagaaagaagacaacaaaataatytgttatagcatatgaaaaatccaagtaagttcttcccctactgattttctcctgagaggaacaattttgaggaaaaaaaaaaagaaaaagaaaaagaaaatcacttctatgatatttactaaaaatgctttctcaaccttttagaacctgaatcttttagaaaagtttaggacactggcaaggccagaaactaacctattcctctacgctttgcccctccctctatggtgtaaaagtgacagcagtgtttg

SEQ ID NO: 732097 - DNA, 630 bp, Homo sapiens
acgatcaaactgaagttaaagcctgatgtacatgccacatgagaggtaagtttctaaagctcatacctcaaaaatcgcctttgtgatgttgtgcatcaagtcaatctgtaagacagtagttacaatattagtgaagacagtgggttaaaacatttgttgttcaaacatggagcaaatatcattcatgagttaggtgcctttagttgaactatggtcccattagggttcatacattaaagcaaaaattgaggtggaaagacactctgtgccttacaggataaagaggcttactgtggcaaccaaaaaaattttagtacataagagaatttaaatgttaactatmacatacaaatcacatgcaaatatagttaccacttattttagttacctattctcaatatacagaaaaatgccacaaatctaggaggccattcgtttcaaatgaccggaatccttagacctcacaccaacaagccaccatgtgctggggatggtatcgcctgactaaatgtagccttgcagtccattcttgtaagtattagagagaaaaagagagagagcgtcgtctctggaaagtgtgaagtcagggaattccctactaggaagcaattccataaagcaccccaaaat

SEQ ID NO: 732098 - DNA, 622 bp, Homo sapiens
actgaagttaaagcctgatgtacatgccacatgagaggtaagtttctaaagctcatacctcaaaaatcgcctttgtgatgttgtgcatcaagtcaatctgtaagacagtagttacaatattagtgaagacagtgggttaaaacatttgttgttcaaacatggagcaaatatcattcatgagttaggtgcctttagttgaactatggtcccattagggttcatacattaaagcaaaaattgaggtggaaagacactctgtgccttacaggataaagaggcttactgtggcaaccaaaaaaattttagtacataagagaatttaaatgttaactataacatacaaatcacatgcaaatatagttaccacttattttagttacctattctcaatatacagaaaaatgccacaaatctaggaggccattcgtttcaaatgaccggaatccttagacctcacaccaacaagccaccatgtgctggggatggtatcgcctgactaaatgtagccttgcagtccattcttgtaagtattagagagaaaaagagagagagcgtcrtctctggaaagtgtgaagtcagggaattccctactaggaagcaattccataaagcaccccaaaat

SEQ ID NO: 732099 - DNA, 688 bp, Homo sapiens
ggttagtttgttttgatgcctaaaaagtcctcttagggaatattattttgaagccctttactatgctgttaatagtgcttggcttttaacttggtaccagggaattggaaggtttctgtcattttgtgacgatatttttaaatttctttgcaggtagaagaagaaaggtgccactccggcatgaagacagactcgcttagtcgccagtcacttaagctgagtgcattgtgatttccaataattgaggcagtggttctaaaagctgtctacattaatgaaaagagcaatgtggccagcttgactaagccgccagcgcacagcgcggcaggacgcgcccgggtctcagcggacttgtgcatgttagctgtgtagatttatgtgagggcttgtaaaactctggtcttgtaaactagtcttaagcgcttttaatatggagacagatkagagcccctctccgctcccgtgtgggcccgcaggagaagcggtgatggagagccgagctcgccccttccaagcgctgccccgtgagcagtctccaccacctcccctgcaaacgtccagtggtgcagaggtaatggacgttggctctggtggtgatggacagtccgaactccctgctgaggaccccttcaacttctacggagcttctcttctctccaaaggatccttctctaagggccgcctcctc

SEQ ID NO: 732100 - DNA, 584 bp, Homo sapiens
agtggcacagacacagagactaccagcgaggcagggatgtggccccagaaggtcctgagcttgcaaaggattgttctggctgtctcagccagctcttgctgttccacctgccccagaacctccgcatcagttgagggtcgtggggttggaatgtgtggcgaagtaggtctgtggcagtggagttgggccatgctgagcctgtgactgcccaggagagaattggaaactaaaaggtgcaaaagcagtcagagactccctaccaccccctcactgtgaacattggcccagcggcctctggggcagtcgctgtaaccatccrcgtggcaccctcggttctcagaggctgagacctccgtggctggagatgcttattttctgctcagttgttgttctgtagaacttatttctgtctacatcctgcctcatccctgagcctgccccacctggtccacattgcctttttttttttgataaagttttattgagatatgactgactagcggcacagttcacccatttaaagtgtatcattcagtaggtttcgtttcattcacagagttgagcaactgtcatcactacctaat

SEQ ID NO: 732101 - DNA, 597 bp, Homo sapiens
cactcctctgggggacagctcagtctacagcatgtcattcatctctggaaaatatgatgactcactggctcacgtaagtacccaccacatatgtgcctaaacatacctcagtctctttcttatcaacaggttcccagcttgcttctgaaaggcagtcttcactgtgatcagagccaaaatcctcagtatcactgccatctgactccttcaaacatgtctgatgaaaaggcaaagacaacaaattatcttcatcatcattaacgcttactgtttaccatgtgtcaggcactgtgctaagtgcattacacacatgaacttatttcttatgacagtcttacaatgtatactactaatatccccattttacaaataagaaaatgaagccacagagaaagagctgataygtagtaaagctgggatttgaacctagtattgtagcttcagatttacactcttaccgatatgctacaccacagcatagaaagactcttgttatgttctaaaccaggggttggcaagctatggcccacaggccaaactagcccactgcctgtttttgtaaatcaggttttgctggaacacagctgcattcattca

SEQ ID NO: 732102 - DNA, 457 bp, Homo sapiens
acccctctctcctggcagcttcaagttttccacgacggctgcagcagatctaagacataccatttaccaggctgacaagagtccaagttccagcaatccctggaggtccatcctgagaaggccatctcaggttatagaccagcataaatcgggagctcacaggacagaagacactgattggctcacgcccagtggggcccaccccctgatatgggaaagttgggccctttccacttccagaaatttgggcacctatttggaagggagaaagggccacaactaataactgtttatkatagaaggaaaaacaataaatatgcttatacttctgctctgagggaatcattcagcctgcagaaaatggagacatctcattactacctggcgagtcaaacacaggcctggggatccagagatgtatttggattccaaattctgtgtgggcccctatacacag

SEQ ID NO: 732103 - DNA, 609 bp, Homo sapiens
caatactctggaatcttcacaaatatattagaataattgtatttatgaatcttacaggatacaatgtcattatatttaaaaaatcaattattgctctacataatagccaccaaaaaatggaaaataaaaacttttttttttttttttgagacaggatcttgctctgtcacccaggctaaagtgcagtggcacaaacagggatcactgtagccttgacctccctggctcaggtgatcctcccacctcagtctcctgagyagttgggaccacagatgcatactgccatgctgggctaattttatttagttttattttttgtagagacggggtcgtgccatattgcccaggctggtgtcaaactcctgggctcaagcaatcctcctgccttggcctcccaaagtgctaggattacaggcacaagcaataaaatgtttttaaattgtcatttgcaataaaattaataaactcaaatacctaggtatgattctaattaataaggagcaaaagcactgtactgaaaactacaaaacagttgctgagagaaatttaaaagacttttaaaatggaaatatatcatgtttgtggattaaacaacttgatattgttaag

SEQ ID NO: 732104 - DNA, 623 bp, Homo sapiens
ttttgttttgttttgttttgttgtacatggagtgctgagaatatatgagtttttctttactaaacaccttctctctctctttttttttagacagagtttccgctcttgttgcccaggctggagggcaatggcacaatctcagcttattgcaacctccacctcctgggttcaagagattctcctgcytcagcctcccaagtagctgagattacaggcacctgccaccacggccagctactttttgtattttattagagacggggcttcaccatattggtcaggctggtctcgaactcctgacctcaggtgatccttcttcgtgtaggtgccctcctgtcttatctcctacagcttctggggctgcagggggacataaataccacatgtgcaggcacctttgtaaactatgcagcagtttccttaaaaaacaaaacaaaacaagaaacacagtgaccacagaggggagctgggaaggagagtgaggggcaagggcatttctggggcccgtctctcctctctgtggctccaagggcaagattcccatcactagctaatgcaaataactgcatgacagcacggaacaccaccagctgccccgtggcgtgcctactaggtatcaggcc

SEQ ID NO: 732105 - DNA, 623 bp, Homo sapiens
ttttgttttgttttgttttgttgtacatggagtgctgagaatatatgagtttttctttactaaacaccttctctctctctttttttttagacagagtttccgctcttgttgcccaggctggagggcaatggcacaatctcagcttattgcaacctccacctcctgggttcaagagattctcctgcttcagcctcccaagtagctgagattacaggcacctgccaccacggccagctactttttgtattttattagagacggggcttcaccatattggtcaggctggtctcgaactcctgacctcargtgatccttcttcgtgtaggtgccctcctgtcttatctcctacagcttctggggctgcagggggacataaataccacatgtgcaggcacctttgtaaactatgcagcagtttccttaaaaaacaaaacaaaacaagaaacacagtgaccacagaggggagctgggaaggagagtgaggggcaagggcatttctggggcccgtctctcctctctgtggctccaagggcaagattcccatcactagctaatgcaaataactgcatgacagcacggaacaccaccagctgccccgtggcgtgcctactaggtatcaggcc

SEQ ID NO: 732106 - DNA, 634 bp, Homo sapiens
ctggcccccaggatgggagcttcaccttgacttctgtctgttaaatttactgctgcatcctcagctccaaggccagtgcctggcaaagagatagtgctcagtaaatacttgctgcattttgtctgaatttgcatcgaggtgtggaaggtaagaagagttgctaggacgaaakaaaccggggcatcttttgggaaaggggccaggatagaggagcagatgggggctgaaatacagggtggaaaagttgttttgtctgaagaagagcaggctcggggtcaggaccatgcctttccacctctgaatgccaccctggagcaggactggccccatcctgggtggcctgcagggagaggaggctgttgctggtaggcacattttgaggtggggggaaaggaaaaagtttgtaagagagctgtccagagaaggcatgactttcccttaagagttagcgagtctccaggtgtcaggagaggcttgactttgggagaatgttggagtggaaagtgtaacagagggatgtctggtcttttggcttccctgggtcacactgtaagaagaatcattttgggctgcacatgtcgtatattaacactgacgatagctgatgagctaaaaaaaatcacacaaaaaagaa

SEQ ID NO: 732107 - DNA, 591 bp, Homo sapiens
agcctcaacctaaacttcatcatatacaaaatataaagtctatacagaaataaactctaaacttatggaggtgagtttgggtttttttttttgtttttttttttaagatggagtttcgctcttcttgcccaggctggactgcaatggcgcaatctcggctcacagcaacctccgcctcccgggttcaaaccattctcctacctcagcctccagagtagctgggattacaggcatgcgccaccatgcccagctaattttgtatttttagtagagacggggtttcttcatgttggttaggctggtctcgaactccggacctcaggtgatctgcccrccttggcctctcaaagtgctgggattacaggcgtgagctaccgcgcccagccgagtttggggtttaatgtaaaatgcagaactataagacttttagaaaacaatggagaaagtctgcagaatacaaggctaggcaaaaaaaaattgttggagttgacaccagaagcatgatacagaaaattgatacagaaaaaatttatgttggactccaccaaaattgaaagtttttgctttgtgaaagaccttgtttaaaggata

SEQ ID NO: 732108 - DNA, 567 bp, Homo sapiens
aggcctaggtcctgttcaggtgacccatgaggtcctttggcttcagcacttgttcagtgctctcacttcaactttcctttatggatggcacctgggagttttcctcacttacttttgagcttggctctacagccaagaattacatggttggttattgatttatctagacttcattttycctgttgctttgttcttttttttttctttcttttctttccccattccactttattccctgctgtttggaatttggttgcttgatttctcttcttgaaattttcctttcatatttaacttaataaagtctaaagttaaacagtatcttgacctccttcccaaaattcaaaaggactttagagtactttcattttatctcccattttaaatgattgttttctagttctgtctccttaaccccatacattggacatgacattatggttattttatacagctcttgtatttacctacatgtttgccattttatttgttcaccattctttcttgcatcccagcatctccaaaggtttttccttaaaatactttcatttagaacagttttcttaa

SEQ ID NO: 732109 - DNA, 567 bp, Homo sapiens
aggcctaggtcctgttcaggtgacccatgaggtcctttggcttcagcacttgttcagtgctctcacttcaactttcctttatggatggcacctgggagttttcctcacttacttttgagcttggctctacagccaagaattacatggttggttattgatttatctagacttcatttttcctgttgctttgtycttttttttttctttcttttctttccccattccactttattccctgctgtttggaatttggttgcttgatttctcttcttgaaattttcctttcatatttaacttaataaagtctaaagttaaacagtatcttgacctccttcccaaaattcaaaaggactttagagtactttcattttatctcccattttaaatgattgttttctagttctgtctccttaaccccatacattggacatgacattatggttattttatacagctcttgtatttacctacatgtttgccattttatttgttcaccattctttcttgcatcccagcatctccaaaggtttttccttaaaatactttcatttagaacagttttcttaa

SEQ ID NO: 732110 - DNA, 585 bp, Homo sapiens
cctgcctcagcctctcaagtagctgggattaaaggtgcctaccaccacacctggctaatttttgtattttttaaagtagagacagggtttcatcatgttggccaggctggtctcgaactcctgacctcaggtaatccacctgcctcggcctcccaaagtgctgggattacwgatgtgagccaccgtatccagctgggatgaccttcttagacagcctgtgtcacagaatttgtagttccctttaaagatgatgcttggaataacccacttccagcaagagtggacagcagcaagaagactttgtttcatccttcagctgagtcgtaagttgtttccttttgtacatgtcacacatgaagaagagagcaagccctggtgcaggatggcacctgtggctatgaaacagaagaaaatctatggccctactagggattgacccatgaccttgaccttttgggcaaggagcaccgacagctaagccatcatccccaacagcccagtgtgcatcagatggtatggacgtgcagcctggaacagccccctggaagacaaacagccaagtcattaatcagttgctttacccct

SEQ ID NO: 732111 - DNA, 628 bp, Homo sapiens
agtcattatttactatttatggaaacttttttaaaaaaaggagcaaaagtatcatttcagtgggaacttaacttggggctacagtgttttatttaacttttaccccaaagttgcaaagtgttttgaaatttttccctgtaaaataataattttaattcaatttaaataaaacccaccaaggagacttcaagctttaagaagtctagcttcctgtgaaatgtgagaggaagtcagcactcatttcagaaatctgattataacaatagctccatccctaaatgaggtgaatcttggaatctcttccattttatttattttattttatttttttgagatggagtttctctcttgttgcccaggctgaagtgcaatgttgcgatctcggctcactgcaacctctgcctcccaggttcaagcgattctcctgctttggcctcctgagtagctgggattgcaggtatgcaccaccacacmtggctaatttttgtatttttagtagagatggagtttcaccatgttggtcaggctggtctcgaacttctgacctcagtgatccccccacctcggcctcccaaagttctgggattatgggtgtgagccaccacacccggccccccttcaattttaa

SEQ ID NO: 732112 - DNA, 543 bp, Homo sapiens
ggctggagttgcatactggtaggactacagttttgtggtcttggagatggctccattcccgctgcttcactaggcactgccctactgcagactatgtggtggctccaatcccacatttccgcttggcgttgccctagtggggactctctgcagtaccagctttaaataaatrgcattaggaactggaggggcaaagaaagctacataggccaatacaaacaggttctgaagagtcatggtatttgaataacaatgttgttccccttttctcatgtagccagaaactagtgagaaatagcacatttgacaataacataaagagatagttcctggacccagacagaaagcgatggtgcctgaacactgtaaagaatattcacatgcacttattagacaataaacaaatatctaagtacttttctctactaattattctaaatctttgttgttaaatcactattcttcacgagtccatgaattttataacacagttttgtttgtttgtttgttttttgatacggaatctcgctctgtcgcccaggc

SEQ ID NO: 732113 - DNA, 525 bp, Homo sapiens
catttgacagctcacccagcttcttttggtgcccgagggcatatctggaggccatagggaagccctggaaaagactgggcacaagctgaagccaaagttgggtgcctggctggcattggtagatttggggtcctggtttgcattgctcacgatgcagaatggttgctgacctttcctccagcgttggggatgatgtgagagtccagcaggcccccttcatgtgggccctaacttggggaaatctccaccgtgagcaccgggaagtggatggtggggccagcataagcagtatcccgaggactgatcatggaggaccattaggaagggggtyttaaggatgaccttggccagaccgtgggaagcctccagagagtgttacccagatccagggtacagtgttgcatttccaaatgagatggcagttccttcgttccttgatattgtcggagaaggatgtttaccaaacagaaggtccctgtctcagggtcttcctctgaatggtttcctccagtgagtcacttcagc

SEQ ID NO: 732114 - DNA, 525 bp, Homo sapiens
catttgacagctcacccagcttcttttggtgcccgagggcatatctggaggccatagggaagccctggaaaagactgggcacaagctgaagccaaagttgggtgcctggctggcattggtagatttggggtcctggtttgcattgctcacgatgcagaatggttgctgacctttcctccagcgttggggatgatgtgagagtccagcaggcccccttcatgtgggccctaacttggggaaatctccaccgtgagcaccgggaagtggatggtggggccagcataagcagtatcccgaggactgatcatggaggaccattaggaagggggtcttaaggatgaccttggccagwccgtgggaagcctccagagagtgttacccagatccagggtacagtgttgcatttccaaatgagatggcagttccttcgttccttgatattgtcggagaaggatgtttaccaaacagaaggtccctgtctcagggtcttcctctgaatggtttcctccagtgagtcacttcagc

SEQ ID NO: 732115 - DNA, 511 bp, Homo sapiens
gtcagcagcccaaagcagtcggtttggggtgaccacatgactgcgcggtgggccgatcagaatcttccctggaattcccatagacactgctggtttcctgaccaacatccattcctcccctattctcactagctacacgccacttttgttgatctagcaagaagtccagttgaagatatttgtgcctctagactttcttgcaggtaggggtcaggtcacccarttctggtcaataagatatgggcagaagttgctgggagagacttctgggaaagggtttcaaaaggaacatggctcctttagtccactcttaactgatggctgagatggagacatcttaacctgaaggcttttattccagctatgtgagaggccacctgagaataaagtgatccgagaagaaagcaaaacagagagagagacagagaaagagatggcaatatcagttaagtccctggattgagccatgcctgaagcctcagaacttcccaatttggagagccaatcaata

SEQ ID NO: 732116 - DNA, 619 bp, Homo sapiens
cgtagtgagcattacaatgcttaaaagtagtgcagacccaaaaactgaaaagtggtaaggttttattgtgaaaagggaaagaacaaagatcccacagcacaaaaatcaatgctagcaggttgtcactgctgactggggcgggggtggtagccagcttttattcccttattcagccccgcccacatcctgstgattggcccattttacagagtgctgattggtccatctttacagagtgccgcttggtgtgtttacaaacctttagctagacacagagtgctgattggtgcatttttacagagtgctgattggtgcatttacaaatcttcagctagacacagagtgctgattggtgcatttacaaatcttcagctagacacagtgctgattggtgtgtttacaatcctttagctagacagaaaagttctccaggtccccaccctaaccggaagcccagccagcttcacctctcactactaggacatattattgcctctaggctccttcagtgtacaagagctagaatatatgaatatgttatatatataatatattatatataatacgtattatatattatcctatatatcatatattatatattatatataatacatat

SEQ ID NO: 732117 - DNA, 586 bp, Homo sapiens
tgaacctaaaattgctctaaaaaacgaaatatttacaaaatgctgtacctccttactgagacggacacagggtaaaaggaagccaagtctcctcatggccctctccatacctatcaagtaaacagggttagatcccagcaggctcttccaaggctaattaaaagacaatgctgagcaaaaggataatacataagaaacattgtaggagtttgctagtttggagcagagatttggagattagatgtgagaatgaattctgagagtgctttaccaaagaaagtacatatttatttatcataatgattacctctaccagacagacttgtttcagtctgctggctggatctataagtgtgattttaatttctttctctgctgggtgactaaaatctggttttaaagtgatccacctaaacaatgttgatttatsagaattcccttagtgtgtggtctatgaaccctgaagggattgtgggtgtatgtaacacatgagttaagtcaataaataagaacagactggttatgaagacaagatcattattgcacatggctcagttggtttcaaagggaaaggaccatatctaca

SEQ ID NO: 732118 - DNA, 570 bp, Homo sapiens
ctttaccagttacagctttagtcttcgtttctctccccatgtagatatgattgattaagacaccaaatcatataattgctcacagttcttgatggcatccaatccagaacagaacttcaattccttgaactcgtctccaaatcacgtaacaaaagttcagattctatagtaagtcctttctaatactttcttattaaraaaccccatggttctctatagaacatgttctccttcagggtaccgagtaacacattcaacttgttcaactgcaagtgtgctcctggtggtctttaagtctttgggaaggtcttagttctcaaatctggaaataattatcctgatattctaaggagcagagcaggagcagcatttagggaggtagagtcacctgatcagttctcccatcgcatcctccaataacacattggtaaaaccttctggaattagaatatggctatctggcaatgctgcttccaaaagagttgaaacgtgagttcttaccaggatactgagctgccaagcctcaataggcggccacattgacaaacaggacgtgcttgcctgcaaact

SEQ ID NO: 732119 - DNA, 496 bp, Homo sapiens
atagcagcatgacaacagactaaaacacccatcttttgtagtattcttatatattttacttctctgtacattataactgccagcttaaaatgatattatttttgctttaaatgatcacttgttttttaaggaaattaactaaaaagcaaggcttttatattcacatacatattcaccattctgatgctcttaattccttcttgtagatctgagtttccagctgtcacttcccttcagactgaagttttttgtttttctttagggtttggttttggttttggtttggttggttggcttgcagtgcaggtgcaagtctgctggagaagtatttttcagctwtcatttaatagaaaatgtctttatttcactcttattttcgaaggacatttccactggatttaaaattctgggttaggagttacaagagaaagatggcagaataggaagtattagccctgttcccctgcagaaacgctgattaacaattatatatgga

SEQ ID NO: 732120 - DNA, 602 bp, Homo sapiens
ggattctgttatgttcttccaaagtattgagttttgtatttttaagcagtagataactttattatttatttatttatttattttttgagacggagtcttgctcttgtttcccaggctggagtgcagtggtgtaatctcagctcaccacaacctctgcctcccgggttcaagctgttctcctgcctcagcctcctgagtagctgggattacaggcacctggctaatttttgtagttttagtagaaacrgggtttcaccatgttggccaggctggtctcgaactcctgacccaggtgatccgcccgcctcggcctcccaaagtgctgggattataggcgtgagccaccgcgactggccgcaggtagataactttaaattgtcactcccgtactggatggcaactgaaacctaagttgacattttagccatagctgaactacttgaaatctactctgtgatgcatggttcaggaaccatggggaaatttgggtggattttatatatagaacttggggctgcccttatctgttttttgccttcctaggattcccaccccactccctttacagttgctgggatcccctaaactctgtcctttggttc

SEQ ID NO: 732121 - DNA, 567 bp, Homo sapiens
aaagtagacaaatatcttgaagaattaaatttaccaaagctgacagaaaaaggaacaaaaattttaatagtgcattacctattagagatgttgaatccgttaaaaagaaaaaaaaaaaagtcagtcccaaatggcttcacagatgaacttctttcaaacatttgaggaagaaataacaataatctttcacaaactcatcaacaaaatagaaaaaacaaaaacaaacaaaaaaaaccctctaattccttttttttttttttttttttttttttttttgagacagagttttgctcttgttgcccaggctggagtgcaatggcatgatttcagctcactgcatcctttgcctcccaggttcaagcaattctyttgcctcagcctcctgatcatctgggattacaggcacctgacaccacgccgagctaattttttgtatttagtagagacagggtttcaccatgctggccaggctggtcttgaactcctgacctcaggtgatccgccctcctgggcctcccaaagggctgggattacaggcatgagccgccacacctggcccccctctaa

SEQ ID NO: 732122 - DNA, 640 bp, Homo sapiens
aaggcaattacacatctaacagaatggctaaaatgaaagactgataattccaaatattgatgaggatgtggtacaaccaaggcttgtccactgcaagtgcaaatataaaacaaaataaccactttggaaaatctcttagaagtatttacataggattaatatatacatactctataatatagcaattctgctgctaggtatacactcaattgaaatatatatgcattttaaccaaaaaatacccctgtactagaatgttcatatcagcaagattcacaacaaataaagagaacctaactaaatacccatcaacagaagaatggataaacaaattgtgatatacacagggagtggaatactaaaacaatgagagcaagcaggaaaaggttaatgtggtaggcctgggttacycaaaccctgcacattccaaagaaggtttgtcttcatgactgttgcttggtcaactcctgggaaataagctctgagcccttaaaatatcatgtgtgataagagtgtttctgcaggcctgaaggcttgggccacgatgtaccagtgtgatcagataagtttatcctaacaatgtgacttatagtgaatacctgctttttctctgagtagctaaggtcagtcatgctgtcat

SEQ ID NO: 732123 - DNA, 618 bp, Homo sapiens
atcaccacaaacacattagtaatgcattgtgctatgatgtcatgcccactaggtgacaaatttttcagctccatgataatctcatgggaccaccaacatgtatgcagtctatcatcgaccacaacattgttaggcagtgcatgactgtacttcacttggtttctatcactcaaagaacaaaggccaagctccttagtatgrtattaccaggagagtatttatctcaattcattttccattttccccactttgtattttactgtttagaattcagcgagttttggttgcctgcatatagtagggtgttatatagctcttggctattgctcaagctttctccttctaaccccctgactacatttcacttagctttcatgattgtgtggaaaacctttcctgactctccacactggggtgagtaccctcttctgtactgacagtgtacccactgcatgtctttatcctaatacagtgaaataatttcatgtgtgttttctcctcagttagattgctgagagcctccatgaaagggtcagtatctgacagctttctaatccaaatgcctcactcagaaagaaaaataaatacaatgctaaaccaaactgaatattagaaagt

SEQ ID NO: 732124 - DNA, 600 bp, Homo sapiens
gttggtaaactacagtaaaattaggccacgcccatttatcacataatgtctatggctgctttagcactacaatagcagaattgcagagttgcagcagagaccgcgcggcctgtaaagtctaaaatatttagttggccaacctctgctctatagagtcaggggagaatattacaataatccaggagtgagatgactgtgacttggaccagagtggaacactggaggtggtataaaatgctcagattatgaacatattttgaaggtagagccaacaggattttctgataggttagayatggaataacagagaaaaagatggtgccaggatttttggtttgagcaacaggaagcttggaagtactgttactatggagtggagcatgttgggaggggaaaatcaatggttccattttgagatattaaagtttgaatatgtcatgagaaccactcctttaatcattttttgaggctagtataacattgatatccaaaaccaataagaatgctttaagaaagtcaaactacaggctaatctcattcatgaacatagatgaaaaaaccccaaacaaaccatgaccaaaccaaatttagcaatctatg

SEQ ID NO: 732125 - DNA, 588 bp, Homo sapiens
cctctcaagaacaaagataatggatatttatctttcagtacttctcaagaacaaagataatggatatttataagaatgacctagctaagagtatatggtcttaaagtatattctgaattattttaaaaatgcctaaatgattatcaggataattttgtgtgttcaacacatgtggtccatattgctttaaagctagctagagttggtaatattctaggtctttaaaaaattaattttccccattttgtatacatacttagttggtagaatgttagatcatcagtgggaaaaatggagaaaactttttttttttttaattttggatgcagtgagatttcaagtcaactctggcagtggctacctgaggcaatgagcgaaatgaactcttcagtccacaagttcacaaagcaatgaaacaaataagccccacctcctgtggtrtgcatgacaagtggcattcgctgcagcccttactaaataaagccacaaaaggtcccctttcacttgcccgatagccttgtaggtgtcctcggatgcttttcagaggtactgggtcccagtgcacctcggctaaggtactgttcacca

SEQ ID NO: 732126 - DNA, 614 bp, Homo sapiens
gaatggaataaagaaactgtggcatatacacacaatggaatactatccagccttaaaaaagaaggaaattctatcatttccttcatgtcgttcatgtcatgaccacatggatgaacctggaggatgttgtgttaagtgcaacaggccagatacagaaagacaaacttggcatgatctcccttaaatgtaaaatctaaaaatgctgaactcataaaagtagagatgaaaaaggaatcagcagccaaaagtgctttctcaacatccaccaatatcttaactgcttagctcttcataggattagtgaccttcatttcaagcatgaaaggaaaataccaagtattggttggcttactgatggtaattttgtttgaaaaggaagcatactaattttaaagggctgaagtataattcccwggcaccatgaaaacaattctcacaaaaattttaacaaatgtggtattttggtagttttgtccaatataagaaatacaatgttcacataagccaattatttgagaatatgtttcagtatatcacactttttaaaatatgtttttacaaataaaataaatgtacatctgtgacatggataaaggccaagcattatgattcat

SEQ ID NO: 732127 - DNA, 621 bp, Homo sapiens
ttataattagcacctgtatttttcatacttttctgtccctaattgcctaaacaataatttctggggaaagtaggtgaaatcttaatgtactacatgtgaatgggcgattttctggctcttaccattcaaactaggaacaagacgccagttcagtaactgtgttacttcttccaaataagacttgtcaaagctactgtggggaaattgggaaaaagaacctaaatctatccacaaataaatatcgaatgtgaggctgggcatggtggctcacgcctgtaatcccagcactttgggaggacaaggcaggcagatcaactgaggtcagaagttcaagcccagcctagccaatatggtgacaccccgtctccacaaaagtacaacattagctgggcatggtggcatatgcctgtaatcccagctactcrggaggttgaggcagaagaatcgcttgaacccgttgcagtgagccaagatcgtgccattgcactccagcctgggtgacagagtgagactccgtctcaaaaaaaagattaaatgtgtcggtccttttctagtgtggggaggggtaaaggcatgtcagtgcccactgctattctctggtgtccttttaaaggtagaaac

SEQ ID NO: 732128 - DNA, 650 bp, Homo sapiens
agtttccatggctgtggatcccagggagtcatttcacccttccaggccttagtgtttttgtttaatgaagaaagtttataaagagagggcaatgcttaatacaagtgagtaaatggaatctcaggcacccaagaggacctatctgggtcccaatcctagtgtaggaggtgctgtggcagggaccctccatcagaactaacctcttcagtgacgatcgagacagcacctgtgcagccyggttcatggccctgacccaagcgttcatgtcctcctgggtgtcggcactgaagtagtaggtcctcatgcctgactgctcggcctgagagcccgctgtggagctgttatagatgagcgctcgcatccccgtgtgcacagcctgtagcatgaaggcagaatgcaggtcagagggaggttatcacacatttcctttataggagcaaaagcaaggaggcactatggcccttctagtctaaaagcccaagcaccacccaacttgtttccacacctagaaaacatcataggctagatttctctttcttagtgcagccaggcccagtgacagctgtctgttccccaaagtaaaagcctgcagctgtaactgtttcctatttatcttactcctgctttgggagttgggagtgtgcacaaag

SEQ ID NO: 732129 - DNA, 633 bp, Homo sapiens
accccgcccccgaacccataatcagcacatgccatagatgagtctcaccctgcaacctgcaaaatgaaccgcctttagcaaagaggtcaaagatctggaagataattcttacctttggaaagacagtatcttctttaagtgctatcctccaaacaccgctcacaacattccaggaaattccaacttgtgtttcttttccaaataatccaatgagaaaactgaaggctgctcagaccccaatggaaacaacaagctaaactcactgggatgctgggaaaggcaggtcaagcaagggcaccctccaggtttggagcctccaaagtgatcttgcatgccttgcagctgrcgtctcagcacacaagcgggcccctgaacttcctaagcgcatactgtcttctctcaaccttaggccccacctcaacatcaaatgcttggcagagcctggggatcggtgtacacagcctgctgtcagtcaaatgctagcgtcactgctcgggaacgcttctctcctcttccccgagagctgcagaggcattcgtcagtggctccctgggcagcccagcactgaggagaaaacactcctgtacacgggcaccaaacatcaaaaccacagtcctggaagttctgtgtcaa

SEQ ID NO: 732130 - DNA, 631 bp, Homo sapiens
atcttacccttgaacatctggaatgtttacaaatttattataaataaggatgaattttttacacagtcttccttcaaatctatgattataactttaacctggggtgaaattatgtaatcaatagttatgaatttaaatacttttttggaaatattgttctaaatttattttcagtgaggttttcccaatttgttaaattgcttttcagcaagatttgactcatttgcattcctaacctcactcacctaagagggccagcctctctacacctgagtattattattgcattcataaatacaataactgctggcaaaaaaaaccccatcatgttttaacctgcatttccttgatacacgtaaagattgaacatttattttaaatgacctagttgtatttttcttttttattttgagacggagtctcactgtgctgccyaggctggagtacagtggtgcaatcttggctcgctgcaacctctgcctcctgggtttgagtgattcttctgcctcagcctcctgaatagctgggactacaggtacatgccaccacatccggcaaatttttgtatttttagtagagatgagatttcaccatattggccaggctgatcttgaactcctgaccttgtgat

SEQ ID NO: 732131 - DNA, 631 bp, Homo sapiens
atcttacccttgaacatctggaatgtttacaaatttattataaataaggatgaattttttacacagtcttccttcaaatctatgattataactttaacctggggtgaaattatgtaatcaatagttatgaatttaaatacttttttggaaatattgttctaaatttattttcagtgaggttttcccaatttgttaaattgcttttcagcaagatttgactcatttgcattcctaacctcactcacctaagagggccagcctctctacacctgagtattattattgcattcataaatacaataactgctggcaaaaaaaaccccatcatgttttaacctgcatttccttgatacacgtaaagattgaacatttattttaaatgacctagttgtatttttcttttttattttgagacggagtctcactgtgctgcccargctggagtacagtggtgcaatcttggctcgctgcaacctctgcctcctgggtttgagtgattcttctgcctcagcctcctgaatagctgggactacaggtacatgccaccacatccggcaaatttttgtatttttagtagagatgagatttcaccatattggccaggctgatcttgaactcctgaccttgtgat

SEQ ID NO: 732132 - DNA, 685 bp, Homo sapiens
atcttctgtcttttcccttgtgacttactggtgccttctgaggaatgggatccatagttggctggtgtgtaacagtattccagaacccaggagacacaggggtataaagttggcatcttgaggggaagcttctcacctggccttggtttgttatcaaagatagaaatgtgttttcagccatctgtcctttctaggactaaactcccttttcttatcatatagcaattttgagaaagaagattcagaacacaactaaacacacaacacttcaaattccaaggacctagagagggccttagagagctgtgcttttttctgggacaaatccccaccccgacccgcgacaccccaggatgactaacacagagccatgagtggagatgcatccgtaagtaggtgatggcctgaagatactccttaggagtggaggagaaaaccatgaaagcaaaatgtggttcccaacctcccagccccctcagtagctgctgccttcctcttcattctaaacctcaggcagacctgctgctatttcacaatgyaggggcaagagagtcacacactggtaaacatatcttcaaccacagaaaacatctttctttggtgttccatttggcttattacaggacagaggaaggagtgagtcacatggctgagttttcttccatgccatgcatcagcataccct

SEQ ID NO: 732133 - DNA, 566 bp, Homo sapiens
tatgactttggaaaatggttctgtttcactcctagttataaacctaaataaggacagagcacttcccttgaccagatcatctactgttctgggaatctgcattccttatggaggaagagcatctaggctattctacccacactgatgtgtctctgctttgtaaaaaaaaaaaaaaaaaaaaaacaaaaaagttgcctcttttgatttttactctaccttagagaggaagtagattggattttctgctagatcaacatgtgtgacctgcactcaraaacatttcccaggagggaatatggcaatgaatgttgacttcactgtcttgagtcattatgtcagtgactgatgtgattctctgcagggtttgtctccctgaaggaaaacccagaatggacataaagataccacttgagacaaatgtcctgtcagttactgagacactcctgcaaatatatatacatatatatatatccagatagaagaaaacagaataaaacctacctaaatttagcaccctgcttatacccagatattgttgaaagaaataattctctttggtggattta

SEQ ID NO: 732134 - DNA, 566 bp, Homo sapiens
tatgactttggaaaatggttctgtttcactcctagttataaacctaaataaggacagagcacttcccttgaccagatcatctactgttctgggaatctgcattccttatggaggaagagcatctaggctattctacccacactgatgtgtctctgctttgtaaaaaaaaaaaaaaaaaaaaaacaaaaaagttgcctcttttgatttttactctaccttagagaggaagtagattggattttctgctagatcaacatgtgtgacctgcactcagaaacatttcccaggagggaatatggcaatgaatgttgacttcactgtcttgagtcattatgtcagtgactgatgtgattctctgcagggtttgtctccctgaaggaaaacccagaatggacataaagataccacttgaracaaatgtcctgtcagttactgagacactcctgcaaatatatatacatatatatatatccagatagaagaaaacagaataaaacctacctaaatttagcaccctgcttatacccagatattgttgaaagaaataattctctttggtggattta

SEQ ID NO: 732135 - DNA, 517 bp, Homo sapiens
ttgtgaaagtgttttgtaaattttaaatttccattcaaagatcactcatggggtgtattcaaaatatctgagtgccttaataaatgtgtatattaaataatttaaagcacatttttgttgaagtattcacaggtaaattagctagtttatatattttaaataactgtttagagcatggattttttttttaatttacagaaaatgtactgaataaggtttattttgtaaattagtttcttctgctaggttgacttccttttgctctttctccgtttctctctctgacattctcagtcccaccattgtatgatttttcttgactttctccttycattgaacaagcctcttcaaggtcaggaaaccactgtaatttgcacttcggaggtatttagcagccaaaggtttaaattcccagccagcaattgggagtccgggcttgggttgctttattatgctttatatctgttgactctgagtaaaaaataatgtgtggagtagaattacaaaggtgactctt

SEQ ID NO: 732136 - DNA, 641 bp, Homo sapiens
cctatagcaagaaatgcacttgtatgacatagacctgtacacacacacacacacacacacacacacacacacaagcaaccacaactgaaacgaaagattcacaagcagtactcattctttctgcatgagatgtactttactttctattactttgtttaaaaaatgttggctttgcctttatacaatacactgatttcaagtcacattcagaaaacaataatctggcccaaaccatttactctatagattggaagaccaaaatccagagagagcagcaacactgcctagctcatactaaattcaagtaaccctgtcttgaaattgagtgtgatagttaacatactgtctttatccccatcaatggtcctatacaataagaagaaactacagtttagtcaaagagaaaaaatatatacaacwtccttcttggagctgaatccaggtgcttcattgggtagattctctaacctctttaagccttactgtacttattttttatagagggatttaaaccctcatcgtaacaagcctcaccatagccctggtaggtggtcattgagacaacaggaatgaaatgcctaacataattcctggctcacgttcttctattttacttataaaagaagtcaatgaaggaaaat

SEQ ID NO: 732137 - DNA, 537 bp, Homo sapiens
ggccaagcacgctcatgcctgtaatcccagcactttgggaggccgaggcaggtggatcacctgaagtcaggagttcaggaccagcttgaccaacatggtgaaaccctgtctctactaaaaatacaaaaattagctgggcgtggtggtgggcgcctataatcccagctactcgcgtggctgaggcaggagaatcgcttgaacacaggaggtggaggttgcagtgagccaagattgcgccattgcactccagcctcggtgacagagcgagattctgtctcaaaaaaaaaaaaatatatacacacacacacacacacacacacacacacacacacayatatgtgtgtgtatatatatacacacacatacatacatttatatatagacatatatgtgtatatatataaatgcacacatatatatgtgtatatataaattggataggtcttcaaacacaatgttaaatttaaacaaatcacagttaaggaagaaaacataatgtatcctatcatgtaaataaaatattaaaaacaaaatagg

SEQ ID NO: 732138 - DNA, 597 bp, Homo sapiens
ggcaccccataagtcacttcatcagataaacttaggtgaggttgaaagggacttgttatgaataacaaaagatagtcccctatcactcaggaaattccaagcaaatttaggagctctgtgccagaaacagaggtgggaggaacaaagaccaaatatttatttttttgttatgccacatatcccagttatgtcttatttgcatatttattagtttttaaaattttgcagtagtacttaatttaacttaattaattaatttagaattagggtctcattctgttgcccaagctggagtgcagtggccgatcgtagatcactgtaatctgaaacttcaggcctcaagtgatcctcccacctcggcctcccaagctctgggattacagatgtgagttaccatccctggcctgctatagtgtgttttaaaraaaaacttctatatcaggttgttttatgcttaagtaaggacatttcatatataagcaaaacactattttgtacttaatgaacaataatatcatctaataccctctccatacttagatttcccaaatcatctcaaaaatgtctttataattgattgacacattgcatttggtt

SEQ ID NO: 732139 - DNA, 425 bp, Homo sapiens
aaggatttccatctaccactgtccttcaggatgccccaggaaagagctgtggtgctgcagctgtccacattcagtggtgcctgcacatgatgcagaaccatcggtaaacctgttccaagccttctctttctctgtcaactgattgtaggggaccccccatgaggtcataagtccaaaatggaaaagagaaagcagtgtagcagaactggcgaccatggcatttgggacacttcatgtaaattacttgtgccttcacgacctgctcagaccccatcaygtatacaccacttccattggataatggagtattgctgtgcacgcctccatttatagcttgataggccagctaacactcaattccttgtggtcaactcaggtcccatggtgacttgctggctcatggttcagtctctactaaggcctgg

SEQ ID NO: 732140 - DNA, 425 bp, Homo sapiens
aaggatttccatctaccactgtccttcaggatgccccaggaaagagctgtggtgctgcagctgtccacattcagtggtgcctgcacatgatgcagaaccatcggtaaacctgttccaagccttctctttctctgtcaactgattgtaggggaccccccatgaggtcataagtccaaaatggaaaagagaaagcagtgtagcagaactggcgaccatggcatttgggacacttcatgtaaattacttgtgccttcacgacctgctcagaccccatcacgtatacaccayttccattggataatggagtattgctgtgcacgcctccatttatagcttgataggccagctaacactcaattccttgtggtcaactcaggtcccatggtgacttgctggctcatggttcagtctctactaaggcctgg

SEQ ID NO: 732141 - DNA, 607 bp, Homo sapiens
acaaatgtggatcactgccaatattgcttcagcattatagagtctctcattgaatagtctggtcatgaagcaagtgttcattgaatgagatcatcttagaatgctttgtcaagaaatcctagagcatttggctgtgagaaaccacctattttgttcagtccacctctattctgacagatgaacaaacctggaccagagatattgaatgacttaygtgaggtcacagagatgatgggtggtagccttaggtggcactcatttataaaagtataggcagatggctggtgtcattttcttcaagtttgatcagaggtgaatcagcgagatagagacctgtgggtttaacacagagataacctgagaagattgcacatctgctctgatacaggaccactttgtgggtgtgtgtgtatgtgtgtgtgtctgtgtgacagtggtgctccttttacctgaaagatcaaagtttctgaattattaggctgaaaatgcatttatggtgcatttcttaaaggtctcattagtatttaaatggtacaggaaagtgcagataaattgcgcattatgaaaagagccagtgggactggcaggtaacattatttccctggct

SEQ ID NO: 732142 - DNA, 479 bp, Homo sapiens
gaacaatgcccagagccttctcaaaagcagacaaggagaaggatagtaagtacacaagtctgcaaggtccttcagagctaagatgtcctattttcaatgcaatagaatcatttaactgataaacacggaggcaatgtcaagatggcaataaattgcctcgctatcaggcaaggcctttgtgtaacgttcaaaagaaactaattaaagaaatttttctttaaagtatatttgacccagacatttytacatcggcccaggatgccaatccagtttgaaaacttggtgtaaagcttgcattattaatgcacacttgaaaaatgatattgcatatttgccttagaacattttgggaatgggggaggattaaatgtatctcttgaggatttgatcagggaaggaagtggagggtggggtgatgccagagaaggccagagaaggtgtgcatccttgtaaaacatctatcataaaacttgggtctt

SEQ ID NO: 732143 - DNA, 613 bp, Homo sapiens
tcatcttccatgctctgattctccacataccctcttgctgtggggaaccccccacctcagtttctactgaagatgcccactctggacagaaccaggaacctcactcccacccatcttgcaaggttttgcctaaggtttgcactgctccagttggggccctccctctctgtttctccttgggacccctgtctatgcctcaacagtgctagttattttcatccgcctggactcaggtcagctcctatgagcaagtgtctgtaagctctggaagtgtaagtaaaggttagctgaatgaatatctgaggctgggggccagggtctgcagcagccaggggctggactggatcgctcagcatctcttctggygggacaatcaagagtgctgtagttcaacacctccccaccccagggaaacccaaaattgctaggccagggccaggtcccagcctgggtctcagaggctcctgctgagagcaggctcacatccccaagttggtggaaggtaatttcaacatttgtaacaattattcacttaattgggttccaattacatcagagaggaagcagaggactgtgtctgtgtttattctcctccttccaccttctgcacatc

SEQ ID NO: 732144 - DNA, 576 bp, Homo sapiens
ggtgaacagcagcttcccaataagatctcaggagttgggtgagcaggctcaagcattcatactaagaggcaaaatggcagcgtttaactggtatatgaccttcctgtgaaaatgctagaccaggtaagggaaaaatgcctcatggaggatgtgcacaactttagtaaacacactgtgtgtgcagcccctcccaagtcctggcaggccaccccacgtgtggacagccgctccaagggaaaaatcaaggggagagaaatggaaaccctggaaccatgccaatgtataaagccccatcttaagggccaagcagggcacttggatctctcaagttgccygctaggccctcttccaagtgtactttgcttcctttcacccctgctatgaaacttttcactaaactctcactcctgttctaaaacttgccttggtctcttcctcagccttaaacctacttctgcccctcagctgaattctttcctccaaggaggcaaggattgagtttgctgtagacccactggattcactgctggtaacaaaaccacaatgatataccatctcacctcagttagaatggct

SEQ ID NO: 732145 - DNA, 671 bp, Homo sapiens
ctggctgtctccggtgcccccaacaggctgatgcagaaggtaggggccctgcctcccagcttcgacacgcgctatcctttccatccgggagctccccactcgtggtctagttaatccctcaaactcagtggcattttcccaaagaactctttgtcatcctccagttacctgtgccctctttgcccccctaagtttccatggtaactcttattaaatcttttttttttttgagatggagtctcgcgcccaggctagagtgcggtgacgtgatcttggctcactgcagcctccgcctccygggttcaagcaattctcctgctttagcctcccaagtagcggggattacaggtgcccaccactatgcccggctaatttttgtatttttagtagagacagggtttcaccatgttggccaggctggtctcgaactcctgacctcaagtgatttgccctcctgggcctcccaaagtgctgggattacaggcgtgagccaccgcgcccggccttgaatcattatttaggtactcagttactgtctgtctctcctggacacatgaacatctacaccagggactgtgggttctcgttcaccgccatatcccccgtacctagaacagagcctggcacaggaaagaggcacacacacacgcgcacgtgtgtgcatgtgtgtg

SEQ ID NO: 732146 - DNA, 490 bp, Homo sapiens
ggcttacgcctgtaatcccagcactttgggaggccgaggcaggtggatcacctgaggtcgcgagtttgaaaccagcctgaccaacatagagaaaaccccgtctctactaaaaatacaaaattagccgggcacggcrgcacatgcctgttaatcccagctactcgggaggctgagacaggagaatcgcttgaacccgggaggcggaggttgcgatgagctgagatcacgccatttcactcctgcctgggcaacaagagtgaaattccatctcagaaaaaaaaaaaaaatagaaacatactttagaatgccacagcttctttttggataagcaagggcggctatagtgagaggagaggaggaaacaaaatttctaccttgaataactgggtcaatggcatgctatttattgagacagaaaactaggggtaggtggcgttctggatatgctgcagagggatttaagctgacatatcaaaaagttcttggatat

SEQ ID NO: 732147 - DNA, 630 bp, Homo sapiens
acagcagccagggacctccatgtctcctaggtagataaagaaaaataataatgaatagtgagagcatttacaaagtgccaagcattgttctgaagaatacacatgctataattcatttcaccctcacaaatctcccaatgttgggtagatcccatgaatacttcyagtttctaggcagtattctaggagtatctaagggatgctcgaggtctcacagctggtaaccaatggagctggattccaatccagaaagtcagattgtagacccctcaaaacagtgtctgcagccactgccttacacggcttcctggggaagtcatcccctacctgtaatcagcttatgaggacctcacagaagatgtggaattttagagactttttttttttttaatgagaacattataacttgggcatgaggtagctatgaagaattctcaaagacctgattaaggtccttggataagtgatgacagtgagataggaggtgtaagaaggtccggcggtctacccagaaaatgttaccataaaaatagaatactgtcattaattttgaagtgaatacgacactttgtactttgcaaagaaccgtgacatatatgttatccattttaagctttgcagtaaccccag

SEQ ID NO: 732148 - DNA, 630 bp, Homo sapiens
acagcagccagggacctccatgtctcctaggtagataaagaaaaataataatgaatagtgagagcatttacaaagtgccaagcattgttctgaagaatacacatgctataattcatttcaccctcacaaatctcccaatgttgggtagatcccatgaatacttctagtttctaggyagtattctaggagtatctaagggatgctcgaggtctcacagctggtaaccaatggagctggattccaatccagaaagtcagattgtagacccctcaaaacagtgtctgcagccactgccttacacggcttcctggggaagtcatcccctacctgtaatcagcttatgaggacctcacagaagatgtggaattttagagactttttttttttttaatgagaacattataacttgggcatgaggtagctatgaagaattctcaaagacctgattaaggtccttggataagtgatgacagtgagataggaggtgtaagaaggtccggcggtctacccagaaaatgttaccataaaaatagaatactgtcattaattttgaagtgaatacgacactttgtactttgcaaagaaccgtgacatatatgttatccattttaagctttgcagtaaccccag

SEQ ID NO: 732149 - DNA, 440 bp, Homo sapiens
cttgtaggcagcctagaccccaggtttattgttttgaggagatagattgatcatcaatgaatttaaatgttttttatgattatcttgatgataactgggaggttgggcatttaaattttttaaatttaaaaatcctggccgggcacggtggctcatgcctgtaatcccaacactttgggaggccacggcgggcggattacctgaggtcaggagtttgagactagcctgaccaacatggagaaaccctgtctctactaaaaatacaaaattagccgggcgcrgtggcgcatgcctgtaatcccagctacttgggaggctgaggcaggagaattgcttgaacccaggaggcagaggttgcagtgagccgagattgcgccattgcactccagcctgggcaacgagagtgaaacgccgtctcaaaaaaaaaaaaaaatcttact

SEQ ID NO: 732150 - DNA, 626 bp, Homo sapiens
ttgttgaacgctttttctacatctattgagatgatcatgtggtttttgtttttaattctgtatgtattgtatcacatttattgacctgcatatattaaaccatccctgcatccctaatatgaaacctacttgatcatggtggatcaacacatctttttgatatgttgttggatttggttagctagtatttttttaaggattttagcatctatgttcattaaggatattggtctgtagttttctttttttggttgtttggttgtagtttcctttcctggttttggtattagggtgatgctggcttcataaaatgaattagggagggctccttctttctctgtcttgtggaatattatcaaaagaattggtaccaactcttctttgaatgtctgatagaattctgctgtgaatccgtctggtcctggacctttttttgttggtaatttcttaattaccgtttcartgtcactgcttgttattggtctgttcagcgtatctaattcttcctgatttatgtgaggagggttgtgtttttccaagaatttatccatctcttctaggttttctcatttatgtgtgtaaaggtgctcacagtagccttgaatgatcttttgtatttctgtggt

SEQ ID NO: 732151 - DNA, 660 bp, Homo sapiens
cggctggattattgagggagtggagggtcgcttagggcacgggcacgagaggcgagggcgagacgtggctaatggggatcaagagtcagaatggacccgccaaactttgccccgagccagaacgggctccctacccgcgtcctcgacccatgggtcctcacctccaggctggtgtcctcattttacagtggaggaggccgagaccaaggtcacacagagagcaaggggtagagccgggtctgactccatccacagccaggacgctttaactcgtatttttcacttggcaggggcttggcggggacggaacggtgaggtcagagaatgctgcagaggggacattgggaccaggtcttgcagtgagttgaagtgctccaggcagagagcgccggtgggtctttcctggccaggccgcagggggcctttgggaagcacccgaggcctataaccttcggagcgtttgtcaagctctaatgagaactggaaagcttcagcttcccgaggtgggctgggagggccytaggtagggcctcgcacaaattgcgaaggaaagccgaccttgttctggagagcacgtggtgaggaaagccagcgacttgatgtgagcatttaaacgggaggaaggaagatgagaactggtaagattcttctcggccgggc

SEQ ID NO: 732152 - DNA, 602 bp, Homo sapiens
gctgcttttccttccctgtcccactttcctatgtctttactggtgtttcccaataaattacttgcacttgaatgtttgactttggctgtgacagtctaaaacatttccagcctatctctctgacctcctactgttgattcttcacacggcagcctgagtggtctttgtaaattatttatttatttatttatttatttatttatttatatgaaaatagagtagagacaggctctcactatattgcccaggctggtcttgaactcctgagctcaagcaatcttcctkccttggcctcccaaagtgctggaattacaggcatgagtctccatgcccggccctgagtgtcctttgataatatcaatcagggcagatcacgtccttgctcaaaactttccaagaataaaaatgcaaaacacttcctatggactgtgaggttctgtgcaacctctgtgatctggcccctgctctacctctcccttcactccctctgctccagccacaacggccatctcgctgtccttcaaacgctctgagttctctcctgccttcagtctcgtgtgcctgcttttccccttcctggagaactctgcacttagacctct

SEQ ID NO: 732153 - DNA, 533 bp, Homo sapiens
ttatctatttaaaacattttaaattgagggaggaaagaaggaaaaaaggacaagaggaagggaaggaaggaggaaacagtattcctagatgggtattggctcctgaagagccagtgcagagttgagagctgttccagcacatgaagcaagcacgggccctggaggatactcckctggccaccactgatgcccatgggcaggaagccaagttggttcaccaagccagggctccctcctccatcacttcatccatggactgtgggaagactgtgttgtcttaaagtcatgcccacaccctgggtggaaatgccgtggtgtactaatgtggaatttccagcagcttctctagcacagtacagttcagagattgttttctttgtgttaacatggccaaggttgaagcaagaaggctgaagtgtggaaagtgcagaaatttggaaaatacatgaagggctgtcaaacggcctcctcctggtcactgtcagagcaccaagacctgacaggcaggatggcagtggcaaaggctctaggcc

SEQ ID NO: 732154 - DNA, 533 bp, Homo sapiens
ttatctatttaaaacattttaaattgagggaggaaagaaggaaaaaaggacaagaggaagggaaggaaggaggaaacagtattcctagatgggtattggctcctgaagagccagtgcagagttgagagctgttccagcacatgaagcaagcacgggccctggaggatactcctctggccaccactgatgcccatgggcaggaagccaagttggttcaccaagccagggctccctcctccatcacttcatccatggactgtgggaagamtgtgttgtcttaaagtcatgcccacaccctgggtggaaatgccgtggtgtactaatgtggaatttccagcagcttctctagcacagtacagttcagagattgttttctttgtgttaacatggccaaggttgaagcaagaaggctgaagtgtggaaagtgcagaaatttggaaaatacatgaagggctgtcaaacggcctcctcctggtcactgtcagagcaccaagacctgacaggcaggatggcagtggcaaaggctctaggcc

SEQ ID NO: 732155 - DNA, 558 bp, Homo sapiens
actcctccattcattctctgttaaatgtcaccttacttaagagaccctccctgaagactctatttaaatggctccccagctccatcttgctctgctgctccaccttgatttatttattctcatggcgtatatcacaatctgacataacacgtatttgctcatttttatttatttattaactgtatattccttcccccaacaactatcagaatgtcaagctggagcgagcaggaattttgtctgttttatgcactgatgtatctccagtgcctagaacagtgcctgcacatactgaactcttaatcaagagtcctcgatcttactgaacaaactcaaacaattattacagcgtgcctactagggaccgggcacagtgctgggcttcggagatacaayggagagaaaaacagacatggtccctgccttcatggatctcacagtacagcaagaaagaccaatagtaagtcatcagagaaataaaatgggtaatagttcctgggcctacaagaagtacagtcggccctaagtatctgtaggttccccatctgtgcatacagc

SEQ ID NO: 732156 - DNA, 501 bp, Homo sapiens
catggaaaaagctaaggcataaaggatccaaaatcctattgatgatatttggaacattttcttttaattatacagtaaattgacttctgggggcagtggacaagcctgtgaattttaacacatgcagagattcatgcagkcgctgccacaatcaggacacagacagccccaaacactcccttatgaaatccctctatagtcacccctgccttcacctccacccctaacctcaggcaacatgctctgttctccaacatggtagttttgtcttcatgagacggtcaagaatggctctattatgtgtgtaaccttttgagactggcctctttcactcggcataatgcctttgagattcatccaaattggttcaggtatcaatagtgagtttcttttgcttgctgaattgtattccatgtttgtgctgtctgaagagaatattcaaacatccttgatgctgttcctttgtgaagcccactttggtgaaattcaaagcaattgatt

SEQ ID NO: 732157 - DNA, 604 bp, Homo sapiens
cagactgatacacaggggctttgaagatgtgaatgttaggatctccagatgagaagatgatcctggattatccaggtaggccaaatctaacccttaaaagagaacaacctttcccagctatggccagagggaggctgactgtagaacaacagtgggagagatgcaacatcgccagctttgaggacacagaaaggggccatgagccaatgaatgckggtggagtctagaagccgaaaaagtcaagtcaacaaattcttccctgggccctccagatagcttaagtttaggtcaatgaaacctgatcttgatccataactgacccatacctgtaagatcataaatgcatgttgccttaagccactaagtttgtggtaatttatgatagcagcaaagagaaaactaatacacgagataaaaattggctcatgaaagtacttcactttaaataatgttttcacttgcatttgtatatctatattaatttgcttttattgggaggtgtctgtgagcaatgttttggtaatgagtttgccctgttcaaatttcacctatccttcaaaactaagaaattgatacaccaggaaatagtgaaaaggcgatgtga

SEQ ID NO: 732158 - DNA, 616 bp, Homo sapiens
ttgaaaactataataattttaaaagagaatgatacaattcagcactcacaaaggtacaagataagagacatctcaatattgtgtggaaatatctatcaatgacctattttgtttttgtttttcttttttgacttaacatttccatttctagaaatttatcttaagaacataawcatggctgaataatatggaaaaataaaactgttgactgtgtgtgtatatatgtgtgtgtatgtgtgtacctatatatttgtgcatgtgtgtatatatacatataagtgtatatgataaaaatactaaaattataccatatatagacatatgcaaggacagttgggatatacttttactggtctatgagaagaatattaaaaagatgctttccaaaagataaaactcaaataatagagacagcagggatggaaggctatatgctttattcaaaacaagtgccttggttttaatcctatttcagtcataattacacttcaaaatccttaaaaactcagttaattctaggatctataaaaacaaagatgctcttttgcccactttgtaccctcatgtgactaataaggtgagaaagataaagcttttaaataaacatttacaattc

SEQ ID NO: 732159 - DNA, 517 bp, Homo sapiens
gtaatgcatttgttaagcagcaagatctaaccatttcacaatgtgtatgtacttcaaagcattatgttgccgggcgcagtggctcacgcctgtaatcccaacactttgggaggccaaggtgggtggatcacctgaggtcaggagttcgagaccagcctagccaacatggscaacatggcaaaaccccgtctctactaaaatacaaaaattagccaggtgtggttgccactgcctgtaatcccagttactcaggaggctgaggcaggataattgcttgaacccaagagacagaggttgcagtgagccaagattgctccattgcactctagcctgggcaacaagagcgaaactccatctcagaaaataataataatttaaaaataaaaagaaaaagaaagtattatattgtacgtgatagatatacaattttttcaattaaaaaaaaaaagacttcaacccaagtctatgaatctcaggaattagggactagtcacttcccattctataatgttgccag

SEQ ID NO: 732160 - DNA, 554 bp, Homo sapiens
tcagtggagagaagctgcaaacaagatcagaggaaccacagcttctgtcaacttgcatgtaaaaatatggagttggagatccaccagcattaccagcaggtgagaaaaagtcaggaaaatgttgaccctcttaatcccccgttgcaacccttcattccaatctacatatctgggatacaatttttttctttttttttttttttctgagacggagtctctctctgctgcccaggctggagtgcagtggcaccatctcggctcacggcaacttctgcctcccgggctcaagcaattctcctgagtagctgkaattataggtgcacaccaccacacctggctaatttttgtaattttagtagatacagggtttcaccatgttggtcaggccagtctcgaactcctgaccttgtgatccacccacctctgcctcccaaagtgctggaattacaggcgtgagccactatgcctggcctgggatacaattctaatgcttcccctgatatttgagacccattgcttgctcacttcttggcctgcttccttctctgtatcct

SEQ ID NO: 732161 - DNA, 608 bp, Homo sapiens
tactgcctagattttcttctagggtttttatgattttgaattttatggagttaatttttgtataaggtgtaaggaaggggtctaataccattagacccagcaatcccattactgtatatatacccataggtatatgaatcattcttctgtaagacacatgcacatgtatgtttactgcagcactatttacaatagcaaagacatggaaccaacctaaatgcccatcartgagactggatgaagaaaacgtggtacctatgcaccatcagatactatgtagccataaaaaggaatgagatcatgtcccatgcagggaaatggatgaagctggaagccatcatcctcagaaaactaatacaggaacaagaaaccaaacactgcatattctcactcataagtgggagttgaacaatgagaacacatggacacagggagaggaacaacacataccagggcctgttgtgggggttgggagaaagggaagggagcacattaggacaaatacctaatgcatgtggggcttaaaacctagatgacaagttgatagttacagcaaaccaccatggcacatgtatacctatgtaacaaacctgcactttctgcacatg

SEQ ID NO: 732162 - DNA, 568 bp, Homo sapiens
tgcggttgggcagaaaagggccctgaggtggagctgggcccaggacagtgccatgcgtgcacatggggcgcaggggccaggcccggggtgcagagctggggccatgctttggggttccagggtgagaagtgcccacttcagggacctggcctgtggtgcagccactatactcaccctactttagagcaccgsgttcctgcatcttgggaggaggttgtgtccccagggtttgccccacattggggtgaccaccagacctgacactccagacagctgggcctgaggcctgtggcccgtgatctgctcccagaggtgccacattgggcagggccacaaaccaggcaagggggagccctgggctgcccctgagcacttgggccactgggggagctcgtggcaacattgctccatccctggacaccagcctgggcccagcaaggacctggagcccctatcccaagctgcgaggggacagattccagggctgcacattccatggagccagcaggagctgggagcaggcagagccctgatccaccgggatgcagctgtagccacccaagttggg

SEQ ID NO: 732163 - DNA, 488 bp, Homo sapiens
tacataatggcttcattattctgtcccaagtggtataaactcccaaactattagcttatattccaagataggcagacctcactgcagtagggaagactgactgtacaggacctccttcctgctaatgactgagaatggccctaaagacagayactagaggagtccagtctgaatgaaaaggtgggaaccacttttcctttaacccagacaggatgagctcctccaactaattggcccaagtaacacctgttaagactccacgccccccacccccaactccagttgctacttcctttaccatctagctacagagagatcgacatctccctctgcagaggtgctatttgcatttgtcttaagctgaggtagggaggaagatggattcccagctaagagcaaaacacagagtagctgtttcttcttcactgggagccaagacacagacagacacacagacagagtcctggacagaccttgcccctaagtca

SEQ ID NO: 732164 - DNA, 641 bp, Homo sapiens
tcaaggaaacaggaaacaaatcacagagctggagcgttagggcaaagggcacccaatctagctggcacatcagcagatgtaggaccattgagctccagcttggcctcctggttggagccgttgatgctgagcagtggaccagaagcagaccgcttcaccacgggaggaaatccctgagaaaggagcccaagtatgtgcagcgtgggcatggatgaatggtgttgctgatcctagagttgctttgtttatgtraagacctgtcataacaagcagggaggtgttggaaccaagcagagagaaaccccctgaagaaaaccttcacctaaatccttcctttatgctgccaaaatgaaatgctctgtaaaattttaaaaattcaatcagccactttttaaaaccaaaagaacagtctgtgagaacttagaatgctaaaggtttagtaaaatcctagtaattataccacctatcatccctttataaacttggaggcacaaagatgcttctagatatatatgcatctttttaaggcaagatgtttgtacaatccttggccttttcatacaggtcatgataggattcagtccacattagcaccacgtttcaaccaaaggtcctaaatgggaaggaagattattaactgg

SEQ ID NO: 732165 - DNA, 625 bp, Homo sapiens
cccaggtctccagctggagggaacgtcaagaccaccctggggagctgggggtgaaggtcagatgaacaccctgggcacagatggtgacacagtcaccacagacaaactcagctctggtgaccctccctggcttcagtaacaagccaaaatgcagctttctgcagaaggaaaccttccttctgtccttccttcccgaagtgctgactgtgggctgactgccactgggggcagggagtcttccatctgttctgagactgcttcctcctcttggccctgccctacagatcatgaaggagaagggcaagaggtcatctgarcacatccagcagatggacctggacgtaagcgggacattaaggaggcatatattcttcagggatcgatacggaaccaagtaagccacagggtcccagcagagatggggtgaatgagagggatgggggcttccccggagcagaagccagggtcacccaggagggatgacacagctgccaagagctctcctggcccagggagcagccggcaccatgaaccgagcacctccctggttccaagccctgggccagactggaacatgtggggccagaacccaggaggatcctgaggagatggaaggcagcaaaca

SEQ ID NO: 732166 - DNA, 625 bp, Homo sapiens
cccaggtctccagctggagggaacgtcaagaccaccctggggagctgggggtgaaggtcagatgaacaccctgggcacagatggtgacacagtcaccacagacaaactcagctctggtgaccctccctggcttcagtaacaagccaaaatgcagctttctgcagaaggaaaccttccttctgtccttccttcccgaagtgctgactgtgggctgactgccactgggggcagggagtcttccatctgttctgagactgcttcctcctcttggccctgccctacagatcatgaaggagaagggcaagaggtcatctgaacacatccagcagatggacckggacgtaagcgggacattaaggaggcatatattcttcagggatcgatacggaaccaagtaagccacagggtcccagcagagatggggtgaatgagagggatgggggcttccccggagcagaagccagggtcacccaggagggatgacacagctgccaagagctctcctggcccagggagcagccggcaccatgaaccgagcacctccctggttccaagccctgggccagactggaacatgtggggccagaacccaggaggatcctgaggagatggaaggcagcaaaca

SEQ ID NO: 732167 - DNA, 625 bp, Homo sapiens
cccaggtctccagctggagggaacgtcaagaccaccctggggagctgggggtgaaggtcagatgaacaccctgggcacagatggtgacacagtcaccacagacaaactcagctctggtgaccctccctggcttcagtaacaagccaaaatgcagctttctgcagaaggaaaccttccttctgtccttccttcccgaagtgctgactgtgggctgactgccactgggggcagggagtcttccatctgttctgagactgcttcctcctcttggccctgccctacagatcatgaaggagaagggcaagaggtcatctgaacacatccagcagatggacctggacgtaagcgggacattaaggargcatatattcttcagggatcgatacggaaccaagtaagccacagggtcccagcagagatggggtgaatgagagggatgggggcttccccggagcagaagccagggtcacccaggagggatgacacagctgccaagagctctcctggcccagggagcagccggcaccatgaaccgagcacctccctggttccaagccctgggccagactggaacatgtggggccagaacccaggaggatcctgaggagatggaaggcagcaaaca

SEQ ID NO: 732168 - DNA, 580 bp, Homo sapiens
ggggaggccagtgtggtgttcgggttcttttgcatgttcttggagtcttcggagtttccagaactcctgtcttataagcagcagtttgtgactttctgtgtatttctcagcatggggaacgcgacagaaaagggactttcagtaccaattccactgactcctatctactcatttgctgtctttgtgactgaggatctcatttaagtttatttcaatgtgtttcattctcagtagaaatcaaagccagctggtcttcatcgagcacagctcctatatatacacagcaggaggaatctgaccccacagtttatctactaaacactacatgaattttattattattttcactttgaagattcattttgggatggacttgtaatgaactggccaagattccctccctacccccgccacaatcyggcttcatttccaatttcccaatacctgtgagtctgccttttctttctgggtttcatcattgctattcttaggtcctaagatgctccatgcagaagtaaatcaacttgatagcaactggaggagccaagggcagtgcgtgaactccagaagcctttctggt

SEQ ID NO: 732169 - DNA, 504 bp, Homo sapiens
agaagcctgcttttttttgtccctcaaattacaggggacacatatcaaattatctcagtggttgttaggaagcagaaggttaattatgttgactccaatcccctgcagtaagaatcagagactcctgcaggaaagggcagtgttcaaaactttcaattgacaagagagtaagcattgactctgcccagaacatggtagtcatccggatcctataaatgtaatcctggaattgtgactggaaaggaatagggagccccagaggagcrtgtgggtttggttgtttggaaatttgcttgagttaaataggtaatacaggtcctagttttcaattattccctcatccctccctttttcttttgcccattttatgtcatgcaacatatttctatcatccaggatcagttggaactgaggagtgcccatactgttcccctcttcccaaaaccctcgtgggtggagtgggaagcgacaaggtatggagaaggatgacagggtggacacaaa

SEQ ID NO: 732170 - DNA, 561 bp, Homo sapiens
gtaaaacaaacaaaatgaacaaataaaaacaacaacaacaagctcatgacaagtctatcttttatgaaatttcagaacaataggaattaagaaaagacactgaaagatgaaagagggaaaccgggtctcataaagaaagaattaggaatcagtgtggtttcacacaaccttggaaggcagaaggaaaaatattttcaaactagaatttaataatgagacaaatagctaatcaagtgtataagtgaagaataatgacatttttagatatacaattatttgccacataaacacattccagtcaacaatgaacctgcatataacagaggtcccataggattataatcgaggtgaaaagttcgtattacctaatggcatcatrgtctttgtaatgtcatagcacaacatattactcatgcaaacctatgataaaaaagtaaaccaggcaaatcactatgaacatatttatgaaaagagtgacacttcctccaaaagagcttcaggcaggtcctgcaggaagtgttccagaagaagacattgttatcataggagatgacagctccc

SEQ ID NO: 732171 - DNA, 534 bp, Homo sapiens
gaaccaacccaaatgcccatcaatgatagactgcataaagaaaatgtggcacatatacaccatggaacactatgcagccataaaaaaagaatgagttcatgtcctttgaagggacatggatgaagctggaaaccatcatcctcaacaaactaatacaggaacagaaaaccaaacactgcatgttctcactcgtaagtgggagttgaacaacgagaayacctggacacagggaggggaacatcccacactgttgacaaatgggatctaattaaactaaagagcttctgctcagcaaaagaaactatctcatgcctgtaatcccagcactttgggaggccgaggggggtggatcacaaggtcaggagatagagaccaacctggctaacacggtgaaaccctgtctctactaaaaatacaaaaaaaattagccaggcatggtgggcgcctgtagtcccagctacttgggaggctgaggcaggagaatggcgtgaacctgggaggcggagctcgcagtgaaatgagatcacgccactg

SEQ ID NO: 732172 - DNA, 611 bp, Homo sapiens
aactggggcatccataagtcaacccacttgtcacctgcccaaagcatggaagctggggctctgacacatggcagagggcagagtgcacatgaacctcagacactgtctcacgggggcagacactgtcatgtctgggcctctgcagtaccagatttctacaggggctaagcagtagatgatcccttttggaattcacatcaatgacacacctagtgtcctcagagcatcggtgactttgaagggttgggtagaagcaaggggaatggcacttggcttgtgggcagctatgagtaatcygcttggccctggacatggagaggtgcacacgattgcctacagagcatcacagtgcccactgtgttttctgtttatttttcagttgaatgacaatccaaaggtggttgtgctggatgagataagaagaaccaatacagtgtggagtttatgactcttactttggactcagacaaataatttacagggaagtagagatatacatgtagatatgtaggtatgtaagtgtgtgtatatgcgtatatatgtatatatcaatacctacagtatttatataaataccttttatgtatgtatatataaagagaatgtctagg

SEQ ID NO: 732173 - DNA, 666 bp, Homo sapiens
atttctctcccttcccttgtcttagagcacctgctttggaaaacatgtcattgtaagttctgtctctttgaaatgtgtgtaagtcttttcagaagctgtaataaataagactcttgtcagctttacgagccggacatctttctcaagggctggggtgtcatctctttgaaatgcacccccatcttctagttcctgtgagagggaagaagcctaatttccagtgggcatatctgtccaagttgcaaaattacctcctgtcataaagatataagaggtttgttttctggatagagcyaattagcaggtcaggcacagtggctgacacctgcaatcctagcaccttaggaagccaaggtggtaggatcatttgaagccaggagttcaagatcagcccaggcaacatggtgaaaccccatctctacaaaatatgagaaaattagccaggcatgctggtgcacacctgtagtcccaacttaggaggctgaggcaagaggatcacttaagcccaggaggtcaaggctgcagtgagctatgatcatgccactgcactgcagcatgggtcacagagtgagactccagctctaaaaacaaataagtaaataaataaaatgttatgatggcttcctgttgcacttgaggatccgtaaattgccttgcaaagcgcta

SEQ ID NO: 732174 - DNA, 555 bp, Homo sapiens
agttaagagggatccctgcggctgggcacccaagtccccagcgcctgctccctggaccgcacctgggctggcttcacagaccccgaatcctccccttggcgagggctgaccaagttgggaggggatggcggggataagcagtatcaagtcactgagacctgacagccctgccagtgcctggaagggtaacctcagggacaaataggtgtagagccaacagtagccaggctcagtagcccacccatatcaggcagtcctaggagagtcaggacatgcaccttttaatttgagaagtaaccatygagcacaatggcactgcacccctccatctttgccaaggacactaattgggatcaagtctggcagcaacatgctgagaagctgggccctgccctagccccagggtgaatgtgtccagacctgtggctctcagcgccagctgcacatcagagagggaggtttagaagaatgcctggcaaatgattctctggtgcccaaagtcaaagcagtggctacccttggtaagggacagtgactggaaggggaaaccagggg

SEQ ID NO: 732175 - DNA, 591 bp, Homo sapiens
gtttataaaaaatcaattgattttttgattattgatcctttatcctgtgaccttgttctaatagtttgtgtgtctgagctccttaagattttctacatgtaggatcatgtcatctgtgaatagacacttttacttctgctttccaatttggggagaacctccaatacaatgttgttttgttttgttctgagacggagtctcgctctgtcgcycaggctagagagcaatggcgcgatcttggctcactgcaagctccgcctcccaagttcaagcgagtctcctgcctcagcctcccaagtagctgggactacaggcacgcaactccgtgcctggctaatttttatttatttattattattattattattattatttttagtagagacggggtttcaccattggccagggtggtctccaactcctgacctaaggtgatccaccctcctcagcctcccaaagtgctgggtttacaggtgtaagccactgtgcccagctctccagtacaatgttgaatccaagtgtaaagagcatacatctgagccttgattccactattaaggggaaagtattcgaagtattcagtctttctgt

SEQ ID NO: 732176 - DNA, 591 bp, Homo sapiens
gtttataaaaaatcaattgattttttgattattgatcctttatcctgtgaccttgttctaatagtttgtgtgtctgagctccttaagattttctacatgtaggatcatgtcatctgtgaatagacacttttacttctgctttccaatttggggagaacctccaatacaatgttgttttgttttgttctgagacggagtctcgctctgtcgcccaggctagagagcaatggcgcgatcttggctcactgcaagctccgcctcccaagttcaagcgagtctcctgcctcagcctcccaagtagctgggactacaggcacgcaactccgtgcctggctratttttatttatttattattattattattattattatttttagtagagacggggtttcaccattggccagggtggtctccaactcctgacctaaggtgatccaccctcctcagcctcccaaagtgctgggtttacaggtgtaagccactgtgcccagctctccagtacaatgttgaatccaagtgtaaagagcatacatctgagccttgattccactattaaggggaaagtattcgaagtattcagtctttctgt

SEQ ID NO: 732177 - DNA, 570 bp, Homo sapiens
ctcacatcccagacgatgggcagccaagcagagacgctgctcacttcctagatggggtggcgggcgggcagaggctgtaatcttagcactttgggaggccaaggcaggcagctgggagatggaggttgtagcaagccgagatcacgccactgcactccagcctgggcaacattgagcattgagtgagcgagactccgtctgcaatcccagcacctcaggaggccgaggcgggcacttcacccgaggctaggagctggaggccagcccggtcaacacggcgaaaccccatctccaccaaaaatacaaaaaccagtcaggagtggcagcgcgtgcctggaatcccaggcactcggcaggccggggcaggagaatcaccggagcctgaggcagggaggttgcagtgaaccgagatcatgkcagtacagtccaggctccgcaagagagggagaccgtagaaagagggagatggagagcgagagcaagagcgggagggagagggagagggagagggcgaaaagtagtttttttaatagatgcatgttttagtcttctgctgtttatttcaatgat

SEQ ID NO: 732178 - DNA, 606 bp, Homo sapiens
ccatgcatgtatttaactgtagattatacttaacatttttctgtggacaggttttttttttgagatggagtttcgcccttgttgcccaggctggagtgcaatggtgccatctcggctcactgcaacctccgcctctggagttcaagtgattctcctgtctcagcctcccgagtagctgggattacaggcatgcaccaccacgcccggctagttttgtatttttagtagagatgaggtttctccatgttgggtcaggctggtctcgaatggacaggtctttctaggagcaaagacagctcctctgtgaatcaaatcaatactatttttcttaactcgagtgctttcatatatatgatctcattaacctttattataactctgttagacagattaagaaaacagacttaaatggtcaaaattccctaaaccttagtycactgttccatctaccatggggaagaggcacaagaaaggagggtgaaacagatgctggggaggctagacaaagtgtcccagcatctgctgccaatgtaagtcaccaactagcagtactccaaaagatgctgtaagtaagaaactggctcgtcaaccaaaagagaagtcatc

SEQ ID NO: 732179 - DNA, 570 bp, Homo sapiens
taataaggtcaagcatgatggaccaaaacattatttctggaatggtaccgtcactggttaattgtggaatagtggccaagctatttccttctttgtgctgttttcccatccacaaactacagataattacatcaagttctattctgcttctcaggattgttaggaggaaaaaaggagttatgtgtaaatatgaacaactggagcaacgctggtggcatcattcaatacacagaaacacagacattttaaatagtttataacaaaagctacaggtacagtataccagaaagcaggatttagtactttaacaattaaatgctatatatttaatagtttatctagtgttaataagtagtgtcascaaaaactgccaaattgccatcttcccataggaaaaggagaatttccattacctatgtagcgtgtggcctcatcagtctccccaccaaaagctatcttttgtccttcaagcaaacttagtatcctcttaaaatgacgaagattgatgatcctttcataatcaggagactcttttatattttctccataaaattcctatttaaaacaaca

SEQ ID NO: 732180 - DNA, 633 bp, Homo sapiens
ctttctgagcagtatcttcccctttattttttaacgctctgtttcacttttaaaataccctcatcactttatgtcagttaggtggttggttacatgagtcaaaaattctggaacaacttctggtctgggaatatacatttgggaattgtccacttaggtggaatttaaagccacgagactaaataagatcaccaagagagtgagtagaagataaggagaaaaaaagtccaaggacaaagaccaaggcatttaaactttttagagttcagatcaatgagtaagaaatgatagggaaaagaacagtgacagaaggagaaggaaacacatgagtgtgtgatatccattttctgtgacaaatgccactcatcggtcaaatgagatgagcactgagaagtgactactggctttagcaacaaagaggtcattgggtcattgktgttcttttaaaaaatgccatttaaatagaacaatgagggcaaaagcctgagtgcagcatgatcaggaatgagcagggaaatgggtattatagcagaggttgcagtcgactcattttgccatgtagtaaagcagaaatgaagctacgggggctggaatacagtgtggtgtatacagatgtttttctggaagactggc

SEQ ID NO: 732181 - DNA, 595 bp, Homo sapiens
catctcacatctgtgttctgatgatcaatcctctcttatcctcttctagttttttagatactgtgatcacagtttatctcatctctctttagatgctgcttatctgttccttttgttatcatcttttttttcttttttctaatattcactctatcatctctctgcggggtctctcatgactgccagattaatctttgattaggccacacatcccatgtccaccctggccttcccttcttctatcttggaccaccattctcrtcaatcagccacagtaattatttgaaagatttaatcatataatgtcacctctccactcaaaacccttcagtggcttcctatctcaggcagagtcaaagccaaattccttacaatcccagtaagatcctgtgtgatctggcccaggctatgtccctgagctgaggcctctgcctctggctcaccatcactgcactcaccccttcaaggcctacctgagggcttctgcagctctgcttcctctccctagaaggattttccctgtggttattgagaaggcttgagcacaaaatttaaaacagatgcctatcactccctatccacattttcttcttta

SEQ ID NO: 732182 - DNA, 586 bp, Homo sapiens
gcttcactgatctatccttaagccaacaccacactgtcctgtatataatagttgtatagtaagtcatgaaatcatgactttcatgtaagtctttcaactttatccttctttttcaagattgttttggcttttccagtgcctttgtctttcmatataaattttataatcacctcgtcaatttcttttaaaaagttgtctaggatgttgcttgaaattacattgatatagatctctatctatagctagaacccactgcacacccactggaatggctaaaggttaaaacctgacaatactaagtgttgataacaatgttaggctattggaacttttacatattgctggaagaatgcaaaattgcacaactacttttgaaaccatcaggacagtatattatgaagttatacaagcacttaccatgtggcccagcagtctcactccaaggtattcaatcccccaaaataaaaacatgtttcatacacaggcttgtatgaaagtgttcataggaacattattgagaaatagcctcaaactagaaataacccaaatgtctatcaaaacataaatggataagcaagttaaataa

SEQ ID NO: 732183 - DNA, 586 bp, Homo sapiens
gcttcactgatctatccttaagccaacaccacactgtcctgtatataatagttgtatagtaagtcatgaaatcatgactttcatgtaagtctttcaactttatccttctttttcaagattgttttggcttttccagtgcctttgtctttccatataaattttataatcasctcgtcaatttcttttaaaaagttgtctaggatgttgcttgaaattacattgatatagatctctatctatagctagaacccactgcacacccactggaatggctaaaggttaaaacctgacaatactaagtgttgataacaatgttaggctattggaacttttacatattgctggaagaatgcaaaattgcacaactacttttgaaaccatcaggacagtatattatgaagttatacaagcacttaccatgtggcccagcagtctcactccaaggtattcaatcccccaaaataaaaacatgtttcatacacaggcttgtatgaaagtgttcataggaacattattgagaaatagcctcaaactagaaataacccaaatgtctatcaaaacataaatggataagcaagttaaataa

SEQ ID NO: 732184 - DNA, 484 bp, Homo sapiens
ctttgtttttgttttgcttacttacttgggtgcctgtctgcctgtttttcttcctttcttccctccctccgttctttccttcttttgcttttatttttgtttctattttggtagtcttctttccgttttaaaaacagattgaatatttggttggcaaattctatgagtgtttatatttctgaaaaaattctttattttattattctagatataattattttaattmtttttgttaactttttttattatagcaaaattttagacaaatacaaatatatgggggtggtaaggtaaaccctttttacttatccctcagccattcttggcttatctaacctgtccctgccactcattccacctggattattacacttctgcattggattattttgcagcaaatcacagacatcacataatttaatccataaatagtaaattttttttatgtatttctgaaagacaaaaagacaaaggcactttttga

SEQ ID NO: 732185 - DNA, 542 bp, Homo sapiens
gtgcaccagaagagcgccatgaggatgatggcatacgcgcagtaggcctcctgcaggtgggagagaagcggcagagctgtcagagggcctgtgtcccagagctatgccacctcctgtctgtcagacaaaccaggccatttgtgactgcctggggagagcctgtgaaacccacagtcattgattcccaagcccaaggtctcatttcaaaatgcaaataaaaagcaaagcaaggcactcaatatcaccttgtctttgaccstggggagcccagacattacaagccagccacttcggagagtctggagttggttaccagtccccatccagcccagtgggattgcaggggcccagctgaggatcccaagatgagatgggggctgccagaagaaggagcaggacctgggcaatgtggacctttgcctggcaccctggcgttccctggcttttatcacaagctgcaagagtatgtttgtttgttggatatttagtgtttgttccctttgctaggagtgagctctccatcagacagagtcggttttgtg

SEQ ID NO: 732186 - DNA, 633 bp, Homo sapiens
accaattactagctttgccaagtcatttaaactctctaagcctcaatttcctagtctgtagagtgaagatgataataatctctacacccaaggaggaagaaatgagtgaacttatctaaagcccttacttatcccaatccctgactgagagtcaatactcaaaaagggttagctagtgaatgaatttggggcaatgaatttgaggtaagagggagagaaaaacattcaaacaaatggttctggaattatgtaataaataatatagtaggaatacatttgaattactctgaragcagaaaggaaagcaccaaattttgccttggcatatatagaaaacttcacagaggaggtaacacttgaactaaaatctaaagatctaaaatcaggccaaaggaaggccatgtgtgaagtcagagaggcaggaaagagaacctggtatgttcaggaactgcaagtctggctataagaagggtctgtgcaaaggaatggtggtgacacacagggtgaagagatgacttagagccaaaaattccctgcaagctctgccacagagaatggatttctcctggaagatactgaaaagccactgcagggttttgagtaagagagtgaaacatagaagcactgtggtgg

SEQ ID NO: 732187 - DNA, 559 bp, Homo sapiens
aacatttattctcatgtgctttagtcatagagtgattttaaacatcatcattttaaaattcaataagtatgattcttcaccgttatcaaagttgtatgaaaataaccatatatagtatgcataatttgtgttatttgctatctattttttaatttcctttttctacatgttctaagatttgctttttttaatttctttttttctacatgttctaagatttgctatctattatgatttgcttacagtagatttccttgcaaccaaactataaatcagataatcaatatttcaaatgattcyagattagctagcatctatttaccatcaaatgtatacttaagagttgattagctattaaaatgtacaatgtaaaaatttaaaacagcatgaattattcttcaaaattctatttccttatataatatgacatgaaatacaaagtttttaataatttattttgaggactaagaagtgttaaaagatctattagtctgttgaaataaaacacattaaatggtatacaatttatttatgtgaagaaaaagcctatttttaagta

SEQ ID NO: 732188 - DNA, 574 bp, Homo sapiens
aataagagcacacagtctaaacacagtgaagcagagctcactggctgagcctgtctctccatctaaaaagcatgaaactacagcgtcttttttaactgattctcttgataagagattggaggattctggctcagcacagttgtttatgactcattcagaaggaattgacctgaataatagaactaacagcactcagaatcacttgctgctttcccaggaatgtgacagtgcccattctctccrtcttgaaatggccagagcaggaactcaccaagtttccatggaaacccaagaatcttcctctacacttacagtagccagtagaaatagtcccgcttctccactaaaagaattgtcaggaaaactaatgaaaagtgagtatgtgattttcttgtgtgtacatatgtgtctcactttctttttttaatttactaagcagaacttcagatgaggaataaaatgattggaatattttttttctcctctaactacttgtaaatttgggagaatttggagagtgtagtagagtcagatcagtgtatggaaaaggagcaggagtgactggaccttctaa

SEQ ID NO: 732189 - DNA, 613 bp, Homo sapiens
cagcaagacccctgttagtctcagctgtgtttcttaaattggcccactgtaccttccagttagctattctggggtccatgtcatgttggctccattttccttttctttctcccacacagatacctataacggctataacataggcctggtggctgttggtggcttatccctatctgcttgtatttaaggggtactgtttcactgagttttgctgacagatgttgtcatgagatttgaggttttctgtgttgttgctctatttttatgtgggaatttgctactatcatcatccctagaccagcttttcctagtaatacaacagggatgttctgactgattagagtttgcctgtttgaagaattggttggctagtgatttttttttgaggggagtctgtaccagttaatagcctgactggcgtgtggataaaaaggaagsagtttcaagtcaaataaaacacttaaaatgaaaccacactgcaactctctttcttttacttaagcttaatcaaattaatgatgatgtaatcccatgaaggaaaagtcttctgaaggatcaagttgataacattttgtgatcaaagaatttgagaaaacctctatcccagtgtcta

SEQ ID NO: 732190 - DNA, 593 bp, Homo sapiens
atctatagagacagaaagtagattagtggttgggtggggctgggaggacaggtagtacactactttcccagaactactggaacaaagtaccacaaactggggagcttaaacatagaaattgatttcctcacagttctggagactaggactctgagatcaaggtgtcagcagagytggttctttctgagggccctgaggcaaggctctgtcccaggcctctctccttggctggcaggtggccatcttctccctgcgtcttcacatcatcttttctctgtgtgtgcccatgtccaaattttgattggctcattctgggtcatggccaattgctatgcacaaagtgaagtctacttccaaaagaagggaagagggaacactgactaggctaaacttatagtcattttaatgtccgcttttcctatgagattgtgaacacacagaagtagggtttttatctacattgtgcaaagtttaataagaaaaatagaattcaagagaagcagttcaatagcaggaatttaatatgggaactaattacaaggtttagggcaggactaaaaagccagttgggatggtgagccaacccagagatt

SEQ ID NO: 732191 - DNA, 606 bp, Homo sapiens
ggatgtgttcggagtttcttccttctggtgggttcgtagtctcgctgactcaggagtgaagctgcagaccttcgcggcgagtgttacagctcttaagggggcgcatctagagttgttcgttcctcctggtgagttcgtggtctcgctagcttcaggagtgaagctgcagaccttcgaggtgtgtgttgcagctcatatagacagtgcagacccaaagagtgagcagtaataagaacgyattccaaacatcaaaaggacaaaccttcagcagcgcggaatgcgaccgcagcacgttaccactcttggctcgggcagcctgcttttattctcttatctggccacacccatatcctgctgattggtccattttacagagagccgactgctccattttacagagaaccgattggtccatttttcagagagctgattggtccattttgacagagtgctgattggtgcgtttacaatccctgagctagacacagggtgctgactggtgtatttacaatcccttagctagacataaaggttctcaagtccccaccagactcaggagcccagctggcttcacccagtggatccggcatcagtgccacaggtgga

SEQ ID NO: 732192 - DNA, 562 bp, Homo sapiens
actcagcaggtgaccttgaaacttagagctgaaggatcagtaggaggtaactagagaggccagggaatcgcatgttcaaaggccaggaggcaagaaagagcatggtgcccttcaagagaggaaagaaggctactgtgactggagcatagatgtaggcaagtgttgggtgattgagagctctaygggccatggttaggttttattcctaatgccgagatgccaaacatggtggttcatatctgtaatcccagtattttaggaggccgaggcaggaatatagcttgaacccaggagttcaagaccagcctgagcaacatgagacctgtacaaaacatttaaaaaattgctgggtatgatggtgcacacctgtggtcccagctactcaggaggctgaggcagaaggatcacttgagcctaggaggtggaggctacaatgagccatatttgagtcactacactccagcctggatgacaaagtgagaccatgtgtcaaacaaaatacagaaagaatattaatttaaaattttgaaagaggagtgatctgaacttatatcttaaaaag

SEQ ID NO: 732193 - DNA, 492 bp, Homo sapiens
ggtgaatggcctttctgcaatcatcttcctacactcatttcagctagaattagaagctatgttttaaaaaatgtatcatttccacttattaataatttgtccaagccatcctcttagaagtcatcataattagttcttgccattttattaatatcatggaaaatttataattgatggatgctgactttataaattatcccctccagaagttataatgtgagtgttataattttcaatattcrtaacattaaaatggaaatgtagtgggtagaaataagtataatcattttaccgtttagcattgacttgtcttttcaaaggtgcagttttataattcaaaaaaatggtgctctcaggatttctattacaaaccatgttttctaagaatttttatcttggttattaaaaagggaggggcactgttccaactcagagttggtgtttaaggctgcaggtgtggagtagactttccatgcatctggaattagggaa

SEQ ID NO: 732194 - DNA, 492 bp, Homo sapiens
ggtgaatggcctttctgcaatcatcttcctacactcatttcagctagaattagaagctatgttttaaaaaatgtatcatttccacttattaataatttgtccaagccatcctcttagaagtcatcataattagttcttgccattttattaatatcatggaaaatttataattgatggatgctgactttataaattatcccctccagaagttataatgtgagtgttataattttcaatattcgtaacattaaaatggaaatgtagtgggtagaaataagtataatcattttaccrtttagcattgacttgtcttttcaaaggtgcagttttataattcaaaaaaatggtgctctcaggatttctattacaaaccatgttttctaagaatttttatcttggttattaaaaagggaggggcactgttccaactcagagttggtgtttaaggctgcaggtgtggagtagactttccatgcatctggaattagggaa

SEQ ID NO: 732195 - DNA, 646 bp, Homo sapiens
gcattcccgtcatttggataggggtttcccatccaagagcaaagtggctttccttctgccaagggcaagtatctggagaagggcccacctggaggtccctggagaaggacccacaatagctagagcatctgtgcaccagtctggtaaaagagatgagggaagggccatgctaccagccttcactacagggctaagtttggtagagccaggtagcttcctatctaagcaaggccttttgtttcctgagcaactttcagaagagcacagtgttgactgagcagaataaagcccatccttagatagtgaaatttttaaaaagtatcctttgataattagcaacagtatgcacatagatgagctaagcaatattttctttgatgcgaacagtccttcttgaagtacaagaaggcaacacagatgttcattcggcttcttatgtgttcagatactrtggaaacagaattcccagttcctcaaacaaaacatttcattcatacctgtccatacttgcatgtgcctcctgtgtcatgcctctctgcctgtggtactctggaatctttgtcttctattcacttctcaagattgcacaccagcataaattcctaggtgaagacttcctagaacacaggtccacacaatgaaaaag

SEQ ID NO: 732196 - DNA, 608 bp, Homo sapiens
atacattcgggcttaattctcggttgtatggtttcctaactgtgggactttgggcaagctacctaggggcgctgcaatttataggaatgatggtgtctctgtcagagggtcgttgggagaatcaactgggataatgcaagaaaagcacttatttgcatagtgactcgatggtggacagccattccatcaataactaacgctccccgctggctgagtcacatttcgtattgcactaaagggtgtttctttcttcctgcgctcaatctggcgcacatcttgtgtcgttcagtaccgaaacctagaacacactagggactgtgattgtgtcagtttctcgtamtaaaaagggcaagtgtccaaaatacaaaatactgatagctcgccctggttaaactctagctgccgaacttggcagcctctttactgaaaaccctcgggggttcagcaggctcgttcctaggctgcttcagttccccagagcctggaggttcttaagatgatgggcccctcgatggttgaggaattataagcagatcttcagctgtgcaactccagctattggccgtggtttgaactagagtggtttttttcaactgtactgtatccta

SEQ ID NO: 732197 - DNA, 623 bp, Homo sapiens
ccttggtgctctccgcgcggccgtctgcctacctgtgagtacgctgaccagggctggttgactgcctacacattagcggagtctttctcattttttagggcacagtagatactcagcgagtgttgttttttttttaataattatgcaataaatgaatggatgtccgcacaccaccctgaacaccagcacccactggtcatccctggacacgcatgggtggaaggaccacactggttgtccctggaagagtagctcactctcgagcctgcaccgatgtcatctgagtcaaaacacagacgtctgggcyccaccctagagagtctggctcagcgggtccagggtggggcaagaatgtgcattcctgcaagttcccaggtgatactgaggcggctgctggggggataccatttcaagaagcactgcttggaggcaacgcagacctctccctcttcgacgaggtcctgttcacttccatgtaaccagtcagggttggaatcccacatggagttcccctcctttggtgaccctctgctgcagctcttgggagcctcccctttagatgagttcctccctgctctgaccaggagttgctttttctataccacctcagctgatggtgttca

SEQ ID NO: 732198 - DNA, 584 bp, Homo sapiens
tttaattggcagcactttgcattatattttaatagaacaaaaagtaatgaaacatcatcattggcatcttagactcgatgaaatataatattgtcaattataacagtgtgatgaatatccttatttgccgttgtctttgcccacgataattagtagtggggccaaatctctttttcatatgtgtgttgcccttttgtatttcttcatgagttgcttgtgaattggttgtcttttccttactgatttgtgaaagttctttatttatgtaagtatcttaaatctttgtcttccatatatgttgtaaaatgcctcccattttctaatttgtctttcaatcgtgatatttcttgatatgtggaaatttaaaatctttatgttggtcttatctatcaatcattgtttatggtttctacctttagtatcatggttagaaaagccttcyccacctgaggactatgtaaaatattaacctatattttcttctaatacttttatgtttttgttttcttttttttttttctttttttgagacagggtctcactctaggcaggctggagtgcagtggcgtgatctcactgcagct

SEQ ID NO: 732199 - DNA, 597 bp, Homo sapiens
tattattgccttccttctgctttttttgggatttagtttactctcctttttatagtttcttaaggtggaaactcaggtttgtgttttttttttttgagacatgatctcgccccgtggcccaggctggagtgcagtggtgcgatactggctcactgcagcttccaccttccaggctcaagagattctctcacctcagccccccaaggagctgaggctacaggtgtgtaccattgggccagctaatttttatttttattttttgtagacacagggtctcactatattaccaaggctcttcttcaactcctgggcttgagcgatcgtcccagcttggccttccaaagtgttgagattasaggtgtgagccactgttccctgctgatgctcagtttattaacttgagacttttcttttttttttcctgatacaggcttttaacattataaatttctccctaagtacttctcatagctgcatcctaaattttgatctgctgtgtttttcttttcatccagtttgaagtatttttaaacttcccttgtgatttcttctttgacctttgaatcctttagatatgttttctaatttctaagtagt

SEQ ID NO: 732200 - DNA, 637 bp, Homo sapiens
tgatctcggctcactgcagcctctgccttccaggttctagcacttctcctgcctcagcctcccaggttgctgggattacaggcacccgccaccagctaatttttgtattttttagtagagatggagtttcatcatgttggccaggctggtctcgaactcctgacctcaggtgatctgcccacctcggcctcccagagtgctgggattaaaggcgtgagccatcgtgcacggccggtttttcttccaactttctaagtactataagcttgttgtaaaatttggcaatatagaaatgtataaaatggaaatgaaaatctttactaatcccatcccttaaagatagccactgttaataagttagtgacttgctttccaagctttaatcatctttctttaatcatcatatttttgattatatcctcttaccaaarttcctttacccctcaccacaaaggtttctaattcagagacttcctttagctcccttgattcaaggagataaagttaattagcaatcaggagatgaggagccctttcctggcaaggacagaattctaagacggagggatttttagctcctcggtggactcagttccgctgcaccttttgcagcatcttgcctgctgggtctcctctc

SEQ ID NO: 732201 - DNA, 565 bp, Homo sapiens
accatttgtgtgtccgtgtgtgtgcatgtgcctgcgtgcagactgctcaccacttgaatgcttctcaccaattttgtggtggagtgacagatgttgtgactggaactgtgctcctaggtttgttttatctcaaagaagagaatgtttttycctgagtggcaagatattctttggagcagtgtcctgagcaaagacccaagggctggaaaggccccaaaataaaacctgtgtctggggtagttgtcagagaggctgagccagggcccttgcgcaccctaaaggcacggtgggattgtcctaagctgctttcactgccatttggggagattatgctggggctctgtgagagcattcaggagctgcaggtgatgggcctcatttggtcaaactggcttcccttgagtctctatgtctatgtcttcgtgaaatggcatagtggttagaggagggactcggagccagactgccagggtttgaacccaggacccattacctacccactgtgagagcttagggaaggcatctgacatctcttccctcaagcataatcctcatggtcttgtca

SEQ ID NO: 732202 - DNA, 613 bp, Homo sapiens
cagtactggcaaagcctgaagtcttgtccttacagcaacggtagtgcaatcatttgactatttattttcactttctccatactttatacagagtggaaaacaagcaaattaaagtactgatacaagtgataaaaagcagtggtctcaaatgtaattgagacaaaaatagggacaatttaactgtaattggacacttactcatttaagctaattaatcattttaaattgcaaagggagtaaacaaaattaaagaacttgtacaaaatgctaaacatatttttttttcaaatacctaagtgtgattaaggatacatatctatcccttctggaattgagccagtgtaagtcaggatggtttcagtgacagaaactatttcaratcatttaagctgaaggaaagttattggtcagagaggaaggatcatagatcactcggagtcaaagaagagttgcaggaggcagcaaattgggatggggagccaggagtcagggcccaccagcgtattctctccatttctctttcatttctggctgacttccttctgcagacagattctgtccagatggcataaatggtgggggaaattaccatcagctctttggctttctaacc

SEQ ID NO: 732203 - DNA, 599 bp, Homo sapiens
tgtttatatgtctattccaggacggattctgattggctctccttagatcatgcaccttcccctataccaattactgtgtacaggggaggagagtcaccatgattggtcaagactgggtcatgtgatcagggtcaggcagtctcagagtctattactaaaataaaagagatggaggggaaatatgctagccagccccaaatgggaactaatacagtgtatcactgaactacactgctcctcctcatctttctttaacattttcacttttgacttttctgcatagttacattccatttaaaagaaaatctgtttgtattgatggtcagccatctgacaaaartctcaagctacttcattctattgacctcactgaataaattgaataaataatttacattctacacagggatcatacaaaacagttttggcatggagggaatatgcagcctcctagcctgtccctctctctgaatgtggttctctaggcagcagagtaatggcatatgttgtgaacacctggtggcctccattcctcatggagttaagctgaaagttaaagagaatgaaactagggccggggactggaggggcttcattga

SEQ ID NO: 732204 - DNA, 599 bp, Homo sapiens
tgtttatatgtctattccaggacggattctgattggctctccttagatcatgcaccttcccctataccaattactgtgtacaggggaggagagtcaccatgattggtcaagactgggtcatgtgatcagggtcaggcagtctcagagtctattactaaaataaaagagatggaggggaaatatgctagccagccccaaatgggaactaatacagtgtatcactgaactacactgctcctcctcatctttctttaacattttcacttttgacttttctgcatagttacattccatttaaaagaaaatctgtttgtattgatggtcagccatctgacaaaagtctcaagctacttcattctattgacstcactgaataaattgaataaataatttacattctacacagggatcatacaaaacagttttggcatggagggaatatgcagcctcctagcctgtccctctctctgaatgtggttctctaggcagcagagtaatggcatatgttgtgaacacctggtggcctccattcctcatggagttaagctgaaagttaaagagaatgaaactagggccggggactggaggggcttcattga

SEQ ID NO: 732205 - DNA, 599 bp, Homo sapiens
tgtttatatgtctattccaggacggattctgattggctctccttagatcatgcaccttcccctataccaattactgtgtacaggggaggagagtcaccatgattggtcaagactgggtcatgtgatcagggtcaggcagtctcagagtctattactaaaataaaagagatggaggggaaatatgctagccagccccaaatgggaactaatacagtgtatcactgaactacactgctcctcctcatctttctttaacattttcacttttgacttttctgcatagttacattccatttaaaagaaaatctgtttgtattgatggtcagccatctgacaaaagtctcaagctacttcattctattgacctcactgaataaattgaataaataatttacattytacacagggatcatacaaaacagttttggcatggagggaatatgcagcctcctagcctgtccctctctctgaatgtggttctctaggcagcagagtaatggcatatgttgtgaacacctggtggcctccattcctcatggagttaagctgaaagttaaagagaatgaaactagggccggggactggaggggcttcattga

SEQ ID NO: 732206 - DNA, 656 bp, Homo sapiens
ccagctagacaggtctaggatgaaggggtgatatcaaaactatttaacattccaggtgcagtggcccatgcctgtaatcccagcaattttggagtccaaggtgggaggatttcctgaggccagcagttttagactagtctgggcaacatagtgggaccctttytccatttaaaaaagagaaaaaaaaaaggctggcatggtggctcatgcctgtaaccccagcactttgggaggcaaaggcgggtggatcacctgaggtcaggagttcgagaccagcctgaccaacatggtgaaaccccatctctactaaaaatacaaaaattagctgggtatggtagcagatgcctgtagtcccagctactctggaggccgatgcaggagaatcatttaaacccgggaggtggaagttgcagtgagccaagattgcgccatttcaccctagcctgggcgacaagagtgaaactctgtctcaaaaaaattaaataaataaaaattaaaaaacctatttaataaccagtaagttgtggacactttactggttattgcagtgtatcagaaataatgctggccaaagcactggatgagaatctgaaggactcctcccgctcatggggccaggcattaacgttttattggctgggtcatggagatggcca

SEQ ID NO: 732207 - DNA, 656 bp, Homo sapiens
ccagctagacaggtctaggatgaaggggtgatatcaaaactatttaacattccaggtgcagtggcccatgcctgtaatcccagcaattttggagtccaaggtgggaggatttcctgaggccagcagttttagactagtctgggcaacatagtgggaccctttctccatttaaaaaagagaaaaaaaaaaggctggcatggtggctcatgcctgtaaycccagcactttgggaggcaaaggcgggtggatcacctgaggtcaggagttcgagaccagcctgaccaacatggtgaaaccccatctctactaaaaatacaaaaattagctgggtatggtagcagatgcctgtagtcccagctactctggaggccgatgcaggagaatcatttaaacccgggaggtggaagttgcagtgagccaagattgcgccatttcaccctagcctgggcgacaagagtgaaactctgtctcaaaaaaattaaataaataaaaattaaaaaacctatttaataaccagtaagttgtggacactttactggttattgcagtgtatcagaaataatgctggccaaagcactggatgagaatctgaaggactcctcccgctcatggggccaggcattaacgttttattggctgggtcatggagatggcca

SEQ ID NO: 732208 - DNA, 656 bp, Homo sapiens
ccagctagacaggtctaggatgaaggggtgatatcaaaactatttaacattccaggtgcagtggcccatgcctgtaatcccagcaattttggagtccaaggtgggaggatttcctgaggccagcagttttagactagtctgggcaacatagtgggaccctttctccatttaaaaaagagaaaaaaaaaaggctggcatggtggctcatgcctgtaaccccagcactttgggaggcaaaggcgggtggatcacctgaggtcaggagttcgagaccagcctgaccaacatggtgaaaccccatctctactaaaaatacaaaaattagctgggtrtggtagcagatgcctgtagtcccagctactctggaggccgatgcaggagaatcatttaaacccgggaggtggaagttgcagtgagccaagattgcgccatttcaccctagcctgggcgacaagagtgaaactctgtctcaaaaaaattaaataaataaaaattaaaaaacctatttaataaccagtaagttgtggacactttactggttattgcagtgtatcagaaataatgctggccaaagcactggatgagaatctgaaggactcctcccgctcatggggccaggcattaacgttttattggctgggtcatggagatggcca

SEQ ID NO: 732209 - DNA, 564 bp, Homo sapiens
aaccagtaagttgtggacactttactggttattgcagtgtatcagaaataatgctggccaaagcactggatgagaatctgaaggactcctcccgctcatggggccaggcattaacgttttattggctgggtcatggagatggccagtggcaaggtcagggttgtcatgtttttctgactgggatatcaagattttattggctcatgaactgggcagctactgtggcacatagcagcttgacagccwactttcgtactcgtaggaatatgaatctagcaaaattcttggtagacctgagatcatacccttggaagggccatctagggaactccgggcagtggaccaggtgagaccgcagggttgccttccagagctattcttgcttgtttttattttcaaatgggaatttgatttaggaccggcctttggttttccccagacctgggaagtaaacatttctcattctcaaaacccacaaattaatcatttttgcaaatcagagctgagctctgagcctctgaccaggaggcctgagcctgctggccttgggagccaggatttgcc

SEQ ID NO: 732210 - DNA, 564 bp, Homo sapiens
aaccagtaagttgtggacactttactggttattgcagtgtatcagaaataatgctggccaaagcactggatgagaatctgaaggactcctcccgctcatggggccaggcattaacgttttattggctgggtcatggagatggccagtggcaaggtcagggttgtcatgtttttctgactgggatatcaagattttattggctcatgaactgggcagctactgtggcacatagcagcttgacagccaactttcgtactcgtaggaatatgaatctagcaaaattcttggtagacctgagatcatacccttggaagggccatctagggaactcygggcagtggaccaggtgagaccgcagggttgccttccagagctattcttgcttgtttttattttcaaatgggaatttgatttaggaccggcctttggttttccccagacctgggaagtaaacatttctcattctcaaaacccacaaattaatcatttttgcaaatcagagctgagctctgagcctctgaccaggaggcctgagcctgctggccttgggagccaggatttgcc

SEQ ID NO: 732211 - DNA, 638 bp, Homo sapiens
gctattcttgcttgtttttattttcaaatgggaatttgatttaggaccggcctttggttttccccagacctgggaagtaaacatttctcattctcaaaacccacaaattaatcatttttgcaaatcagagctgagctctgagcctctgaccaggaggcctgagcctgctggccttgggagcyaggatttgccagcgtgcgctgctaatccatatgcatttgttcttcttgtgggagttcgggcccctcaggcttcaaggggtgaagctctgctcactaatcataatgcaatatcagtgttttctgcaaatccccttattatctctgcatcattagcagtttctgagcttgtctacaactaatttcacagtgaatcttatttctacctgatattttaaataagctgtcacgcagggcagcagctgacatgccgctgagaaagaagcaaatcagcctaaagtaggctttcaagcagcctccaacaattaggctttgggccatcgtacaaggtgggaaaatggggcaagtgtctagagcaaaccctgccccctaccccagtttaaataagtcatgtcttagtagataggtaagtggtctccagagctaggtttccagggggctcatttctgctcagctcct

SEQ ID NO: 732212 - DNA, 598 bp, Homo sapiens
gcaaatcagagctgagctctgagcctctgaccaggaggcctgagcctgctggccttgggagccaggatttgccagcgtgcgctgctaatccatatgcatttgttcttcttgtgggagttcgggcccctcaggcttcaaggggtgaagctctgctcactaatcataatgcaatatcagtgttttctgcaaatccccttattatctctgcatcattagcagtttctgagcttgtctacaactaatttcacagtgaatcttatttctaccygatattttaaataagctgtcacgcagggcagcagctgacatgccgctgagaaagaagcaaatcagcctaaagtaggctttcaagcagcctccaacaattaggctttgggccatcgtacaaggtgggaaaatggggcaagtgtctagagcaaaccctgccccctaccccagtttaaataagtcatgtcttagtagataggtaagtggtctccagagctaggtttccagggggctcatttctgctcagctccttcccacaggtgacccatagcgagtgaattgatgtctctgaacttcagacagtaaaggaataaaacctcctcatagggtt

SEQ ID NO: 732213 - DNA, 536 bp, Homo sapiens
ttctgcaaatccccttattatctctgcatcattagcagtttctgagcttgtctacaactaatttcacagtgaatcttatttctacctgatattttaaataagctgtcacgcagggcagcagctgacatgccgctgagaaagaagcaaatcagcctaaagtaggctttcaagcagcctccaacaattaggctttgggscatcgtacaaggtgggaaaatggggcaagtgtctagagcaaaccctgccccctaccccagtttaaataagtcatgtcttagtagataggtaagtggtctccagagctaggtttccagggggctcatttctgctcagctccttcccacaggtgacccatagcgagtgaattgatgtctctgaacttcagacagtaaaggaataaaacctcctcatagggttgttgtgggcttagcaagctaatgtctataatgtgcttagtgtgatgcacctagactattgaacacctagtgtatcctcaataaatctagttttaattgctgttcatatgtttatgaatt

SEQ ID NO: 732214 - DNA, 635 bp, Homo sapiens
acctctaaaagcctcagcagccagcctctaggcagatgctagcattatggttgccacggtaggcatgaaaaaaaatgacatcagaagcaggagggtgaggaacttgcctaaagttacatggcacatgggcaggtgagccccgcttttgaccttagactgcctctttgtaaaaatgatgtggcttcttggctgtccttgatyatcgtttttttagggtgtggctgccccctgctcactccctctgggcacccaggaaggtggctaaaccttaggcattatcatttccttcttgatgcttcattgtgggtggacttggccccatgttctccaaggaagacaaggtttcctgatacataaagtagagcttctctgctgagaggtatggagattctgagcatctgacttcacacacccagcctaggaaaatccagatgtgtaccccacattgattagggtggtgaatgcttcatgattttttattgtcagaaccgcagagtcatagcaaggtatttttaggtacagagtcttcctgcagcatttaaattatgatttgatgtaggaacttcagctttccccagagcctggatctacttagatgcacaggatcgtgccctttattttatttattgattctt

SEQ ID NO: 732215 - DNA, 594 bp, Homo sapiens
tgagtcctaagctttgctgtgctggggctgggagtgctaattcaatggcatactcattctgcacctgctcacttcagcctggccgtcttcctcctgagattgggaaaagaaaggaaacttaaaaggcctcctgtctttcctcactatatatctctttgtgacacaaagttgaatctactttcccaactttaattattttcccaacttatttattacaaacattccacagaacatggaaggaaaatataacaatgagtaatatgacatacgctatatacttaccatccagggtcartgacagtgaacattttgtcacctctgctttacctacatttgtgtatattaaaagaggtatctgcatgtttacatgtgtgtggtgtgtatataagccacagtaagttgtatgtatccactgtagaaaccttagcctgcatctcctcaggataagaacaaaattaataactccttcatattacctagtctccagtagatatccagattttcccagttgtctcacaaatgtctttatctattaagtttttaagatttaaaaatacttaattgacaaaacttgtatatgtttaaggtatacgg

SEQ ID NO: 732216 - DNA, 594 bp, Homo sapiens
tgagtcctaagctttgctgtgctggggctgggagtgctaattcaatggcatactcattctgcacctgctcacttcagcctggccgtcttcctcctgagattgggaaaagaaaggaaacttaaaaggcctcctgtctttcctcactatatatctctttgtgacacaaagttgaatctactttcccaactttaattattttcccaacttatttattacaaacattccacagaacatggaaggaaaatataacaatgagtaatatgacatacgctatatacttaccatccagggtcagtgacagtgaacattttgtcacctctgctttacctacatttgtgtatattaaaagaggtatctgcatgtttacatgtgtgtggtgtgtatataagccacagtaagttgtaygtatccactgtagaaaccttagcctgcatctcctcaggataagaacaaaattaataactccttcatattacctagtctccagtagatatccagattttcccagttgtctcacaaatgtctttatctattaagtttttaagatttaaaaatacttaattgacaaaacttgtatatgtttaaggtatacgg

SEQ ID NO: 732217 - DNA, 673 bp, Homo sapiens
tgaggcaggaggatcccttgaggtcaggagttcaaggctgcagtgaactatgatcgtgccactgcactccagcctgggtgacagagcaagaccctgtctcaggaaaaaaataaaaataaaaaaataaaaaaagggcttccattaccacgtgctcaccatgccctggtatcctgctaagtgctttacatgggcctacgacatgcrgtccctagaagcacaatgaggtgtgccctactgtccacctgtccacctggcaggagcaggaacagctccagtatctcccaggcgtggctcccacgcctccagagtccagagtctgcccagctccagagtcccacagcctcccaggtgggcatttcccacctccccgagtccccctggcatcttggggccctggaccccagggtatcttgactggccccatctactatcttctctaagtgggagaatatgagtgatgtgctcacctctttaagccttggtttcctcatctgtaaaatggagcttcaatagaaccacccccgttgtggttgttaccaggattcaaagagatagggcatgtaaggctccccgcacagggtctggctcacagtaggcaataattacaccagtcctctattgttgccgtccttatgcagccccagggaacttggagagcccttggctgaggcat

SEQ ID NO: 732218 - DNA, 566 bp, Homo sapiens
taaggattaaatgagctgatatagaacaaacatgttgcacagtatcttgtcacatagtaagtgttccataaatgttcattcttgttttatgattattaaatctcgtagactcactccccttatctgtgggttggcttggctaatttcttttgctttatatttatgaaatgcttatagaatgcttactatgtctcaaggactgttctaagtgctatacaaatattaatttatttaattttcataaccacacaaagtaggttatccccattttacagatgaggaaactgaggagaaggttaagtaygttgcccaaaataactaccaagtggcagagctgagattcaaacccaagcaatctgactctggagtcctgctctgcacggccatacgctgcctcccaggaggagggtggggggacgctccctaccttttgcccaggtgtcacccactaccttcctgtctgcatgctgctgccacctggtcctcagttcttctccctggagggcatcccagagttctcaaccagctaggattgtcaactttaacaaacaaaaaatacaaaatgc

SEQ ID NO: 732219 - DNA, 638 bp, Homo sapiens
tgtggctttcagaaactctgaaactgccaaaagcatcaatgccttaaggcagaactctcaggcccagagagaaagagagagtgcagtgtggggtagagcttgagagacagagacgcttggtataaacgttctataacttatatgaatatcactggctgccctgaaccaccactsaagctcctggagctctagcacctgtcaggggaaattccccaccagagctcagcaggacccaggctcccggcttcctgactcctgtttaatagtgagggctcaggtctgaggactcagagcacactctccaggctttcaaggttgtattgcattgttccccccacacccctcctttctgattgaccagtccctcatttctagtcacggctgatggagtcctcagtgttctccactcctgaggtcagaagccaggacttcttgatcttggaatctgtagggctatgtgcatggcagggccacaggaagatgctgagtataggcttcttgttcctgcagaggctcacctacagctggttttctgtgctgtgacccacagtcagccacaggcacaatgcacgtgtcttaacctcaggtcaacactcaatggatatttcgtgtttctagcctctggcagatccaatcag

SEQ ID NO: 732220 - DNA, 591 bp, Homo sapiens
caagggagagcagaaaatctgatgcagaccattttgctgtttgcgctaggaaaacagaagacacaaagctagtcaaatgaatcaattctgagacagacaacagagtgagaccctgggctgggttattttagagacacaactttttccttggagcttttagcagaagagatttgaagattttcttgaatgactttgtctctctgggggcacttagagaaagcattcaacttccagaaccttctgcaaagtagcctttgtgtctgaaggagggtgccttgccaatggctgggcttagtgatgccttcagggacctagtgtatggatctgtggatccaactcatcatgayaacatgtgaggagggaaaatgcttccataagtagaacctgctatcagtgactgtactctggccctctgcttctatgtgcctcctaaacaaatatattttctctataaatatcattcactgtaccagctttgtgttcaggacacattttcctgaacccattcccatcttcctctgtacccttgccaccaaatcactatattcatgaaaagaagaatccagtggggaaaaaaaagatttttttttt

SEQ ID NO: 732221 - DNA, 505 bp, Homo sapiens
caagtatatatggttgtgaattcactaccacaataaaatatagagcatttacatctcccaagaagactctctcatgcttctttgcaatgaatactctcccattcccaattcttggcaacaccaatctgtttatagtaactcaaattttgattcttatagaatttgagataaatagtattatacagtatctagtcttctgtgtctagattgtttcatttagcgaaataattttgagattcatctgtgctgtttgatgtttccattgctcattctttctattactgagtttcatttcactgtrtgaatgcagaagggtttatttattcactggttgatggacacttgggtactctccagtttggggctactataaataaaacttacatggccattcatatgcctgtttttgtgtaaacatgtgttttcatttctcttggataaatacctcagaatgacatgcataggtcataaagtaagtatatatttaaatttataaaagaaaatt

SEQ ID NO: 732222 - DNA, 495 bp, Homo sapiens
atggctcaagttctcctcccacctcagtctcctgagtagctaagacctcaggcatgtgccaccatgcctggctaattttatgtatgtatgtatttatttatgtatgcatttacttctttgtttgtttgttattgtagagataggctctagctaagttgcccaggctggtcttgaactcctggcctcaagtcatcctcctgccttggcctcccaaaacgttgggattacaggcatgagccaccacacagagcccctaaaagtgtattttaaatgtttactgatacccattatttacaatttasacaccaaattttcaaacttcttaataatttgcatgcacatacaaattcctattaatattggccaagaaaaactgcttaagcctgtatttcaatttgccaattacaaaatatttcttcactgaaacaagatctaccacaaaagtcacacttagaaaaacaataaaattaagtttcaaagtgtatttttgaatcc

SEQ ID NO: 732223 - DNA, 628 bp, Homo sapiens
ctttgaattatttctctttctcttgcttgattgctctgtccgagacttccaatattatgctgaataggtgtggagagagagggcatacctattttgtgctggtttccaagggaatgtttctagctttcatacattcagcatgatgttgactgtggatttgtcatagatggctcttaytattttgaagatttttccttcaatatctagttttttgaaggtttttaacatgaaaggatgttgaattttatcaacagctttttctgcatcaattgagataattatgtggcttttgtttttagttctgtttgtgtgatgaatcacatttattgatttgcatatgttgaaccaaacttgcattacaggaataaaccctacttacttcatcatggtggattagctttttgaggtgttgctggatttagtttgtcagtatttttctttttgataatttttgcctctgtgttcatcaataatatttgcctgaagttttctttttttcttgtgtctctgccaggttttggtgtcaggatgaggctggcctcatagaatgagttgaagagaagtctatgctcaatttttataatattttcagtagttatggcactagcttttctttatacatctggta

SEQ ID NO: 732224 - DNA, 644 bp, Homo sapiens
tttcattttgaacttggagaatctgattattatgtgtattgggaatggtctattttgtgtattatttcacaggggtgttctgcatttactgaatttaaatgttggcctctccagtgaggtcaaggaagttttcatggatgatatcctgaaacttgtcttccaggttgtttgctttctccctgtctgttttayggatgccagtgagtcatagatttggtctctttacacaatcccatatttccaggggatttttgtttgttctttttaattcatttttatttatttttgtctgactagattaattcaggagccagttttcaagctctgagattcttttctcagcttgttctattttgctgttaatatttgtgatttgcattatgcaattcttgtagtatgaatttcaactttatcagctcattttgtcttttttataatgattatttcatctatcagctcctgtgttgttttactgtgttttagcttccttgaattgtgtttcaatgttctcatgaatctcgatgatcttcatcgctatccatattctgaattctatttctgttatttcatcctggttaagaaactttgctggggaactaatgtggttgtctggataaaataaggcactctggatatttgagttg

SEQ ID NO: 732225 - DNA, 585 bp, Homo sapiens
tttatatttacacaattactatttatgacatttttatttatttttaatataaaaagatgtaataaaagacagcaatgtcataaagttgaagtcaggtgtattatactttggggttttgttttgtttttgagaccgagtctcactctgtcacccaggctagagtgcagtggcacaatctcagctcacggcaacctctgcctcccggtagagggttcaagcgattctcgtgcctcagcctcctgagtagctgggattccaggtgcacaccaccacatctggctaatttttgtatttttagtagrgatggggtttcaccatgttgcccaggctggtcttgaactcctgggctcaagtgatccacccgctttggcttcccaaagtgccgcgactacagatgtgagccacggcgcctgggccactttttttttttttttttaacttttaagttcatgggtacatgtgcaggtttgttatgtaggtaaactcgtgtcacgggggtttgttgtacagattatttcgtcacccagtgacgaaatattaagtctagtactttttattcttcctgatcctctccctcctctcatc

SEQ ID NO: 732226 - DNA, 533 bp, Homo sapiens
gggcccagcgggcactgacacacctccactggccactcacagctcccggccattccttttgacaaccattgtggcaagagatgcagactcgggggcaaatggagagcccctctacagcatccgcagtggaaatgaagcccacctcttcatcctcaaccctcatacggggcagctgttcgtcaatgtcaccaatgccagcagcctcattgggagtgagtgggagctggagatagtagtagaggaccagggaagcccccccttacagacccgagccctgttgagggtcatgtttgtcaccagtgtggaccacctgagggactcagcccgcaagcctggggcyttgagcatgtcgatgctgacggtgatctgcctggctgtactgttgggcatcttcgggttgatcctggctttgttcatgtccatctgccggacagaaaagaaggacaacagggcctacaactgtcgggaggccgagtccacctaccgccagcagcccaagaggccccagaaacacattcagaaggcagacatcc

SEQ ID NO: 732227 - DNA, 533 bp, Homo sapiens
gggcccagcgggcactgacacacctccactggccactcacagctcccggccattccttttgacaaccattgtggcaagagatgcagactcgggggcaaatggagagcccctctacagcatccgcagtggaaatgaagcccacctcttcatcctcaaccctcatacggggcagctgttcgtcaatgtcaccaatgccagcagcctcattgggagtgagtgggagctggagatagtagtagaggaccagggaagcccccccttacagacccgagccctgttgagggtcatgtttgtcaccagtgtggaccacctgagggactcagcccgcaagcctggggccttgagcatgtcgatgctgacggtgatctgcctggctgtactgytgggcatcttcgggttgatcctggctttgttcatgtccatctgccggacagaaaagaaggacaacagggcctacaactgtcgggaggccgagtccacctaccgccagcagcccaagaggccccagaaacacattcagaaggcagacatcc

SEQ ID NO: 732228 - DNA, 655 bp, Homo sapiens
taggagggcagacaccattgcctttggtctacaactgaggaaacaatatagggagtcaggtcacagcttcaaggtgacatggccaggcaagtggcagagccagacctgggtcttcacacactttcctcttcttgactgtactggcgcaggtgcttaagatttgggggaaggtgggtgggtatctggcctcttctttgggactcaaattgtgatatctctctgagaacccacaggctccctctttagggctgaggtgagaagttctgaaagtcaagcagacacatccaggcatttgggcaagaaacttcttccttccaaatcaaaggtgaaatgaaaacgattatgagcccacgggggatgaacagaggtgaatggtgggctagtctcgaggatggcctaattcagagtttcctaagtgtcagccattmatggaaccacccctgtgatttttgctacctctctggatctgtgcccacttttacgttatgtttttctttaaactgattcactatttttttttacagttagctttatcctagacagaacatctatcaaactacaggtcaatatgctaatcatatttttatattatacattaaatatataactaaatagaaaatattaatttgaataccatctaaaatcttcttgtgaa

SEQ ID NO: 732229 - DNA, 415 bp, Homo sapiens
aatcctcccgccacagcctcccaagcacctgggatcacaggtgcatgctaccatgcccagctaatattttttagagatgggattcccaatgcttcttggccttttggataagatcaagtgtacagatggggtttccccatgtcacccaggctagtctcgaactcctaagctcaagcaatccgcctgcgttggcctcccaaagttctgggattataggcaygagccaccgctcccagccttgagactatttttttaatggagaggtcatttttgttgttttcctacatgagaccatattctgtgtactctacaacttgcttttttcatttaacattttgttttagacataatcccacttaaagtatatagatctatttcattctctacaatgatcacattactattttattgtatg

SEQ ID NO: 732230 - DNA, 511 bp, Homo sapiens
gaaaaaaatgtatgcctgcattatatttaatgctaacaattctgaagacgtttctgattttcttttacgaacaatttaaaaactaatcttatttcttgaaaatttacccaagttggcgaggcgtggtggctcacgcctgtaatcccagcactttgggaggctgaagcgggcagatcgcgaggtcargagttcaagaccagcctggccaacatagtgaaaccatgtctctactacaaatacaaaaaattagctgggcttggtagcaggcacctataattccagctacttgggaggctgaggcaggagagtcgcttgaacccgggaggcagaggttgcagtgagctgagatagtgccattgcactccagcctaggcagcaagagtgaaactctgtcaaaaaaaaaaaaaaagaaagaaaggaaaaaagaaagaaagaaagaaagagaaagagagagaggaaggaaggaaggaaggaaggaaggaaggaaggaaggaaggaaggaaggaagaaa

SEQ ID NO: 732231 - DNA, 511 bp, Homo sapiens
gaaaaaaatgtatgcctgcattatatttaatgctaacaattctgaagacgtttctgattttcttttacgaacaatttaaaaactaatcttatttcttgaaaatttacccaagttggcgaggcgtggtggctcacgcctgtaatcccagcactttgggaggctgaagcgggcagatcgcgaggtcaagagttcaagaccagcctggccaacatagtgaaaccatgtctctactacaaatacaaaaaattagctgggcttggtrgcaggcacctataattccagctacttgggaggctgaggcaggagagtcgcttgaacccgggaggcagaggttgcagtgagctgagatagtgccattgcactccagcctaggcagcaagagtgaaactctgtcaaaaaaaaaaaaaaagaaagaaaggaaaaaagaaagaaagaaagaaagagaaagagagagaggaaggaaggaaggaaggaaggaaggaaggaaggaaggaaggaaggaaggaagaaa

SEQ ID NO: 732232 - DNA, 511 bp, Homo sapiens
gcttccagacttggggtgcaaggggtgttcatgggtgtggccactcttgcagggagtaccccacttggctgctacaagaagctgattgaatactataagaatggggacctgtcctttaaatatgtgaagaccttcaacatggatgagtacgtgggtgagtctttctctttcaaggttctttcctgattctaggagagtgatgctcctcctctcattggcccagtcctggagaggaatcggggagccagtgacatttgatgataggctcaattatcaatacttacctcttggtttactcagctataaaatggggctaataaagctgacctcacaggttgtaagcattaaattcatttaatscttttatgataaaagatgtggaagtttcttatacataacaaatacttaataaatattagagtatctccttctcctctgcctgctcctcaactccattccatttctttctggaacaaatgattgcaagtgggatcctggctcgggtgtttcc

SEQ ID NO: 732233 - DNA, 612 bp, Homo sapiens
ggcagacatcaatcaataaatgtaagctgtacattggttcagcctggaaaggcaggacaattgaagcttccaggtcataggtggattcaaaggttttctgattggcaattggttgaaggacttaagttattatctaaagatctggaatcaatacaagggaatgtctgggttaagataaggggttgtgaagaccaaggtttttattatgcagataaaacttcagggagtaggcttcagagtcaataggttgtaagtgtttcttatcagacttaaaaaggcgccagactcttagttaattctctcctggatcaragtaaagacctggaaagggaaagggattctctacagaatgcagatatcccccacaagagacagctttgcaggaccactgcaaaatatgtcaaagaaatatattttgaggtaaaacacttccatttctttcagagcctgctatctgtcatgtgatgctacactagagtaaggttggaatttggtgtcctattgctacaaggagtctgttttttcattcttcagatctctgtcttcatggtaacgctggtctgttgtgcctgaactccaaagggaggagggtaaaatgaggcacgcccaacc

SEQ ID NO: 732234 - DNA, 671 bp, Homo sapiens
gtcttcgttttctgtcttccggcagcctcagtttcccccccatgaagtgatggtgtgtgtgtgtgtgtgtgtgtgtgtgtgtgtgtgtgtgtgtgtgtcgggccccgtgtggtgccctctgtgcgcagcgagagctataactcaaggtgtgcacggggagagtgaagcgaccacgcacctgcttccaatcgggctcgggcgcgaacactcaggctgattcctgaaggtcgtkttctgaaggaaaagacagagcatgcactagccacgggtgacattcccacccgtacaaccgcgtggtgggcgcgtacatccaacattgacccatgcaggcgcccgcccactgcgcacaccggtcgcagggcacttcgttgttgaacgttgggagcagcgtttgaaggccggatctctcctggcagtgcggattcgggaccggcggaagcagtatggcctctgcgaccgttatccctacttttcggggccgaccccagggccctcacaactcctcatcaccgcatatgtgagcgccgcccccacagggttttctccacgacctcgttcttggctaggtcgcacctctcttagtacctcctctctggccagaacgaatctttgactccgagctgcgcagtctacgcagacggggcaggatccactgcagttttccacaggca

SEQ ID NO: 732235 - DNA, 671 bp, Homo sapiens
gtcttcgttttctgtcttccggcagcctcagtttcccccccatgaagtgatggtgtgtgtgtgtgtgtgtgtgtgtgtgtgtgtgtgtgtgtgtgtgtcgggccccgtgtggtgccctctgtgcgcagcgagagctataactcaaggtgtgcacggggagagtgaagcgaccacgcacctgcttccaatcgggctcgggcgcgaacactcaggctgattcctgaaggtcgttttctgaaggaaaagacagagcatgcactagccacgggtgacattcccacccgtacaaccgcgtggtgggcgcgtacatccmacattgacccatgcaggcgcccgcccactgcgcacaccggtcgcagggcacttcgttgttgaacgttgggagcagcgtttgaaggccggatctctcctggcagtgcggattcgggaccggcggaagcagtatggcctctgcgaccgttatccctacttttcggggccgaccccagggccctcacaactcctcatcaccgcatatgtgagcgccgcccccacagggttttctccacgacctcgttcttggctaggtcgcacctctcttagtacctcctctctggccagaacgaatctttgactccgagctgcgcagtctacgcagacggggcaggatccactgcagttttccacaggca

SEQ ID NO: 732236 - DNA, 586 bp, Homo sapiens
ttactcagctttaaataagaaagagattctgccagagcagcaggtaacttttggaggtgatggataggtatatacgtatctccatactcatcacagtgtagacattaaatgtgtatagcagtagggcgcagtggctcatgcctgtaatcccagcactttgggaggccgtggcgggyggatcacgaggtcaggagatggaggccatcttggccaacatggtgaaaccccatctctactaaaaatacaaaaattagatgggtgtggtggtgcgcgcctgtagtcccagctacttgggaggctgaggcaggagaattgcttgaacccaagaggcagaggttgcagtgagccgagatcgcaccattgcactccaacctggtgacatggtgacagagcaagactccgtctcaaaaaaaaaaaaagtgtatagctttttgtatgtcaatcatatctcaataaagttttttgggtttttttgtttttttttaaagaattccatttggaagaaattggtgttaattcatgaaggcagtgaaggaggcaataatctttagagaactgtgataagctgtgatcactattacttcaa

SEQ ID NO: 732237 - DNA, 586 bp, Homo sapiens
ttactcagctttaaataagaaagagattctgccagagcagcaggtaacttttggaggtgatggataggtatatacgtatctccatactcatcacagtgtagacattaaatgtgtatagcagtagggcgcagtggctcatgcctgtaatcccagcactttgggaggccgtggcgggcggatcacgaggtcaggagatggaggccatcttggccaacatggtgaaaccccatctctactaaaaatacaaaaattagatgggtgtggtggtgcgcgcctgtagtcccagctacttgggaggctgaggcaggagaattgcttgaacccaagaggcagaggttgcagtgagccgagatcgcaccattgcactccaacctggtgacrtggtgacagagcaagactccgtctcaaaaaaaaaaaaagtgtatagctttttgtatgtcaatcatatctcaataaagttttttgggtttttttgtttttttttaaagaattccatttggaagaaattggtgttaattcatgaaggcagtgaaggaggcaataatctttagagaactgtgataagctgtgatcactattacttcaa

SEQ ID NO: 732238 - DNA, 366 bp, Homo sapiens
ctgaaacgtccctatttgtcaaaggaaggagttgagctagtacttttctcttcgtcctaaagattaatgatcttgacatgcatcctaggttttctatgctagttgatatctataacgatatcacttgtcctgacctagaaaacacttttgaaggacattttgtagattgttgacctaacagactccctagggagttcctggaagggtgagggcccctytaaaggattgctggtcaacttccctttgcagcagaaaaagcctgggaacaagagagttttgccaaacttggtatggcccagagagagagagagacagagagactatcctccctagccttcctttagtattaagctgcaaagcccccaa

SEQ ID NO: 732239 - DNA, 643 bp, Homo sapiens
cgtggggagaagcgaattggtttttgccctctgtctgattctcgctctaacctgctgcaatgggaattgcttcttcacctccaggaaagcctcaacaaaaatactcctgagggggagacaagagtcctccccggcaaatttcaacccagcagagtcctggcagcctcttcggctccctaccttgaggccccgggggctcaggcttcctggccctaatcttcacctggcctggatccagaaatgtctctggttcgcatagagaggtacccaactggtctcgggactcacctttcactgagcagggggcatgaacaagacayagcttagtggagtgtttacctcaggggtcacactcagcctggtctggccttaactgggtgtggtcctgtccctgccaccatgtaccaccatccagtggggtgcaggtacaggccaggctgtgtgatcaccagctaggcaaggctccagctgcgacaaggactccatcttcacgcctgtcctggctcctggggagtagactccagaacatactatcaaagatcgacgaatgagatccaaacggtcattacttgcactgtctttggggggtcctaggagaaactacctcattcttaacagctcataaaactcttaattttagctc

SEQ ID NO: 732240 - DNA, 643 bp, Homo sapiens
cgtggggagaagcgaattggtttttgccctctgtctgattctcgctctaacctgctgcaatgggaattgcttcttcacctccaggaaagcctcaacaaaaatactcctgagggggagacaagagtcctccccggcaaatttcaacccagcagagtcctggcagcctcttcggctccctaccttgaggccccgggggctcaggcttcctggccctaatcttcacctggcctggatccagaaatgtctctggttcgcatagagaggtacccaactggtctcgggactcacctttcactgagcagggggcatgaacaagacacagcttagtggagtgtttacctcaggggtcacactcagcctggtctggccttaactgggtgtggtcctgtccctgccaccatgtaccaccatccagtggggtgcaggtacaggccaggctgtgtgatcaccagctaggcaaggctccagctgcgacaaggactccatcttcacrcctgtcctggctcctggggagtagactccagaacatactatcaaagatcgacgaatgagatccaaacggtcattacttgcactgtctttggggggtcctaggagaaactacctcattcttaacagctcataaaactcttaattttagctc

SEQ ID NO: 732241 - DNA, 586 bp, Homo sapiens
cagaaaactaaacaccgcatgttctcactcataagtgggagatgaacaatgggaccatatggacaccggtgggggaacatcacacaccaggacctatcggggcgtgggggataagaggagggagagcattaggacaaatacctactgcacgcagggcttaaaatctagatgacaggttgataggtgcaacaaaccaccatggcacatgtgtacctatgtaacaaacctgcacgttctccacatgtatcccagaacttaaagtaaaataaaaaataaaaaaagatgattygcctttgatccctcgcctctgcccccgaatcaggtgggctgcatttacccagtacctgggccgactgccccagggctgcagaattgaaaccctccactgggtggcaccagatcaccacctcctgtgcccacccatccaggtctccaagggctgagtgaaggagcggggcaggcaccctcaggaactgtggggcacccactatcagtcctccccatgacatagtatggtggggacacgttactggtgtccgtggaaagtccctttccccatcccccgacacccaccccccaaaattct

SEQ ID NO: 732242 - DNA, 619 bp, Homo sapiens
aactaataaatctaatgattacaatttatatttttaaaaacataagaaaagcaggtttgtgcctaagaccttgagtgtcaagaaagtttagagaggataactcattaaagtgtacagcgaatcataaaattcaatttgaattgaaccttccattttggcccaacctatccatgtaaaaaccagcaaaacaaatcattctaagtcacaagctgctgtatgtgttttagaacagatactatttactatattacccctaaataaaccaaggtctaagtaaatggtttctagcttttctctagttaagctaagttctttyttaaaaggaaactcgttctaattcatatttttcttctcgaagagggagcttatatttttctgtttctgcactttgaacatgagtattgtgggaaagtattaggggattagcaggagataaacgtggtttttgtcttcaccactaagtggatcaaattagtgggtatatggccatgattttattctgccacactatgacctgtgagacaaggtggaaaaagtagattctagaggcactgatggatacaggctaagctgggtaacaaggataccccaaaatgtaatgtctttgatcaaattgaag

SEQ ID NO: 732243 - DNA, 619 bp, Homo sapiens
aactaataaatctaatgattacaatttatatttttaaaaacataagaaaagcaggtttgtgcctaagaccttgagtgtcaagaaagtttagagaggataactcattaaagtgtacagcgaatcataaaattcaatttgaattgaaccttccattttggcccaacctatccatgtaaaaaccagcaaaacaaatcattctaagtcacaagctgctgtatgtgttttagaacagatactatttactatattacccctaaataaaccaaggtctaagtaaatggtttctagcttttctctagttaagctaagttctttcttaaaaggaaactcgttytaattcatatttttcttctcgaagagggagcttatatttttctgtttctgcactttgaacatgagtattgtgggaaagtattaggggattagcaggagataaacgtggtttttgtcttcaccactaagtggatcaaattagtgggtatatggccatgattttattctgccacactatgacctgtgagacaaggtggaaaaagtagattctagaggcactgatggatacaggctaagctgggtaacaaggataccccaaaatgtaatgtctttgatcaaattgaag

SEQ ID NO: 732244 - DNA, 628 bp, Homo sapiens
ttctgatcagaaactatgtacactttacccagtttctcccagtgtcaacattttgcaaaactatggtacaatatcttaagatatcgaatcattccattactgtaagtgtccctttcatacccacattcacctccctctcacccctgcctcctgtcacgtgttaccactgattcgttrtctgtatctaaaatgttgtcattcctaaaatgttatatacatagaatcacatagtaggcagtcttttaggatgggctttttttcacttagcataattccctgaagattcccccaagttgtgtgtatcaatatttcactccctttcattgctgaatagtgtcccatggtatgaatatacacagttgcactgttcacttgttgaaggacatgtgggttgtttgggggtactgtgagtgaagttgctgtaaacattggtgtacagggtgttgtgtgaatataaagttgtaatttctttaggacagatgccgaagcgtacaactgccggatcgtgtggtaattggatgtttagtttatgtgtcactgatacactgtttcctagagtggctaagcggttttacattcctagtggcattgtatgaacaatccagtttatttgcatcctcaccagctt

SEQ ID NO: 732245 - DNA, 628 bp, Homo sapiens
ttctgatcagaaactatgtacactttacccagtttctcccagtgtcaacattttgcaaaactatggtacaatatcttaagatatcgaatcattccattactgtaagtgtccctttcatacccacattcacctccctctcacccctgcctcctgtcacgtgttaccactgattcgttgtstgtatctaaaatgttgtcattcctaaaatgttatatacatagaatcacatagtaggcagtcttttaggatgggctttttttcacttagcataattccctgaagattcccccaagttgtgtgtatcaatatttcactccctttcattgctgaatagtgtcccatggtatgaatatacacagttgcactgttcacttgttgaaggacatgtgggttgtttgggggtactgtgagtgaagttgctgtaaacattggtgtacagggtgttgtgtgaatataaagttgtaatttctttaggacagatgccgaagcgtacaactgccggatcgtgtggtaattggatgtttagtttatgtgtcactgatacactgtttcctagagtggctaagcggttttacattcctagtggcattgtatgaacaatccagtttatttgcatcctcaccagctt

SEQ ID NO: 732246 - DNA, 628 bp, Homo sapiens
ttctgatcagaaactatgtacactttacccagtttctcccagtgtcaacattttgcaaaactatggtacaatatcttaagatatcgaatcattccattactgtaagtgtccctttcatacccacattcacctccctctcacccctgcctcctgtcacgtgttaccactgattcgttgtctgtatctaaaatgttgtcattcctaaaatgttatatacatagaatcacatagtaggcagtcttttaggatgggctttttttcacttagcataattccctgaagattcccccaagttgtgtgtatcaatatttcactccctttcattgctgaatagtgtcccatggtatgaatatacacagttgcactgttcacttgttgaaggacatgtgggttgtttgggggtactgtgagtgaagttgctgtaaacattggtgtacagggtgttrtgtgaatataaagttgtaatttctttaggacagatgccgaagcgtacaactgccggatcgtgtggtaattggatgtttagtttatgtgtcactgatacactgtttcctagagtggctaagcggttttacattcctagtggcattgtatgaacaatccagtttatttgcatcctcaccagctt

SEQ ID NO: 732247 - DNA, 615 bp, Homo sapiens
tgcaaagctagcctctgctattccctaggcctggggccttggccaagttctttaacatctcttgggttcagcatctttgtctgcaaaacagctaagccagggtctcaatctcaaatgcctcaggaaccacacaagtggtcaaatgagtgaggagggtctgtgccccccaacygaggcctcttgtcaaaggccttcaagagagcaggcctaggtggccagatgttttgatttattaagagagtccacaaatctggcttttctatgaagtctcctgactttgaaatgctaattttagaaatattcagcaggccaaactttgggtttattgagagtttattgagaggactagaaggcaatgcatacaaggtcatgttgcacggtgattaagaatatgtactctaggataaatagctaatgcatgtggggcttaataccaaggtgatgggttgataggtgcagcaaaccaccatagcacacgtttgcctgtgtaacaaacctgcacgtcttacacatgtatcctgaaacttaagataaaataaaattttttttaaagaaaataaaaaagaatacctgctctacagcctgactacctggctttgcctgcaggctctgctg

SEQ ID NO: 732248 - DNA, 474 bp, Homo sapiens
gcacagaaatgtaaattatgtgactataatttacaggtattttacttcttggagcatctatatcccaccagtaaccactgcaaatgcatactcttctttgtaaggttgcatatttcatcctaaatggcttaaatatctttacttatccatttgtaataaaaagactaggacttaaagttaagtgcatttgaaagaaatcgattgtcaatactctgtgctgctaatagagggaacattttcgcccctgaggtgttagtacattaaggcaaagctatgtatgttctgatkataaattcattaactatttacacctcattgactcgcaactttttttgcctcttgataagtctcatttttaaccttcatggttgactttagatggagctatttaaaacagcctttgtttttacaaaatgatttctagtggaactttagaaaatttacagagtgttttttttttattggcctttggat

SEQ ID NO: 732249 - DNA, 587 bp, Homo sapiens
gagagcaaaagaaaaaaaagggagagaggccgggcgaggtggctcatgcctgtaatcccagcactttgggaggcccaggcgggcggatcacgaggtcaggagattgagaccatcctggctaacatggtgaaagcccacctctactaaaaatacaaaaaaatagcgggcatggtggcaggcgcctgtagtcccagctactcaggaggctgaggcaggagaatggcatgaacctgggaggcggagcttgcagtgagccgagactgtgccactgcactccagcctrggcgacagagtgatactctgtctcaaaaacaaaacaaaacaaaaacaaaaaaaaagagagtctatgacaaagggttcaccagttggaacccacagcctttttatcacctactattgtgatgtgccatcacttttgctctatggtgttgagtagaagtaagttgctatgttgagtttacacccaaggggagggtgttacacaggggtagaacaccaggaggtggaaaccactgtggatattttagaggctgctcattccactactttttattgcccactccctttgtctcttctaggtatctaga

SEQ ID NO: 732250 - DNA, 587 bp, Homo sapiens
gagagcaaaagaaaaaaaagggagagaggccgggcgaggtggctcatgcctgtaatcccagcactttgggaggcccaggcgggcggatcacgaggtcaggagattgagaccatcctggctaacatggtgaaagcccacctctactaaaaatacaaaaaaatagcgggcatggtggcaggcgcctgtagtcccagctactcaggaggctgaggcaggagaatggcatgaacctgggaggcggagcttgcagtgagccgagactgtgccactgcactccagcctaggcgacagagtgatactctgtctcaaaaacaaaacaaaacaaaaacaaaaaaaaagagagtctatgacaaagggttcaccagttggaacccacagcctttttatcacctactattgkgatgtgccatcacttttgctctatggtgttgagtagaagtaagttgctatgttgagtttacacccaaggggagggtgttacacaggggtagaacaccaggaggtggaaaccactgtggatattttagaggctgctcattccactactttttattgcccactccctttgtctcttctaggtatctaga

SEQ ID NO: 732251 - DNA, 640 bp, Homo sapiens
aggagcttccatgacctttgtgggagcactaccctctagaagcctccacatgtgcagctatctagaagctccaaaaacattaaaaaaagttttaaattttaaaataatttaagacccaaaacatttttaaaaatagtatgagtttccatttgtccttccctcacagcttcctcaaaagttaacatcttatcctcaatgtaagaaattatcattgatacaattaactaacctgtagactttattcaaattttgccaattgttccactaatgtcctttttccggtctaggaatcggtcattaacttctccttaacttcttccaatctaggacaattttccagtctttctttagcttctatgaccttaacactttttaagagtgctggcaagctattggttaaatgtctcttaatttgggtttgtctgatatttccttatgactaaattttggtwgtacatttttggcaagaataatacagaaatgatgtgcagtcgtcatatcaggagatatgtcaggttaatgtttcatactggagatgttaactttggttatttgataaagagtttgtctccactgtaaagttactgtttgccgtctgtaattaataaatattataacaatatctttgtaattaacaagt

SEQ ID NO: 732252 - DNA, 561 bp, Homo sapiens
caaaagaaaacagaaaatgaggaacaaaggatttcaaaggaaaacagaaaatggggaacataggaatgaaaatggagggtatgaataaaattgcaatagagacaatcatgttataaataattacattacatataaatggaataaactctccaattaaaaagcaaacatattaacactggataaaatgcaagatttaatgctatgttgttttaaaaagatgctttttaartataaatacaggttgaaagtaaagaatgaaaaaatatatcatgcaaaccttaagcataagacatgtagactgactatattaatatcagacagagtaactagagactaaatgagacattttataataatgagcgtcagttcatcaagcagctatccattgtgcatgtaataacagagctttaaagtacatgagattaacaaatgatagaactgaaaataaataaaaaattcacaacaaacatgctggagaggatgtggagaaaaaggaacacttttacactgttagtgggagtataaactagttcaaccattgtggaagacagtgtggctact

SEQ ID NO: 732253 - DNA, 561 bp, Homo sapiens
caaaagaaaacagaaaatgaggaacaaaggatttcaaaggaaaacagaaaatggggaacataggaatgaaaatggagggtatgaataaaattgcaatagagacaatcatgttataaataattacattacatataaatggaataaactctccaattaaaaagcaaacatattaacactggataaaatgcaagatttaatgctatgttgttttaaaaagatgctttttaaatataaatacaggttgaaagtaaagaatgaaaaaatatatcatgcaaaccttaagcataagacatgtagactgactatattaatatcagacagagtaactrgagactaaatgagacattttataataatgagcgtcagttcatcaagcagctatccattgtgcatgtaataacagagctttaaagtacatgagattaacaaatgatagaactgaaaataaataaaaaattcacaacaaacatgctggagaggatgtggagaaaaaggaacacttttacactgttagtgggagtataaactagttcaaccattgtggaagacagtgtggctact

SEQ ID NO: 732254 - DNA, 528 bp, Homo sapiens
ttaacatctgttgcagtctgaatagggtgagaatttccccaaccatcaagtctgggttcctttttgcttcacagttcttctctcaatctaattcctctcattcttttccctctcacattttactataagcagcaagaaaaaaacaggctgtacatttaaccctttgcctgaaaatctcagtgaaatctcccaagttcattgcttaaaaattctttctacataactacaggacacaattcagctaatttttcttccaccatataaaaggattcccttttcttcagtttccaataatatttycctcatttctgcaccctcaccagcagagactttaacatccatatttctactcacaatctatttaaagtgatgtggtattctctaaggcaacatgtttctccaacatgctcctcacttcattctgagtccttactagcagatttgttaacaccatatttctgctaacactctgtccaaagcaagcgaggctttttctgtcatgcctgtcaaagttcttccagcctctgc

SEQ ID NO: 732255 - DNA, 624 bp, Homo sapiens
ctggtgtcgctcacgtccaccagatgcctggaaaggggtcctcgggcaccgagcagcgacccaatgaggcctccctgctcctcctgcacagccgcaccgccacgaacaggagcaccgagaagaggaagaacgacgacaccaaggccaacgccaccaccaggtagacggtgagcaagtcggcctgggcctgggccggggccgcttcagggaacggcaagtagggcagggagaagccatccaccaggagcacgtgcagcgtggcggtggccgagcgcggaggctcgccattgtccttgaccaggaccatcagcctgtgcttggctgtgtcacgctcgctcagcagcctgtcagtgcattgtgcgcccacacgccgaacagccctggctcmgtggccttgagcaactgctacgacagccaggcgttctggcccgagtcaccgtccaccgccaccaccttggtcaccaggtagcccggctcggcggcccgcccggggcatcagctcggtgcagggcgcggagccgttctgcagcgggaacagcacgaagagtgagctgtcgttggcgtccagcaccagcacgcgcaccagcgcctcgctgctcagcgccgtggagccgcggtctgaag

SEQ ID NO: 732256 - DNA, 611 bp, Homo sapiens
gaaaagaaagttaaatcttttttaaaaaatacatagcaagaagtgattaaaatgtaaaatggagtagcaagatttaacagcaaaaacatatcatttagaagtattgaggtaattctagaagaagccactcaatagaaggagactggaaattaaagaaaatattgttctgttcttttcttttctttctttctttttttttttttttttttttttttgagacggagtatcgctctgtcacccaggctggagtgcagtggcaagatcttggctcactgcaacctctgcctcctgggttcaagtgattctcctgtctcagcctcctgagtagctgggattataggcacgcaccaccacacccagctacttcttgtattttttagtgtagatggggtttcactgtgttggccaggctggtcttgaactcccaacctcaggtgacccrcccgcctcagccttccaaagtgctgagattacaggtgtgatctaacccacccagccaagccactgaggcaggccttgtttttctttcaacctttagttcatcttgatttttacatttgaaaataatgaaataaatttacaaaataaaaggaaaagtgaatatctttcca

SEQ ID NO: 732257 - DNA, 595 bp, Homo sapiens
gcatattctgaagcatgtaacaatatagataataaccactaatttaactaagaaactgtgacatctatattggagaataggagaaaaagaatttgcaatgtttgcatatgtttgttagtttggaaataaagctaaaatgcttttctattatagaaagaaatggttcaaatacaaaacaatatcaagatatagtattataaacatattatttataaatattgagatcaattcaagaagaaaccacactgtggtaagggactggcagaacagytaacttaaaaaactataaaatgttagttatatatagtatatattttatatatagtaatataaaaaaactgatgaaacttgtttttcattctaacctttagttcctcttgcttattaaaaatttggtatttaaaataaatttgcaacatataaatgaatatctccagcaatctcaaccacacatttcaaaatgttttatttttattcattttcaggcagattataattttatttcaattataaggcatagtctgttttatacatcagcaaaagttaacataagaaaatattggccaagtaaaagtagcatgcttaaagataaaat

SEQ ID NO: 732258 - DNA, 642 bp, Homo sapiens
gcacagtgtcaggcttgtggctgataataaatggtagccggtaatgttagcattagtattctcatgggcaacatgtctaaggggtcccttgagtgacccctactacactcaacatatatacataaactttaatggtgggatcctccaggcacaccacctaatttgcatgtgataaattttgtctaaaccaaaaaaggctgtaattcaaaatatatgctcttgagtgggattgctcatgtataggaagagctggacagctcctgtgggcctaagaggaagaactgattcttccctaggatgcaaaagccaggtgtgggggaacagcagaagtgctgggctgacaaaggctcggaagagacccaaagatgctgacaagaggggmaggttctggtcagttctttgtctccttgacaatgctgtggttggggccctgtccgggctgcctgccctgcccagcactcctttcctcctccctgagaaggaaatggaagaaaacaggacttctgctgtctggaagtctgcatggctggggttggcaagggccaatcaggcctgtaggctggcagtcaggacgccagtcagctggggatgaggagctagggatgaggctgacggggcaacttcccagagaccctacagctg

SEQ ID NO: 732259 - DNA, 563 bp, Homo sapiens
gaaaactgaagttcagagaagtcaagatgtcttgcccaaggcccatccagctagcaaatgatagggctggaggtacggttagtggtcagacatgtttgcttgtttttagagctatgcctcttagccaccagaccatcttgccttccttgtaggatggagcggaagtcaccattcctccctcccaggaagtggaaattgctgggaaagaaagctggagaaagttcagaccatttagttagcttttggtgagcaaycatggtgcactgggcccggcagggaacgcagagttggcggccaggccagccatccagctccccatctaagcagacagaccgaccccaggaagaggggtgggtgatgacagcggactggtggggtgccagcccatgcggtggtgatggctggtgttcgtcaccgggtggctcgagggtggacggtggtgggcccaggaatggggcatggtacacagagctgttctcggtggggctgcttggatggctgtacacgctggaggcttcaccactcggcgtgtgccgagcacagacatggctctttggcactca

SEQ ID NO: 732260 - DNA, 454 bp, Homo sapiens
ttgccgtgccctctgcctggaatgctcttctgtggcttctcccatggttggagcaagagccacactgtgatttgtgtgggtcctaggcacttgcctttgtgggtcccttccttcatgaaaatatatacaaattatattttagtactgcattggtataagcatggttatgttaaagaaactattttggcygggcgcggtggctcatgcctgtaatcctagcactttgggaggctgaggctggcagattacctgagctcaggagttcaagaccagcctgggcaacatggcaaaaccccgtctctactaaaaatacaaaaaattagctgggtgtggaggtgtgtgcctgtaatcttagctactcgggaagccaaggcacgagaattgctggaatctgggagatggaggttacagtgagccgagatcacgccattgcactccagcatgggtgacagaa

SEQ ID NO: 732261 - DNA, 606 bp, Homo sapiens
tcggggcaaggagtgtggacgccctttggctgcactgcagtgcctctaactgcagcttctccctctctctcagggttgctgaaagattattagataattttcaaatttgtaaagcgccttaagctccttggaggaaaggtggtatatgagtgtaataacaataacaatcctatctgtcagagccattgagaaaatgaatcttgttattctcaggaamcagccggaggaacttcagcaagaaacatgaaaataaagcacagagcacggcctcctgaccagtcagcagaggggaaagtccccaccaagtgtggagggagcattcgagccctgctccctgccagcccagtgctggtgcaaaggggctctcagaaagtcacccaaattgcctctgacacttcaccaattaaaatgactttaggacaagttgaaatcaacttagggagtgaagcattctgatttctgagactctcccaaggcagcggggaaggcaagtgtctgagcaggttgtcactcactcaggagtaatgatgggaaaatccatcccggtaacgtgattgagtttggtgaattagtaaggatgtttacactgtgtgctgcaagttggag

SEQ ID NO: 732262 - DNA, 606 bp, Homo sapiens
tcggggcaaggagtgtggacgccctttggctgcactgcagtgcctctaactgcagcttctccctctctctcagggttgctgaaagattattagataattttcaaatttgtaaagcgccttaagctccttggaggaaaggtggtatatgagtgtaataacaataacaatcctatctgtcagagccattgagaaaatgaatcttgttattctcaggaaacagccggaggaacttcagcaagaaacatgaaaataaagcacagagcacggcctcctgaccagtcagcagaggggaaagtccccaccaagtgtggagggagcattcgagcccygctccctgccagcccagtgctggtgcaaaggggctctcagaaagtcacccaaattgcctctgacacttcaccaattaaaatgactttaggacaagttgaaatcaacttagggagtgaagcattctgatttctgagactctcccaaggcagcggggaaggcaagtgtctgagcaggttgtcactcactcaggagtaatgatgggaaaatccatcccggtaacgtgattgagtttggtgaattagtaaggatgtttacactgtgtgctgcaagttggag

SEQ ID NO: 732263 - DNA, 606 bp, Homo sapiens
taacgtgattgagtttggtgaattagtaaggatgtttacactgtgtgctgcaagttggagtggggctggcaggggttttgacacatgtggcagcttcactcctaatgaggttctcggactccacactcagcccggctggacttcaagtcgggctgggtcttacccttcaggtgagtggctaagggcaggggtgggctctgcaggcagacaggactgggtttaagttctgactctggtcaccaccagccctgtgaccttgggcaaagctctgtgcttctctaagcctcagtttcccygtgtacacaatctgcattatgatagcacaattcataatgctggctgtcgtaatgagaaacatgagatgagctatctttttattttttgttcacctccacaggccagcatggccacggagataaaggaaagccaggtttatctcttctcccctggagtatctgttcccttaagagccaagaagagacaaggaaggtgggaacctgcagaaaacataaccacagttctagtcctgacgatgcttctgcctggctatgtgatctcaaacaagccacttaacctctctgagccttgttttcctcatctgtaaaa

SEQ ID NO: 732264 - DNA, 641 bp, Homo sapiens
agcaagttcacagaggatccatactatataaattcatttgtatcaattgcaaagacagatacaactaaatggtaagtcatttaggaatacatgcttttctattgcaaatataaagaagaacaaacaattaagtaaaaattcagaaaactggttctttttcatagggttgaaagatgttatggtggaggcataacatcttggcatcattctarttcttaagctgggtaatgggtagatgagtgaccatgttattattgtttattattattattgtacatatatgttgtatacactcttttgaattttgatagattttaaaatagaaaaaagtaaaaacaaacaaacagcaatttctgagctgggcatggtagcatctgcctgctactcaagaggccaaggcaagaggatcacttgagctgagaagttgaaaaccagcctgggtaacatagcaagaccttgtcgctaaaaaaaaaaaaaaagttctttcataaaaatgaagcaatttctctggagtcaggctgcctggattcaaattctacttctgcctcttattagctaggtgactgttgaaatcctaacccccaacgtgatggtaggaagtagggctttgagtggcaattaggtcacgaagaagcagccct

SEQ ID NO: 732265 - DNA, 557 bp, Homo sapiens
aaatgactccctctctgttctatgcttgggtggttcagtccctgttctccacccccccaccactcccaagaactgactgtgggagacaacttggctcaatggtgagggacatggtcactggctggctctgtcacttcccctcccaaagtctttttttwaaatattctggaaaagaggaataataatggtgtctccaactcttggcatcattgcaaggactaaaagtgatgccagatgtaaagggtctgagaccaggagctgtgcataccagtgccccctctccccagctcctgctagcatccaccaacaactggtgtgtctagtttgtttgtttgtttgagacggagtctcactgtgttacccaggctggagtgtaatggtgcgatcttggctcactgcgacctctgcctcccaggttcaagtgattatcctgcctcagtctcccaagtagctgggattacaagcacccgccaccacacccagctaatttttgtatttttagtagagacgcagtttcaccatgttgtccaggctggactcgaactcctgacctcagg

SEQ ID NO: 732266 - DNA, 631 bp, Homo sapiens
aaagagggtgtgaatcgtgggtcactggaccatcttgggtcatgtgcccagttctaagccagttgccatggtcagggggatccaatgttctgattggccccattctcactcctagagctaggagtggaataaaatcccaaacactggaacttggagtgagagagagataagtatgagtcctatatggggcatggaggtcccttctgactccagatgtttctgattctctgttgtgagtaaaattgcttctgcttgtttccttgcaattgttacaggaaaggggtcctgatctagaccccaggagagcattcttggatttcactcaagaaataattcaggacaaatctgtagagtaaagtgaaagcaagtttattaagaaagcaaaggaataaagaatggytactccatagacagagcagccctgagggtagctggttgcccactgttatggttatttcttgatgatatgctgaacaagggtggattattcatgcctcccctttttagaccatagagggtaacttcctgagctggtgggactgtagcagtgaggacaaccagaggccatcttggatttgaggggatttggcctgcttctttactgcaacctgttttatcagcaaagccttta

SEQ ID NO: 732267 - DNA, 548 bp, Homo sapiens
ctctgggtctccactacccaccttctgcctgctcaggggctctgcccaggcacctcctgcaggaagccctccaggctgactgtgggctcccagacacctcctgcaggaagccctccaggcggctgtgggctggacccctcttctggttggrggggacacaagtctggctctgtgtccaacctgtcagcctgggcccaccttgttagacttacgcactcagccctcgtctgtcctgtcctcaggctgaggctgagctgccgtgaatgtcgcccgcccttgccagaccccggggctgggatttcatatcccggttttgttttcctggatctgcttgtcccgttatctcttctaatacttggaaagtgacatggtttttccagtttccctggtgagataaagtttcctgttaaaatgtgcaaatttgagcgggaaaggagagttcatttgatacagacagtgacataaacagcgcaggccaggggtcaggggacacagggagtcagccctggtttggatcccgcctctgctacctgctggccatgtggctt

SEQ ID NO: 732268 - DNA, 548 bp, Homo sapiens
ctctgggtctccactacccaccttctgcctgctcaggggctctgcccaggcacctcctgcaggaagccctccaggctgactgtgggctcccagacacctcctgcaggaagccctccaggcggctgtgggctggacccctcttctggttggaggggacacaagtctggctctgtgtccaacctgtcagcstgggcccaccttgttagacttacgcactcagccctcgtctgtcctgtcctcaggctgaggctgagctgccgtgaatgtcgcccgcccttgccagaccccggggctgggatttcatatcccggttttgttttcctggatctgcttgtcccgttatctcttctaatacttggaaagtgacatggtttttccagtttccctggtgagataaagtttcctgttaaaatgtgcaaatttgagcgggaaaggagagttcatttgatacagacagtgacataaacagcgcaggccaggggtcaggggacacagggagtcagccctggtttggatcccgcctctgctacctgctggccatgtggctt

SEQ ID NO: 732269 - DNA, 548 bp, Homo sapiens
ctctgggtctccactacccaccttctgcctgctcaggggctctgcccaggcacctcctgcaggaagccctccaggctgactgtgggctcccagacacctcctgcaggaagccctccaggcggctgtgggctggacccctcttctggttggaggggacacaagtctggctctgtgtccaacctgtcagcctgggcccaccttgttagacttacrcactcagccctcgtctgtcctgtcctcaggctgaggctgagctgccgtgaatgtcgcccgcccttgccagaccccggggctgggatttcatatcccggttttgttttcctggatctgcttgtcccgttatctcttctaatacttggaaagtgacatggtttttccagtttccctggtgagataaagtttcctgttaaaatgtgcaaatttgagcgggaaaggagagttcatttgatacagacagtgacataaacagcgcaggccaggggtcaggggacacagggagtcagccctggtttggatcccgcctctgctacctgctggccatgtggctt

SEQ ID NO: 732270 - DNA, 632 bp, Homo sapiens
gcatgtaggccacagagaagagtgtgggctttatctggagggcaatggggagccatgggagagtttagagcatgggaaagactatgttacaggtctggaagctgaggcccagagaggctaaggaatttagctgatgtcatacagcttatgaatggcagagacagaaatccgacttgagtgggctgcagacagattgagggtgtgaaatttgggggatggggactggggaggaggtgaggctgatgcccagggctgaagctcaggcagggggcacagttggagacccagctggagaggcaatgctatagggagagagaatgaagctggtgcaagcctggaggccaacctggmggtgcggacttgggaccactgacccccaccagccccaccctgaccctggcacttgactctccctccaaatcaagtccaggagggctctgaggatatatggactcagacctgagtccggataaaagagccagctacggagagaaagggctttccaggcaggaggcccagcccatgcaaaggccctggggcaggatcctgcctggtgtgttggaggaacagcaaggagatctgtgtggctggagcagagtgagggatggtgacagggggtcaggaatttgggt

SEQ ID NO: 732271 - DNA, 516 bp, Homo sapiens
tgttgaaccaccgtgcttgagccagaacctgcgcagggggctatgagcaccatgagtgggccaggctgctgctgcgggggtggcaggtggtaagcccgtccccaccctcctcagatgcttcctggctgagtggccagaaatgcctgtgcctcagttttcccatctgtgaatggagatggtgttaagaagtttagagacattaagacatgtaaagtgtgtgcttatgaccgtgccaggcagacagtcaacactgtgggaatatgtaaagagtgtctaaaaagcaaatacaggctgggtgcggtggctcacgcctgtaatcctagcactttgggaactgagrcgggaggattgcctgagcccgggaattcaaggccagcctgggcaacacagtaagaccctgtctctaaaaaaaattaaaaatttagccaattgtggcagcacacacctgtagtcccagctacttgggaggctgagctgggaggacatcttgagcccgggagtttgaggctgcagtga

SEQ ID NO: 732272 - DNA, 607 bp, Homo sapiens
ctcactcacatatatttcaagcctgattctaaactgctgcagagactggaaagcttgaaactatatttctcagaactcttggcagctaaatttcttgatgtgattccagttatacaaattctgtactctgaaagaaggcatttgttattgtttatataacattttgctatgaaaatttcaaatatgtgtaacattagaaagtatacggtataatrtacctctgttgctcagcctcaaaaattaccaacacatgtgaatcttgctttatttctatccatatctattccctacacctgaatcattttatatcgatctcagaagtatttcatccataaatatttcagtgtatgtctctgaaagataagcattcttttttataacattcccacaatgccattatcacactgaaaaaaaattaatgctaaatcctactaatatcacaaaatatctggtcagtgttcatatttaacccaaattttcttctagtacttacattgttttgtagttctgtctcataaaagttttacagtttttaaaaatcaggattcaaataaggatttatatgttgcaatacgttgatatgtcttttagattttttaaatctgtg

SEQ ID NO: 732273 - DNA, 607 bp, Homo sapiens
ctcactcacatatatttcaagcctgattctaaactgctgcagagactggaaagcttgaaactatatttctcagaactcttggcagctaaatttcttgatgtgattccagttatacaaattctgtactctgaaagaaggcatttgttattgtttatataacattttgctatgaaaatttcaaatatgtgtaacattagaaagtatacggtataatgtacytctgttgctcagcctcaaaaattaccaacacatgtgaatcttgctttatttctatccatatctattccctacacctgaatcattttatatcgatctcagaagtatttcatccataaatatttcagtgtatgtctctgaaagataagcattcttttttataacattcccacaatgccattatcacactgaaaaaaaattaatgctaaatcctactaatatcacaaaatatctggtcagtgttcatatttaacccaaattttcttctagtacttacattgttttgtagttctgtctcataaaagttttacagtttttaaaaatcaggattcaaataaggatttatatgttgcaatacgttgatatgtcttttagattttttaaatctgtg

SEQ ID NO: 732274 - DNA, 501 bp, Homo sapiens
tttgagatccttcatgtattaggtactgggtcaagaataagacatgatccctgccctgaggagacttacgataaattagaggacaaatatgtaaataaacaaacaattacatatagattctgatgggtgtgaggtaatggaggtccatttggggtrcagtggagcacaaaggagggaaccccaatggagcagatggaggatgacgaaatgtcagggcaggggtcaaatagatgtgagaggaaacttaggcaaagaggaatcaaaagcccagctaccaaattgaaaagaccttgcaacattgctaactgaagaaagtacaagcaaattgaaacactgcaaacaagttagaagtagctgctaccttcaagggcaaatagtggaggttaagagagaaacttgggtgtcaatcaaactgctttccaattggaaaagacatctgttgctttaatctctggtgttctgctaattttaacaaatgcagctatcctggattcggtacag

SEQ ID NO: 732275 - DNA, 594 bp, Homo sapiens
tgatgcatgtggaagactttattgagtgatgtgtagccctcagcagaaagggaggctgccaacgggatgggaaggtgatctttccctgaagccgcactgtctgaagttagctgcatctatccacagtctttgatgctcagttgcttctctgctcgcggctcagctgcttgtaacctcaatgctcagctgcctgtgttgctctatcagctgaaatcttttataggcacaggataggggcagggcgaggcaggccaaaaaggcaacatttgcrcagaaaaatggggtcagccgttttcactcaggcctgtggttccaggcttaagggtggggtttagctgggaccccagcccttctgttatcattgctctgtcactcaggttggagtgcagtggtgtgatcatggatccctgcagcctcaacctcctgagctcaagcaatcctctcacctcagcctcctggctgattttttaaattttttgtagagatgggggtcttgctgtgttgcccaggctggtctcaaactcctgacttcaagcgatcctcttgtcttggcctcccaaagtgctgcgattacagacatgaaccaccttggcc

SEQ ID NO: 732276 - DNA, 590 bp, Homo sapiens
ttcttaaaattcccttttgggactctgtttttctttaggtaaatgcagtggttagtcatttaggtgagaaaagaggtgccagatgagacaaaggcaggagcagaacaaatccaagagctgacttgcgctgcatcagaaaatatttgtgtattctgttgtcctcctgaagggaggggaaaagcaagctaattatccatattagaacctagaggtcaagtttattgaaatgagcaagggactttgaagcacagaactrgttgcattagtctattctcccactgctgtaaagaaatacctgagacagggtaatttctaaagaaaagaggtttaattgactcacagttttacaggccgtacaggaagcatggctggggaggcttcaggaaatacatgatcatggcagaaggcaaaggggaagcaacacatgttacatggtgggagctggaggaagagagagaatgaaggagctcttttgctgagcgcacactccatgtggctgtgtgtggcatggtgtccctctcccctggtctgtgagtatatgtgactaatacactgctgttgatctcacttgtccagtgtgaagtattagt

SEQ ID NO: 732277 - DNA, 590 bp, Homo sapiens
ttcttaaaattcccttttgggactctgtttttctttaggtaaatgcagtggttagtcatttaggtgagaaaagaggtgccagatgagacaaaggcaggagcagaacaaatccaagagctgacttgcgctgcatcagaaaatatttgtgtattctgttgtcctcctgaagggaggggaaaagcaagctaattatccatattagaacctagaggtcaagtttattgaaatgagcaagggactttgaagcacagaactagttgcattagtctattctcccactgctgtaaagaaatacctgagacagggtaatttctaaagaaaagaggtttaattgactcacagttttacaggccgtacaggaagcatggctggggaggcytcaggaaatacatgatcatggcagaaggcaaaggggaagcaacacatgttacatggtgggagctggaggaagagagagaatgaaggagctcttttgctgagcgcacactccatgtggctgtgtgtggcatggtgtccctctcccctggtctgtgagtatatgtgactaatacactgctgttgatctcacttgtccagtgtgaagtattagt

SEQ ID NO: 732278 - DNA, 357 bp, Homo sapiens
actgtttaagttgctttaaaatgggcaatttttattgactatagttatcctgctgtgctatcagatagtaagtcttatttattctttctgtgttttttgtacccattaactatccccaccttcccccaacaccacactatgcttccaaacctctggtaaacatccttctacctaygttcatgagttcaattgttttgattttgagatctcacaaattagtaagaacatgcaatgtttatctttctgtgcctggtttatttcacttaacacaatgacctccactttcatgcatgttgttgcaagtgacaggacctcattcatttttatggctgaatagtactccattatgtctatgta

SEQ ID NO: 732279 - DNA, 465 bp, Homo sapiens
tcatgtgccatcgcttattttatctgcattaatttaaagatatagtctgcctgtgcccaataaaaacatctgtattgcaaaatttaataatttatattcatatattcgtatagttgtacttgtctttgatgaatattatcactgaaaaaaattgttgagtgatctgtttctttcccttttctttttgttttctctttctcacacacaaacacagaacactcaatcacatgtttamaaaaaatgaatcagtcttttctaatattttcccttatctatttaatcctttgtttaaaaaatggctataaatttcatgtatttaaaagtaaacagacttccattttacatattcagcctgcatttattgaaaagggaacaaagaaagaaaggtatcacgtagttgcatgctgtcaggtaacatttttataataattcatgtgattccttttgtacatatctattcttgag

SEQ ID NO: 732280 - DNA, 600 bp, Homo sapiens
caatttcctatcttagtctgatttttgttgctaaaaacagaatagctgaaattggataacttagaaagaaaggaatttatttcatacacttatgaaggctgagaagtccaaggtcaaggggctgcatctggtaagggtcttcttgctgatgagagctctctgcagagtcctgaggcattacaaggcattgcatggtgaggcagctgtgtgcaagctcaggtctctctttctcttcttataaagtcaccagtcccactcccatgataacccattagtctactatcccaytaatgcagaaccctcatgacccagttacctcttaaggccccgtctctcaataatgccacattggggcttacatttcaacatgagttttggtgagtacaaatattcaaaccatagcacatggccaggttaacttaccaatattcttggctataattgctgtggacatatggaaaaccagtgttttattctcagagctgcaaatgtctcatgttaattttagtcatttgtccattcagtagctcaaaggactaaactaaactttaaaatttaggaagaaagatcagagcaagttttgtattctattgacctcaa

SEQ ID NO: 732281 - DNA, 527 bp, Homo sapiens
ataagtaaaaatttcaccttttactagtagttttgatgctatatccttggaatttcagggttttcatagaaaatgttttttaaagaaaagaaaaaaatggtagaaatttcattgtcttattttttaaggaccattgcttaattacttttttctcagttctgtttatttgctcttaaaacaaaagaaacaacaaaaactgatggctttctcggacaacaacaacatccacaacaacaaaaaaaacactaatcagtttctgaaaaactaaagagtaactgattattctaactattaactaccygaccattcaggtcattgttcttttctacagtgtgtgtttatctcatgctcatatattggttttttaagtgcagtatactatacttaatcattgtctaagattctttggaaatctgtttttctattcaatttatactcctagtagaaaattttttggggaacaaaaaactgaaccatcataaggctaaatgaaactccttggaagtaaattgttatttgaggtatct

SEQ ID NO: 732282 - DNA, 587 bp, Homo sapiens
tcaaaagtgtgccaaaagtgacagtgggtaaccaagagagagataaaagatgtccggaggtgttacagatacttggaaaagaagatacacaagtagtttcagaattctgtcagcagggagagaaggctcaggttttttagctgaatagcaggaaagatcagtcccaggggaagagaactggctctgaatgaaggaagtatatataggtactaggccttgtggataggaagagacaataagaagagctagataattacagaattttatctgtcacaatattgcgtgcttataacatcaataaactaaaagtaaaatcacaaaaccaccaactttacagtaagcttctttgcaaattgtatggctttgtgtttaattaaagcttactaamgggttgggctcagatagttgtactcagaatacattttgacttctttaagcctaagataagaatgttcatcttcatttggatggcatttattacacaaacccaagaattccatgatcatatcaataaaaattaggagaatttcattaggcactataaataaccccttctcctgagacaagtagagaagcccgagtgagta

SEQ ID NO: 732283 - DNA, 628 bp, Homo sapiens
gtcttggtgtcctctaaatatggatccacttttcccagcttagtactaaacaagttgagtagaacgaagagtaaacacaagtaccaaaaatatcacagttattattaataaatgccacattgaagcacatttttttggttggagagctcagtgggcctgctaactaaatcccagaattcagcagtcttacccacctagcagtggaccatgcagacttcctttcactctcctactttgcwggatggtaaggaccatgctgtatgcctaagagaagtcttaggcctaaagaactctagctctctgcagacagaatgctctaataccgttttcaagactgcaagttatttaaagtcacttcttgtcttcaaaggcaaaggaacaaaaaggtcaacagaatccacttgccctgtgaaaaattccgttccccgcaaggaaaagaggaagcaatattttccaccagacttgccctgtctgataagtcttggtaagccaccttattgattgtcttcaactgagaagacaatcaattttgagaaaactggaccaaccctactagacagacttcggtggagaggcagatgcctcagcactggtaaaaatatcaaaaaggagtgaagctgggcactta

SEQ ID NO: 732284 - DNA, 434 bp, Homo sapiens
gagttgaaagaattaagcatctttggaacctcctacttttggcccgagcgcggtggctcacacctgtaatcccagcactttgggaggccgaggcaggcagatcacgaggtcaggagatcgagaccattctggctaccatggtgaaaccccgtctatactaaaaatacaaaaaaattagccgggcatggtggygggcgcctgtagtcccagctacatgggaggctgaggcaggagaatggcgtgaacccgggaggcagagctcgcaatgagccgagattgcgccactgcactccagcctgggtgacagagccagactcggtctccaaaaaataaaaaaaaagtataattaaatttctttatcacttctaacttctttgccccctccaaaatcaagttaaacatcaaagacagtgcaaaggagggggaggggataa

SEQ ID NO: 732285 - DNA, 630 bp, Homo sapiens
ccaccttttcagataaaatagcgtttttctaattatttgttgctgcatgacaaactacccaaagacttagtggctgaaaaccacaatgattattttactacctctcatggtttctgtgggtcaggaatctgcaggattcagatggacagtttggcttcaggttgctcacatgcctgctgtcaggcgtgcctggaactgcagtaatatggggctaaagacactcagtcgggcatygtgctatgcacatgcattatctccgttattcttttatagcaacgctttgagatgggtactatttattaacatgattttacagatgggaccatggactcacagagttaagtaattcttcaaggttatgtagttggtaaatggcgtcactgctcaagagggaagccccctccccgcctcctttcccatcacactacttcattttgatgtctttgtaataggagaggtttgaaaccatcctgtgcattcatttttttttctacattgtatcacatccccagccaaatacaaagtccttgaggccaggtgtgttgcttatcttgctcacttctttattcccaaaggctagagcagagtctcgtacattaaatgtgctcagtaaatagtcgttgaatgaag

SEQ ID NO: 732286 - DNA, 581 bp, Homo sapiens
ttttttttcttttttctttttttgctcatcagctgtagttagtgtatgtgtactttatgtgtggtccaagtcaattctttcagtgtgtcccagggaaaccaaaagattggacgcccctgtgtctaaagtattctgagaatgggtaatgatgacttttgttcctagtatttatactaaatacagttcctaagcatcagatactacaggttgsggatttagatatttagaagataaaaccagaaagcatggctgatctgtacacagaaagatatgcccatagtcccagagactgttgttggagacttttttaggacttaacgtgaaaacatttccaaaggatctatttgttcttccactgaccagctttaagttttctcctgggatactgctctatctttcctataccccaaataatatagagtcttctcaaatacttctcaaggtaactctgggaagtttacacagatgtatgacaattacctgagaaagggcagaaaatcttactcagagatacctagagaacaagaccaaaagcctacagctgacactagatgcttaggcttagaataataataaaaaca

SEQ ID NO: 732287 - DNA, 581 bp, Homo sapiens
ttttttttcttttttctttttttgctcatcagctgtagttagtgtatgtgtactttatgtgtggtccaagtcaattctttcagtgtgtcccagggaaaccaaaagattggacgcccctgtgtctaaagtattctgagaatgggtaatgatgacttttgttcctagtatttatactaaatacagttcctaagcatcagatactacaggttgcggatttagatatttagaagataaaaccagaaagcatggctgatctgtacacagaaagatatgcccatagtcccagagactgttgttggagacttttttaggacttaacgtgaaaacatttccaaaggatctatttgttcttccactgaccagctttaagttttctcctgggatactgctctatctttcctataccccaaataatatagagtctyctcaaatacttctcaaggtaactctgggaagtttacacagatgtatgacaattacctgagaaagggcagaaaatcttactcagagatacctagagaacaagaccaaaagcctacagctgacactagatgcttaggcttagaataataataaaaaca

SEQ ID NO: 732288 - DNA, 589 bp, Homo sapiens
agggcttctgtggaaatgtgtcaggaatggagacgctgaaaagttcatccagccacgcgatttgcaacattctgttcccaagtcgcagttaaaatccagttgtctgaagttgattcaattcaatagagtgacacttctcaagcagttgcagagattygaccccattattcttccccagcaaagtgggcacgccaggtttggaaacttttgaactgtgtccttgacattgaaaatccaatttcatcgtcttctctgaaaaatataaaactaggaccaaagtgcttcctatggtaaggccaggaggatgttcttctcttccatatatatatgagtgtttattaaatgagtttttattaaaatgctaaacgttacttaagctgctgaattgtaagaaacgtggttacttgtttcacaggggtaaccagacgcggaatcgtgtttccctcctaaacagtgtcacagctttccctggttctcatgttaatgtgccattcatgcaattctgaacttttttcccctcctaatctttgtttccacaactttaatgataaatgtgatgtaatacaataagcaaggttcaggaggctgc

SEQ ID NO: 732289 - DNA, 589 bp, Homo sapiens
agggcttctgtggaaatgtgtcaggaatggagacgctgaaaagttcatccagccacgcgatttgcaacattctgttcccaagtcgcagttaaaatccagttgtctgaagttgattcaattcaatagagtgacacttctcaagcagttgcagagattcgaccccattattcttccccagcaaagtgggcacgccaggtttggaaacttttgaactgtgtccttgacattsaaaatccaatttcatcgtcttctctgaaaaatataaaactaggaccaaagtgcttcctatggtaaggccaggaggatgttcttctcttccatatatatatgagtgtttattaaatgagtttttattaaaatgctaaacgttacttaagctgctgaattgtaagaaacgtggttacttgtttcacaggggtaaccagacgcggaatcgtgtttccctcctaaacagtgtcacagctttccctggttctcatgttaatgtgccattcatgcaattctgaacttttttcccctcctaatctttgtttccacaactttaatgataaatgtgatgtaatacaataagcaaggttcaggaggctgc

SEQ ID NO: 732290 - DNA, 618 bp, Homo sapiens
ttaatttaggtccttactttaattacagaaacccatggaagttctatcaattacctaaaagtaaaatagtacaggcctgatttatgtatgtttctgccacttaaatcatcgttttatgaattccacacaattacttccttaaaatctgcaatcaatatatcagttgaaactatgcccctaccacctgcccttgagtttcatagaagtsaataaatgaggaattgattttgcattttgataacattcaggttcccaagcatttgcccatgatatcttttttttccttctttttttttttttgaggagggaagggtatcagggtgaaaatttcaggggaaacgataattaatcttctattaactttaggatttatcctgatggggatctactgttcaactctggctttcatggaactgtggaaaacgcgctcattggcattgataagcatacggaacaataaagaaatttcttccagaaaatgcttttctagcccttgacaaataaaactgacatccctgtatcaaggggcttgctacggactaaattatgtcctctccactcaaattcatatgtggaagccgtaacccccaatgtgatgctttgtggaaatggggcctt

SEQ ID NO: 732291 - DNA, 448 bp, Homo sapiens
caggcctagggtgccctgtgccacctcaaagctgctctctaccccatccttgctgctccagctctatctgtggcttaaagggcaccaggtagaggttgggctgccacttgggagagcgtaagctaccacagtccttgctggtttgcatgcggtggtaagcccgtggggtatacagaatgtaggagaagggttggcagcttccacttaaactttaggatgtataggaaagcttgggtgcccaggcaaacctgccacaggtgtggatctcctrcgcagagactctactagggtagtgccagggaaatgtggggttggagtcaccacacagagtcccttcctgggtactgtctagcggagcttgtagcaatggggcttccctccacaccccagaatggtggcgcctataagcagcatgcaaccttagcctggaagaaccacagaggcaggg

SEQ ID NO: 732292 - DNA, 626 bp, Homo sapiens
aaacttcacccactgcttgtttttgtactgacttaagaatggttaaaaaaataaattcaggctggacgcggtggctcaacgcctgtaatcccagcactttgggaggccggggtgggtggatcacctaaggtcaggggttcaagaccaacctggcyaacgtggcaaaaccctgactctactaaaaacacaaaaattagctgggagtggtggcaggtgcttgtaattccagctacttgggaggttgaggcaggagaatcgcttgaacctgggaggcagatgttgccgtgagccaagatcgcgccactgcactccagtctggggaacaaagcgagactccatctaaaaaaaaaaaaaaatcaaaagaagaaaaatatttcattatgcataaacattttattaaatttaagtgccagcgtctgtataggaagtttaattggcatccatttgtctgcatattgcctgtgccactacgtggtagagttgtgtcgttgtgatagagaatcatgaccccaaaagcctaatatatttgctttctggctcttgatagaaaatgtttgccaatccctgctctagatccggaagtaaaaaaaacagaggtgttttttttaaggaaatgtattactcag

SEQ ID NO: 732293 - DNA, 505 bp, Homo sapiens
aaccttagggactctacctggtactctgttctactgtggctgagctggcacacaagccacaagacaaaatcttccccactcttttttctgcaagcaggggagcctctccctgtggccaccactgccccaggaccatggcagctactgcttggctactgccggtgttcatttaaggaccaaggtctcttcagtcagcttgtgtgaaggctgccaggcctgggtctctcccttcagggcagtgggctcccctctggccaaaggtaggtccagaaawgacatccaagagccaaggcctggaatcagggacccccaagagccaacttggtgctctactccactgtggccgagctggtaactaagctgccagacaaaggcccctttactcttccctcccgcttccttgagcagtaggagcctctccccgtagtcaccacgtcagggaatatgctgggtcatatctgaagtcagtgtgtctctgagtctcactcaaggcccacacggagta

SEQ ID NO: 732294 - DNA, 564 bp, Homo sapiens
aggacacatttctctcttgtaggtttgatcaactgaaatatactagaagcttatccttctgtagaacgaaatacaggagataattctttatggttacaatgtctttgagtaaacggacttgagtgagaaacataggcattcacagctctgtgaagaagcacctccaagaactttccccatcagggccagtgtattcatccgcactcagcagttgcttcctgaaatttgaaatgagtcaagatgctcagaatggcctccatagtgtggggcaaacagarggagtttagcagcaagcttgttacagctcactggctcccagagcacggctgcccatccttccccggagccgcctcactccagacatgggctctgcttttcctccctgacccgccaatcactcttccttttgcttgcaagcagctgaacagctttatttgtgtttctcatcacagttttattttcacttcaataattctgttcaaaaattatccaaatacttggtttttgccatatgaataggcgagcccagaaaagaggaaaggcataaacaagtgtccgcttgtc

SEQ ID NO: 732295 - DNA, 663 bp, Homo sapiens
atacctccaatattatgcaaccatcaccactatctacttcctgagctttttcatgatcccaaatggatactgtatccaagaagaagtcactcccagccaggcaccatggctcatgcctgtaatcccagtactttgggaggccaagatgggagatcacttgagcccactagtttsagaacagcctgagcaacatagggagaccttgtctctagaaaaataaaattagctgggcatggtggtgcacacctatggtctcagctacttgggaggctgagatggaaggatcacttgggcccacgaggtcaaggctgcagtgagccattatcactccaccgcactccagcctgggaggcagcgtgagatcctgtcttaaaaaaaaaaaaaaagtcacttctcagacctccctctccgccagccccttgcacccagcaatctttctgtccctgtggatttgcctattctgaaaggcgatttttgtcaataaacgtgggatggaacagtcattcccattcattcacacaccatccctagcagtctcccgctccacagcactagtggaatagtggtgccaggcatggtgtgtcccgcaacacctgaaacattcattgtctagccctttacagagaaagtttgctgacccctgcttagatcactcatttagag

SEQ ID NO: 732296 - DNA, 726 bp, Homo sapiens
aaccacattccatccacacctgattttagggcacttcttcagttctgggatcctcctcattttcaggaccaaaataatgggctcacacctgtaatcccagcactttgggaggccgaggcgggcagatcacaaggtcaggtgatcgagaccatcctggctaatgtggtgaaaccccgtctctactaaaaatacaaaaattagccaggtgtggtgacacgcacctgtactcccagctacttgggaggctgaggcaraagaatcgcttgaacccgggagatggaggttgcagggagccaagatcgtgccactgcactccagcctgggtaacagagcaagactccgtcttaaataaataaataaataaataaataaataaataaataaataaaaatggactcagtgaggttgaatggcctgtccaatgtcacccagagaggaaggggagtggagccccagtctcttggagcccaaaacccacatccttacactgagatcagcagttcttacccaggagtgattctgcccccagcaaacacttggtgacatctggagacatctgtggttgtctcaactgaggggagctcctggcatgaagtgggtggaggccagggacgctgctcagcaccgtgaagtgcctgggatggccccaccccagagaacattccagccccagcgtccacagtgccgagggggagaccccgcactacgccacactgcctcctcgct

SEQ ID NO: 732297 - DNA, 726 bp, Homo sapiens
aaccacattccatccacacctgattttagggcacttcttcagttctgggatcctcctcattttcaggaccaaaataatgggctcacacctgtaatcccagcactttgggaggccgaggcgggcagatcacaaggtcaggtgatcgagaccatcctggctaatgtggtgaaaccccgtctctactaaaaatacaaaaattagccaggtgtggtgacacgcacctgtactcccagctacttgggaggctgaggcagaagaatcgcttgaacccgggagatggaggttgcagggagccaagatcgtgccactgcactccagcctgggtaacagagcaagactccgtcttaaataaataaataaataaataaataaataaataaataaataaaaatggactcagtgaggttgaatggcctgtccaatgtcacccagagaggaaggggagtggarccccagtctcttggagcccaaaacccacatccttacactgagatcagcagttcttacccaggagtgattctgcccccagcaaacacttggtgacatctggagacatctgtggttgtctcaactgaggggagctcctggcatgaagtgggtggaggccagggacgctgctcagcaccgtgaagtgcctgggatggccccaccccagagaacattccagccccagcgtccacagtgccgagggggagaccccgcactacgccacactgcctcctcgct

SEQ ID NO: 732298 - DNA, 726 bp, Homo sapiens
aaccacattccatccacacctgattttagggcacttcttcagttctgggatcctcctcattttcaggaccaaaataatgggctcacacctgtaatcccagcactttgggaggccgaggcgggcagatcacaaggtcaggtgatcgagaccatcctggctaatgtggtgaaaccccgtctctactaaaaatacaaaaattagccaggtgtggtgacacgcacctgtactcccagctacttgggaggctgaggcagaagaatcgcttgaacccgggagatggaggttgcagggagccaagatcgtgccactgcactccagcctgggtaacagagcaagactccgtcttaaataaataaataaataaataaataaataaataaataaataaaaatggactcagtgaggttgaatggcctgtccaatgtcacccagagaggaaggggagtggagccccagtctcttggagcccaaaacccacatccttacactgasatcagcagttcttacccaggagtgattctgcccccagcaaacacttggtgacatctggagacatctgtggttgtctcaactgaggggagctcctggcatgaagtgggtggaggccagggacgctgctcagcaccgtgaagtgcctgggatggccccaccccagagaacattccagccccagcgtccacagtgccgagggggagaccccgcactacgccacactgcctcctcgct

SEQ ID NO: 732299 - DNA, 549 bp, Homo sapiens
tctcgttcagactcaaataaagccttttttcaggaccagcagtgggctctcttaaaagctcgagttcagaaggtttgtaccagcatagctgcacattaaaatatcataaacctggctgggcatggtggttcatgccggtaatcccagcacttcgggagatcgaaggaggcagatcacttaaggtcaggagtttgagaccacyctggcccacatggtgaaaactcgtaaccctgtctctactacaaatacaaaaaattagctgggcatggtggtgcgtacctgtaattccagctacttgggaagctgagacaggataatcccttgaacctgggaggcagaagttgccgtgagccaagattgcgccactgcactccagtctgggcaacagaccaagactccgactcaacaaaacaaaacaataaataaaatatcaaaaaccttctaggccacctgttaaatagtggcttctctgtgtgcctgttggctgagcctctccccagtgtaccccagacctccctgtggtccagcaggatcctccacaatccaggc

SEQ ID NO: 732300 - DNA, 615 bp, Homo sapiens
cgtgagccaagattgcgccactgcactccagtctgggcaacagaccaagactccgactcaacaaaacaaaacaataaataaaatatcaaaaaccttctaggccacctgttaaatagtggcttctctgtgtgcctgttggctgagcctctccccagtgtaccccagacctccctgtggtccagcaggatcctccacaatccaggcccattgctatggccgaccatctgttctgattgttcagtgttaaatattytgaatgtcaacacctatctaatgtcttaaggaggggaccctggagacgtcaggattcttattttagttgcaagtagcaaatatttccctcaaatggtctacatgaaaatggtaatttacaggcttcaggtacagtttgatccaaagtcccaaggtccacaggattcagccttcatttctctgtagttttttcttctctgtcctcctcagagtgcagtctctgacctcaggacaactcccctcaccatctgaggctagttatacagtccataatctggatggatgcgtagtgaccaatgaattgacaagatggaggaatgaaggcaggaggaaataaatgagtaaaaaaataccctgttgcat

SEQ ID NO: 732301 - DNA, 630 bp, Homo sapiens
aagcccggagctttttgtgaggccagaaagtaaggaaccactcgaaaaattatgggaatgtttcaaaagattacagggagcttagaattaccaattttgggacaacatgagcaacataataatgatagcaatggattccaacccataaatatccatgagtccawgctgatataaataattgaacaaagaaataaataaggaagaagaaatagctctttcttatagcagaattccaattaataaatgtagaaggaattatggaaataaaaaatcactatttggctaacaccacagtaataattgtttataggcaagaatcaagaaccatccacagattctaaaaattaatgggtaaaggtaagatgatgctgtaactattgagtatgaaggaggggtcaggggaagtaaggtgagaagaaacaggctactggtttattcccaaagtatctgtccacaagatacttattaattacaatgagatgaatagtaactttatagtagagaaacctggcaaacaccacctgaaccaagcgcttaaagtgaacctcatcggtaatgagagatatggacatcctggggctccaggtgggatgtcctgagaaagacacatcacttctgtgctaatcttac

SEQ ID NO: 732302 - DNA, 630 bp, Homo sapiens
aagcccggagctttttgtgaggccagaaagtaaggaaccactcgaaaaattatgggaatgtttcaaaagattacagggagcttagaattaccaattttgggacaacatgagcaacataataatgatagcaatggattccaacccataaatatccatgagtccatgctgatataaataattgaacaaagaaataaataaggaagaagaaatagctctttcttatagcagaattccaattaataaatgtagaaggaattatggaaataaaaaatcactatttggctaacaccacagtaataattgtttataggcmagaatcaagaaccatccacagattctaaaaattaatgggtaaaggtaagatgatgctgtaactattgagtatgaaggaggggtcaggggaagtaaggtgagaagaaacaggctactggtttattcccaaagtatctgtccacaagatacttattaattacaatgagatgaatagtaactttatagtagagaaacctggcaaacaccacctgaaccaagcgcttaaagtgaacctcatcggtaatgagagatatggacatcctggggctccaggtgggatgtcctgagaaagacacatcacttctgtgctaatcttac

SEQ ID NO: 732303 - DNA, 630 bp, Homo sapiens
aagcccggagctttttgtgaggccagaaagtaaggaaccactcgaaaaattatgggaatgtttcaaaagattacagggagcttagaattaccaattttgggacaacatgagcaacataataatgatagcaatggattccaacccataaatatccatgagtccatgctgatataaataattgaacaaagaaataaataaggaagaagaaatagctctttcttatagcagaattccaattaataaatgtagaaggaattatggaaataaaaaatcactatttggctaacaccacagtaataattgtttataggcaagaatcaagaaccatccacagattctaaaaattaatgggtaaaggtaagatgatgctgtaactattgagtatgaaggaggggtcaggggaagtaaggtgagaagaaacaggctactggtttrttcccaaagtatctgtccacaagatacttattaattacaatgagatgaatagtaactttatagtagagaaacctggcaaacaccacctgaaccaagcgcttaaagtgaacctcatcggtaatgagagatatggacatcctggggctccaggtgggatgtcctgagaaagacacatcacttctgtgctaatcttac

SEQ ID NO: 732304 - DNA, 578 bp, Homo sapiens
actgagctggacaacgtgagggatatggaaacagtgcaccactttgtgctgccaaggaggctgcagcctagaaggtcaggggttggaggcaggagaggcgcatgaaggccttcaacataaggcagcagatgataagtgtcaagaacagagygtccagtagggctaggccagctctcaggagggagaccacatgtctggctgtgggagaaactgagggaagctgtgggaaggtggttttgagctgggtgtgtgagcaaagttgagctgatgggaaaacacaagacctgttcagggaagggcaaaaagtctagtttgggtggggagagagtatttttttattgagtagagagggaaatgctggaaaagcaggttggggctagagctttgagtccaggctaaggactcaagcctgggtgtctgtcacagagatggaaaagcctttcctctcagaatggttgtctagaccgtagggctacggggctcagcagtttcccgagtgctctctctacaaaggaggggacattggaaattgtagtgtaggagggtgaacatctcctgattttaggaccaatttcatg

SEQ ID NO: 732305 - DNA, 578 bp, Homo sapiens
actgagctggacaacgtgagggatatggaaacagtgcaccactttgtgctgccaaggaggctgcagcctagaaggtcaggggttggaggcaggagaggcgcatgaaggccttcaacataaggcagcagatgataagtgtcaagaacagagcgtccagtagggctaggccagctctcaggagggagaccacatgtctggctgtgggagaaactgagggaagctgtggraaggtggttttgagctgggtgtgtgagcaaagttgagctgatgggaaaacacaagacctgttcagggaagggcaaaaagtctagtttgggtggggagagagtatttttttattgagtagagagggaaatgctggaaaagcaggttggggctagagctttgagtccaggctaaggactcaagcctgggtgtctgtcacagagatggaaaagcctttcctctcagaatggttgtctagaccgtagggctacggggctcagcagtttcccgagtgctctctctacaaaggaggggacattggaaattgtagtgtaggagggtgaacatctcctgattttaggaccaatttcatg

SEQ ID NO: 732306 - DNA, 470 bp, Homo sapiens
atgaagacctgaataaggcagtattcaagagaaatgttggagatggaaaccatggaagattggatatgagatatcaaaggacatgggagagttaaaggacattccaagacaatgagtttgttttaggatatatggagtttggtaggttggaaatatctgtgccttttttttttttttttttttttttcaagactgttagaagcaaacaaagaaacccacatagacaagaacaaatacataagcatttactatggggtgagccctgtcctagggtatagagatagcagcaaagaggtccaacctggtcctggkcctcatacagcttacaagtgatccaaactgttctcatttgtgagtggcagggcctcaactctcatccatgcagtgtcctagatacttaggaaatatctccaaggggatgggcccagaaacaaatctctctcctgcattcaccacattgcatatgttcc

SEQ ID NO: 732307 - DNA, 603 bp, Homo sapiens
gtcctcagctgggctgcatgagctggaagcaaaggttttgctcaaatcacttgagtggagagatttgatgtcaaaacatttggaattacagctgagagctaataaaatgctaatgtaggaatgaaaagacttcctggagttctaagtaacatttttatgtatgtgtgaacattttaattttcatatttatggtttcactttaaagtgaattagaaaaaaatcacattaaactactgacttcatagataatatttattgctttggatgtgtctcttaagaaacaaaattcattgtaaattgacttaaataaaaataacacataagggttgtatatggatatggttaaaaaaagactgaaggagttttggaatgaatacggtttgggaaacagtgactatgccatttttttttccccctagaattggctccatgccccaccacttagcatagactggtcagaarcagttaaaatcattccttgtgttttctgtagctgagaaggaagaacatggaagaactctccaagatggtttcagcacttttgttaggaatccaaaacataagacattttctcttaaaaatactaatagctaacttttattg

SEQ ID NO: 732308 - DNA, 558 bp, Homo sapiens
atctcctctgctcattaaactgattccaggagattggatttgctgtgactagatacagatggagcaaatgtcctaacagagaaatagaggtgatgctgctaaagggagaaatgccaggcggacaaagttcagtgtcgggaattttccccgtgacattcactggggcatgagattttggaagaagttttttactttggtttagtctttttttccttcctttttattcagctagaatttctggtgggttgatggtagggtataatgtgtctgtgttgcttcaaattggtctgaaaggctatcctgctgaaagtcctgctttcctatctagcatttattyctctggcaaacttttctttcttttcttttttaaagtaaacttgtgtattgagtcttaactgtatttcagtattttccagccttatgtgttacattattccaatgatacccaacagtttatttttattatttttttaaacaaaatttcacagttctgtaatgtaggcacttttattttcattgtgatttatatataaggtaatgtagggttatatttgggag

SEQ ID NO: 732309 - DNA, 631 bp, Homo sapiens
agttaaaaaaagggattctgaaactgtatatacggttagatcccaattatacttttatatatgaagaaaacattaaaacatcagccatgattatcttccagttttagggtaatgggcaatttattttattctttgtccttttctgtattttcaaaatctgaaaaacattaaatgaagactctggataaagagaacagacgtctctacctggaagaactggagctgcttctctaggctccagaagaacgggtgtttgagcacrtgcttcgctgaggggcgtttctgaggatccatcgcaatcatcttctctatcaattcacgtgcaatgacgtcttctataaaggaggaaaataagcaactcatgactaccagtccaaagccacagtgaaataccaaaaactttaaaaagctgcacaccctctcatttatgattctatttacaggaatttattccaataaaataattaggaacagacacaaaacctcagccaaagaggtgagtcctcactgcatggtttgtgaaggaagtgactgtaaacatccagtatcagaggcccaagtggatacactacggtgcctccctacgctgggccatgagctgttaaagtgcggctgtgactaaatatggatt

SEQ ID NO: 732310 - DNA, 544 bp, Homo sapiens
gcagagattgcaccactgcactccagcctgggctacagaacaaaactccactaaaaaaaaaaaaaaaaagaaaaagaaaaagaaaagaaaagagaaaaaatgtcattcgtcattatctgttaaagatacagactatggctgggagcagttggctcacacctgtaatcccagcactttgggaggccgaagaaggtgcatcacttgagcctaggagttggagaccagcctgggcaacatggcgaaaccctgacctacaaaaattacaaaaattagctaggcatggtggtcccacctatgcaggaggctgaggtgggagaatcacctgagtctggggaggtcaaggckgcagtgagcagtgatcgtaccactgcactccagcctgggtgacagagaaaccctgtctaaaaaaaaaaatacagactaaagtatttacaagtgaaattatatgttgggatttgctttcacaataaaaattgggggacagatgcaacaggaattgtagaatgttgatagttgttgaagctgggtgataggtacgtggagg

SEQ ID NO: 732311 - DNA, 626 bp, Homo sapiens
cgatccaccagtgctgctcctgggcccgggagaactggagaagccaggcgggcaggtgtgggtaggcagccccctgccctcatcccgggcctgccctcccccagcctgcagccccctgctcaatccaatgcccaccttctgcaagttgtggctcaggaagtctagctccgcctggctgtgcacggaggtcagctcggcctggaaccacgtgcagatgcgctgcgcctgcgcccacgtggagtggtgctcaaagaacttgtactcggcctcctggaagcgcagccattcccgtcggcctgcaggagcagcgcgggcgtgggagcggcggccaggcagaggctgcacgccaggccccggaggcgggcgcggcagggccggggcagagccaggcggcagcaggcgagcctgcaggcacaccggacccaggcaggcaccgtgccaggccccaggccccaggcttgcctcgcctcccasacggaagcaaacagggctgtggctgcctccgtccgagccaaccccgtcccccttctctcgaccggaactcctcatcccctccatttcattcaggcctctcgggacttaccccagagttgacgccctctcccacgcgatgggtagcgggatgg

SEQ ID NO: 732312 - DNA, 599 bp, Homo sapiens
ccagtctgggcaacacagcaacacctcatcattacaaaagatttaaaaattagcctgtaattcccgctacttggaaggctgaggtgggaggatcacttgagcccaggggttcaaggctgcagtgagctatgatcacaccactgcatttcagcctgggagacagaatgagatcctgtctctaaataaataaataaataattgaaaagacgttaaaattcagatatcaaaattttaaaatttttaaattgtgagataaaattattcaggttcatacctgcattccacatattttataacatatagcatttcatcctaaaactcttttattttgtttttatattgctttattcattcagaaattataatacaattattatttgtcaattaaaaataaaataaaattttttaaatttaaaaataaraaataaggaaactaaagtcacttgtgtacaagacaccgtgttgggtaccatggggatggtaattaataagccacgcccccccccgagtggctgacagtgttggtaaactaaggcattatacaaatgtctgtagttcaaaactgtgtctgatgagcataataaaaagactatgggggc

SEQ ID NO: 732313 - DNA, 492 bp, Homo sapiens
cggtggctcacgcctgtaatcccagcactgtgggaggccaaggcgggtgaatcacctgaggtcaggagtttgagaccagcctgaccaacatagtgaaaccctgtctctactaaaaatacaaaaattagctgggtgtggtggtccacgcctgtaatcccagctactcaggaggytgaggcatgagaacagtttgaatccagcaggccgaggtttcagtgagtcaagatcgtgcactgcactccagcctgagagacagagcaagactctgtctcaaaaaaaaaaaaaaaagtcaaaatacaatagatgctggcaaggctgtggagaatagggaacacttacatactgttgctgggaatgtaaattagttcagccactgtggaaagcagtttagagatttctctaattacttaaaacaaagcttccattcaacccaacaatcccattgctgggtatatacccagaggaaaatagatcattataccaaaaagacac

SEQ ID NO: 732314 - DNA, 717 bp, Homo sapiens
ttttttctcattgcttcatctgtgcatatatttataaagcatgcacagtataccaggcactgggccaggcactaggagtcaggagcaaacaagacagatgcaggtcttgccctcacagatcttaacgcccagacaatttacctggaatcctgtctttaaatcttgtctcttgtaggatgtgttggtgttgcgagatcccatatattagctcactttactatcatgctttgaggaaacaggcagaacagaggttacttcccttccattacaaattgagtccctttggtcctgcacagttaaaactctgcctaaagtcacagtgtccggtggccctgcactgcccaccttagccggcagcgctttccaggtaagatgcactccaggggcccctgctcactgaattggaacacacccctgccatccttgctctgccgcacaggagagtctcagtgggcctcargctgtcattgctgtgaagcacaggcctggcctggctccatctcagccaaggacagatgtcctcagacacacgcagtcacctaatcacccttatacctaggagcactcttgaatatatttgaagacttgatagaacattcagccaggctgtcagcttctttaagtggaatatattgagaatttccgtcagtagcaagtctcttggcctaaatgaatattagcaaaatggagaaaacagctggcaggtgggctgagatc

SEQ ID NO: 732315 - DNA, 485 bp, Homo sapiens
tccgggttcttctcattggaagttggtcttctgctgcccttgttatgaggccagtcaagggaggagtctcggttctccaattataggtgccttctcctgacctccagtttctgagggcctggacccatctttggcaagtcccagggcaatcagagcagttcagacctttccaaaagagcactcagcagcgcctgatccttgctgagcwtcgtggagaatggaggagtgtggtagcgagctgaggacctgagttgctctggggacttggtaactgtcccatctcctctttgagcctctggggtatggcggccgattgagagtcttccatctctctggctgactgcctctctctgtctccatggaagaatcacgccgaccttgttgaaaccatcatccaggtgctctggaggcagcgcctgcctggaccagagcaagttcagccgtgagcccagcctctgtggctccctgcttgggatccaagtgct

SEQ ID NO: 732316 - DNA, 656 bp, Homo sapiens
aacagaaataaagtacacaataagtgtaatgtgtttaaatcatctcaaaaccatcccccaccccgggccatggaaaaactgtcttccaggaaactggtccctggtgccaaaaagattggagaccgctgcccgggcacggtggctcatgcctgtaatcctagcactttgggaggccgaggtgggcggaatgcctgagctcaggagttcgagaccagcctgagcaacacggtgaaaccccatatctactaaaatacaaaaattagccgggcatggtggcatgcgcctgtaatcccagctacycgggaggctgagacaggagaatcacttgaacccaggaggtggaggttgcagtgagctgagattgcaccactgcactctagcctgggcaacaagagcgagacttcgtctcaaaaaaaaaaaaacaaaaaaaaaaaactggagaccactgacagggaatacactcaaggtaactatgctccccattcttcccctctcctgaggctgtccctccccatctccttctcctgctacagggaaggggcagcacaggtcctctgtgccccagagcccctcttctaccctgcctgtgacgagggaagtcaggccacctgtcccaacctgaggaagctcagaaaacaccaagtttttcactggga

SEQ ID NO: 732317 - DNA, 629 bp, Homo sapiens
aattccaacgtagtttcaatgcatgaagtttatgggtgtaacacgggttttatcttggatcttttaaaaaacttaatttggggacgggtgcagtggctcacgcctgtaatcccagcactttgggaggccgaggcaggcggatcacctgaggtcaggagttcgacaccagcctggccaacaagtgaaaccccttatctactgaaaatacaaaaattagccgggtgtggtgacacgcacttgtaatcccagctaccctggaggctgcggcagaattgcttgaacccaagaggtggaggttgcagtgaaccgagattgtgccactgcactccagcctgggcaacagagcgagactcggtctcttaaaaacaaaaaacaagaaacaaaaacaaaaaacttaatttagctttggyaggcagcaagtcactcttgctgtaatggaaggtgaaccctctgtccatttattgttgaggatcattattcttccaggatgctgctattaaagattgcgttgcagattcaaagggtgatggtgagacacagatttgaccaagggcaggcagctggttctgagtccttactaggggcaagtataggggccctgttacctaaacaatgatctgtaagcttga

SEQ ID NO: 732318 - DNA, 493 bp, Homo sapiens
attttccaataaaaatatatggtaggaaaacattccttcttaaaaaaagatttgttttgaaaaaggagaataatttttgtctaattcaatgcttatttaaaggttatgtataagcaaggtaaaaggaaccaggaaataagagagatgtaaagaaagttatagaaataaaggccyggcacggttccttacgcctgtaatcccagcacttcgggaggctgacacaggtgaatcacttgaggccaggagttcgagaccagcctgggcaatatggtgtaacctcatctttactaaaaatacaaaaattagccagatgtggtggtgtgcacctgtaatctcagctactcgggaggctgaggcaggataatcgtttgaatcccagtggcagaggttgtagtgagctgagattgtgccgctgaattccagccttggtgatagagtgagaccctgctcaaaaaacaaacaaaaagagaaagttatagaaataaagaggtat

SEQ ID NO: 732319 - DNA, 629 bp, Homo sapiens
agcttcttgacttcctctgcacacttcccttccctcttctcagtctctaccttcttcccacaggactgccagcagcagcatctgaaccgaaggctgcattgcctgtctcagggtatgtgactttgggatgtttttcctggagaagcccacctggggtgaatcaggccctgaaaactcctatgggtagcttttgagggttcatcccttcctggacagctccttttttctggccaattgtgcmccttattgggttgccatctcctaggcctctctttccccaggtcctcctcaataaggttgcaagtttcccagcttctcctggagtctcttttctctgaaagcagcatcctgccttattgaagttttctcaagacagcccacatttttaggggaatagacctggataaaaatgacaaacatttccattgtaatacatttctgagacatttaaaaacattcacgaaagccatcctgtggtgtgctggcattgaatggggagtaggggggaaagagggtttgggagggggtgtacggtaaggaaaagacaccttgcagtaggagaagccaggagtggaattgcaggctgagctcggagtcctggaagacttcacgcttgctgggaagcagag

SEQ ID NO: 732320 - DNA, 629 bp, Homo sapiens
agcttcttgacttcctctgcacacttcccttccctcttctcagtctctaccttcttcccacaggactgccagcagcagcatctgaaccgaaggctgcattgcctgtctcagggtatgtgactttgggatgtttttcctggagaagcccacctggggtgaatcaggccctgaaaactcctatgggtagcttttgagggttcatcccttcctggacagctccttttttctggccaattgtgccccttattgggttgccatctcctaggcctctctttccccaggtcctcctcaataaggttgcaagtttcccagcttctcctggagtctcttttctctgaaagcagcatcctgccttattgaagttttctcaagacagcccacatttttaggggaatagacctggataaaaatgacaaacatttccattgtaatacatttctgagacatttaaraacattcacgaaagccatcctgtggtgtgctggcattgaatggggagtaggggggaaagagggtttgggagggggtgtacggtaaggaaaagacaccttgcagtaggagaagccaggagtggaattgcaggctgagctcggagtcctggaagacttcacgcttgctgggaagcagag

SEQ ID NO: 732321 - DNA, 542 bp, Homo sapiens
gactgccactcattgagacacgaagcttaagaatgtcaagaggactaagtctttaataacaacaaagccctattttttatagtagaataaatgtcctgaccaaagaaactatttcactcagaaattaagcatataatagatccagtcacagtagctgtcagacttaagcagttgcatatgtacaaggaatgggrtgcagagaatagaagactatatatagtaaggttatgattctctggtgtcgaaaggagtgtgttgttacaaactccctcttctcttgatcttatctgaacaagaaagtaaacagaaaattctcattacctctcaatgtcagtgagcctggaggaatcccggaatcctttggcaaaaggattgctatctattttcagcttcgttatctggagaaagaatgggtacaaaacagtatcatttatgaggtcaaggaagtaaaatcagaaatagtttgttcattctccatagcacaccaagaatatcttaatgtttctcagtgtcctgagaagggtggaaaatgctacacatgt

SEQ ID NO: 732322 - DNA, 632 bp, Homo sapiens
ctgtactatagtcataaatcagccttctagcttttaaatccttattactattcaaaagtaacagcagatgaaagagtgagaaggatcggcagaaatttatcacaaatgctgaacaactcactactgatggtgcatcagcagcaaggttatacctttgtcaattaccctcaaactagaatttaatacacaagtctaccagagattaaaatgaaagctttacctcactgtgttcaaggagctgttttctagaataaaacaaaaatattatctatttactgaaggtcttttatactatgaatacataaaaataagcttcatttgtttgatcttagatttttaaaatgtgactatctctaaactacttaggaacatacawaaaaataaaaatatcagataatagtacaaaaattataacaatttaaaagttatagtcataatttatagtcataatttatagtcataatttatagtcatcctattcaagatatgtcaaaaatttgttctttggttaagacaaaatagattttacagatccctggagattgtacctctcattaataaatgaataggatgaccttctattcgacctatatatacagtgtatacagtactttagatgaccactgttaaac

SEQ ID NO: 732323 - DNA, 625 bp, Homo sapiens
tatgtatgtaaattcttttctattctctatttactatctcactctccaaatgcaaactgagttctcctttcttttttctgctatttttaaattcatgaacgctcattaatggctcacaaaatgtgatgccttacagactggagctggcattctgtcctggttctgacctgtgctcagtagagactgattagcatcagtaataataataggacagggttgcaggctgcttagtacaggcagatgaacaagtatccaagtaagcagaccttatggggggggcgrtggggaagagctgttatgtattactgcatattctggccttgtaaagaactacttcctttgtagatcaacgtcagcaaaatttgcctcctccaagaattacccaacatttttatggatattagagaaaaggtgctgtggaaggttggggttttttttttttttttttttggtcatggttattttgtttttataaaccttttggtagcatatctactctctgtaaactacctttgagaaaaccccaaatacataatatatttaataccttcctttagatatggcaaaaacacaatctggaatggatggctgttctgatcaatcccggtagctctgaacttggatg

SEQ ID NO: 732324 - DNA, 609 bp, Homo sapiens
tgttatgctcctcttctgtgtttatgtggtttttccaaaaatgaatgttttttaggcaggttttcttaacagaggcaccattaaccttttgggactaataattatttgtcatgggaagctattctgtgcactgtaagaatgyctgatggcgtctctggcctctaccccctaaatgccagtaggaccttccctcaccctagttgagacaacaaaatttttccagactttattatatgtgcccttttgggggttggggtaaggtcaaaataatccccaaggctgggagcagcggttcacacctgtaatctcagcactttgggaggccgaggtgggcgaatcatttgaggccgggagttcgagaccagcctggccaacatggcgaaatcctgtctctactaaaaatagaaaaattagctgggcatggtcgcacacgcctgtagtcccagctacttgggaagttgaggcaggagaatcgcttgaacccgggaggtggaggttgctgtgagccgagatggcaacactacagcctgggcaatagagcaagactccatctcaaaaaaaaaaaaaaaaaaaaaaaaatccctggctgagaactattggattagggcc

SEQ ID NO: 732325 - DNA, 524 bp, Homo sapiens
agcagcataggaagaccctgtctctacaaaaaatacaaaattaggtgggtgtggtggcatgcacctgtggtcccagctactggggaggctgaggtgagaggatcacttgggcctgggaggtgaaggctgcagtgagctgtgattgtgccactgcactgcagcccagaggacaaagtaagaccctgtctctgaaaaaaaaaamaaaaaagagaacaaaaaggaatataaccatgtactatttgtatgataaaaaataaatttaaattgcctcttattttaaagagagcctaccaaatttaattttaaaatgaccatacaattgcaatcaacagtggttgatttggggcatggaggagaaatatctttcctcagaggtaccgacctcaaaattctggaccaagaaggatcttacaatgcagttagctttttgtcatatttggagagaatatactcacagtttctcagtccaactgtatgctttccatacatttccatcaatgtaagaaatatagtttccttggaaa

SEQ ID NO: 732326 - DNA, 580 bp, Homo sapiens
taggacttcaatgtggagatcacagttcaagctgccacactaagtgagctcattcacagtgacaagactagggacatacaaagggccggggtgaatatgaatggtgttccatggtgctgcctgaaagtgactggcagcagtgtcagcaggggagcatgtcctctgttctcagcattcactagagaggtgtgctgagctggggcccagctggacacattggatgctgtgctccagaggaggaactgcactcacctatcgctctcctttgtatgggacaagtgggacagagccttgatggggggaacacaccactggggttccaggcagccttaactakcgaggaatggcaggaaattctgtctgcccagcacctggtgaccctggagctcctcagtttcccgggaagttgagttttggagcagtctcttccagagaggctgggagtgcatcactttccccctggaggtggcggaggctgctgggcccaactagctcattgccaggcaatccagagagagttccagacaccagatactgaacaacctacttgtctccacacctagtaaagcttggatccaat

SEQ ID NO: 732327 - DNA, 664 bp, Homo sapiens
gggcaaggatttcatgaggaagatgccaaaagcaattgtaacaaaagcaaaaattgacaaatggaatctaattaaactaaagagcttctgcacagcaaaagaaactatcaacagagtaaacagacaacctacagaatgggagaaaagttttgcaaactatgcactgacaaaggtctaatatacagcatctacaaggaacttacacaaatttataagaaagaaacaagcaatcccataaaaaagtgggcaaaagacatgaatagaaacttttcaaaagaagacatacatgtgtccaacaagcatatgaaaaaaaggtcatcactgatcactagagaaacgcaaatcaaaaccacaatgagataccatctcacactagtcagaatggctattactaaaaagcyaaaaaataacaggtgctggcaaggttgcagagataaaggaacacttacacactgttggtgggagtgtaaattcgttcaaccattgtggaaagcagtgtgcaattcctcaaaaacctagaaacagaactaccatggacccagcaatcccattactgggtatatacccaaaggaatagaaatcattctgacacaaagacacatgtatgtgtccattgtagcaccattcacaggagcaaagacatggaatcaacctaaatgcccat

SEQ ID NO: 732328 - DNA, 557 bp, Homo sapiens
tcattgttcaattcccacctatgagtgagaacatgtggtgtttggtttttgagcctggaccaactctttagtgaccatccagcctattcacaggtggcatgtgaagtggctgtggaatgagctgggtctggggttaggaggggaccctggttcagtcgcggattgtctgtgtgaactggaaagacttagcagacttctttgatggtcagagtctgtgaaatgaggataagttcacctcccraattggccatgtgtgatgcccaaagcacttgcatactgtaggagctctccaggaggaggccacgttcctccaatgccctccatccccagcacggcatcacctgctggtctccagcatgaggggtccgggcatccggcttccacctgggagctcactgccatgtgtttgcctcctcctcagggaagtgtaccgtgtgacggagagtctacagcgtgagaaggccgggctcctcaagcagctggatttcctaaggtgcgtcggtgggcactggcctgtgctgagagcacctcccagaagcctggggtcggaaggacca

SEQ ID NO: 732329 - DNA, 663 bp, Homo sapiens
agtcatctccacttgctcatcccttcattcctctcaggctcattgggagctggctctgggcccatactcagtgcctgctgaccccttgagaggtgcggaaactgaggtcagctgcactcactcccctcaaatcttggaacacatgcccctccctgttctgacatctaagccagagggggaatgtgcagagcaaaccccacaggacagaccattgtcttctgaggctgccccaccctactgtgtgtttgcagagagggactgcagagcagcagaggagaggggtcaagggagagggagggagtgtgtagctgggtagcactacactgctgtctgctgagcagaatggatgcacttggtttcggggtttttgttgttgttgttttttgagacagagtcttgctttgttgcccaggctggagtgcagtggtgcaatctcggctcactgcaacctttgcctcccaggttcaagcgattctcctgcctcagcctcccaagtagctgggattrcagaggtgcgccaccacgcccatctaatttttgtatttttagtaaagatgggatttctccatgttggccaggctggtcttgaactcctgccctcgtgatctgcccgcctcggcctcccaaagtgctaggattacaggtgtgagccaccgtgcccgg

SEQ ID NO: 732330 - DNA, 613 bp, Homo sapiens
attggcttctaattttctttctgtatctctgggtctcttggaggacctcctcaactctggcaactccttatatatttgtctttcctgggactttctctcaaccctctgctattctaactcaagatttttcctgggagattacatccaaatccattgcttcaatgacctggtgtcccccttcataaaatattatgcaacaattaaaatgaaaactgtactggggggaggttattccaaatggcaagcaaaaaagaaaactatttttatatactctatgttgtttctgatgttatgatcttaagtttcacgtaaaattctatctgtcctatgacaaccacataaaaattatgtatttgtgtagatgaggattagaaagggaagtaagaagacatacttagatttggcgtatggtagatgagtgaacatgtcctgcttgtttacttagcttcccttcctttgggaaacsttccatcccttgctctagtctagagaagcatcagtcacagtgccttcaccatcactgtgggcttggggcccagactggccaagcatcccagtatcccagtcacaatttctgtgtcacaatcattttggagactccctgttagcaagg

SEQ ID NO: 732331 - DNA, 568 bp, Homo sapiens
tatccccaaattaatgtcagacaccaaaccacagattcaggatactcagagagtacaaagcaggaaaagagccaaaatctacacctaggtatttcatacttaatctccagaaaatcaaagataaagaaaaaatattgaaacaagccaggaggattaaaaaagaccttatttatagaagggcaaacataagaattacatttgacttcacctcagaggccatggaggcaagaagagagtgaagtgaaatatttaatgtgttgagagaaaaaaaaaaaaacccatctgcctagaattctgtattttgtgaaactgtccttcaaaagtaaaggagaaataaatactttctcagacaaacaaaaattaagggagtattttgataacgggggcatgataaagaggtcgatactttaggaagatgtaacaatgcttactrtatatgcacctaataacacagcatcaaatatgtgagacaaaaactgaaagaactgaaagaggacacagatgtattcactgttatagttggagacttctgcatcactctatcagtaatagattcagcaggcaatca

SEQ ID NO: 732332 - DNA, 482 bp, Homo sapiens
ttcccagaaagaggggtctcgtcagcgtcttagtggagaagggcaagtgcacgcgagactgcagaggagtatttgctggcctctctagctgagtgaactttgacctattctagacagcagtaaactggcaccgattatggtgcaatgtttgatcaaattattttatttatttttaatggataattcatgtaataagacacaaaatgtagaatatattwaaaaaattacacagtgaaagcagtctcctcccacctctagccctcagtcctccaatgcctgccgactctagaggtagccacgatttttgtggtgtttttaataaagactttgtaattttagaaagtgatctagttcagcagtcactttatacagggtaggaatctttttgttttaaaagaaaacaatttggaaataattacagattcacaaaatttgcaagaattgtacagagcagttctgtatacctcttacacccagttttt

SEQ ID NO: 732333 - DNA, 482 bp, Homo sapiens
ttcccagaaagaggggtctcgtcagcgtcttagtggagaagggcaagtgcacgcgagactgcagaggagtatttgctggcctctctagctgagtgaactttgacctattctagacagcagtaaactggcaccgattatggtgcaatgtttgatcaaattattttatttatttttaatggataattcatgtaataagacacaaaatgtagaatatatttaaaaaattacacagtgaaagcagtctcctcccacctctagccctcagtcctccaatgcctgccgactctagaggtagccacgatttttgtggtgtttttaataaagactttgtrattttagaaagtgatctagttcagcagtcactttatacagggtaggaatctttttgttttaaaagaaaacaatttggaaataattacagattcacaaaatttgcaagaattgtacagagcagttctgtatacctcttacacccagttttt

SEQ ID NO: 732334 - DNA, 599 bp, Homo sapiens
gccacaaggtcttcaagttcaacctgcctctaatgtggcgagagggacagattgtccacagtagctcagcttgcacccaggagctcagctggatctccatgccctgcggaaggcagcgagcactgacagccagtgccttcttcagaacacagggcacgatgaaagagatactctatttagtcacactagtactgtgggtaagaacatgccttttcactgtgcacttatttgcatagygttgcaagcaggcaccaggatacaggaatataattgtacatgtcaagtgcataaaggaactcaggataaggggccagttaggacaaagagttatgacttgatacagatcaattcagaaaatgtttatagagttaacatatgagcatctgtaggttaggcacggtgagagagaaagagagaggttgagtcagtactaacagagatgtttctccttgccaccatgacttgaaacagtgctgtgagttgcagtgtacagtaggggataaaggaaaccatcagtcgtctgtattaccctcagctgctcagacgtatgttcctgcctttttcgtcctccttgaggaaggtggtttaatcatttatcg

SEQ ID NO: 732335 - DNA, 427 bp, Homo sapiens
tttactcaatactagcattttattaaaaacttgttttattggccggctgtggtggctcacgcctgtaatcccagcactttgggaggccgaggcgggcggatcacgaggtcaggagatcgagaccatcctggctaacacggtgaaaccccgtctctactaaaaaaaaatacaaaaaattagccgggcatggtggcggacgcctgtagtctcagctacttgggaggctgaggcaggaraacggcgtgaacccggaaggcagagcttgcagtgagcagagaacatgccactgcactccagcctgggtgacagagcgagactccgtctcaaaaacaaaaacaaacaaacaaaaaaatttgttttattaaattgtttctagtatcagcatttctaataccactcagggtgcctgcctgtatgatggcatacc

SEQ ID NO: 732336 - DNA, 577 bp, Homo sapiens
aaaattttcttttttttgaaaaagcagatgatgcggagaaagcacaaaaacaaggacaattggaaactcctggaaaactgcccagtcacccaaagaaaaagtcttggaaaatccctatgtcacctgaccaattcctcctgactgttagcgccctgcagcacgcccgtaattccggggaatttgcctatccctgtaggccccaaacagaaattactgatgtctggggaccttcaatttcatacccaaggaaggtcttgaatttcaaaggaaaatcaatccaacgtgcagttgatcggttgagattgagcaatcctcctatagatgtgaaacgaaccagtattccccttgaaatccagaaactgcagcccaacttgaagatctctttgcacagtcctagagcccagtccaccatacccsagcccatgattatccgctccaggttctctggcagcttaaagggtggagaccaagtgaccagttcaattgaaagggctgtgtgcagtacgggtcccctgaccagtatgcaggtcattaaaccaaaccgcatgctagctccacaagtgggcacagccaccct

SEQ ID NO: 732337 - DNA, 623 bp, Homo sapiens
acacagatgatggatcctcctcctggaggcactttgtttggtttccaggacactaccccctcctggctcaccttatgttccttggtacttctttttcagtccccacagcctattccttcttatctttgtgatctctaattattggaatgcyaggagtctgtcttagccatctttatctttttagttgttcaggacaaaaactttggaatcttccttgattccttttatttacccttcctccacctccccagtcagtcagtccatcagcaaatcctgtcagctctaccttaaaatgtacttggaatctatttctcatcacctccactgcatccatcttagaccaagccactacttcttggcctcgtgattaaagtagtttcctaaccagtctcctagcgttgtgcttttgtccctccttcttctcccctccccctccagatttttactacagtagccagaattctctttctaacaggtgagtcagaacatgcagtcttacacttaaaacactccaatggatctccctttcaatgcttttttggttttagcatcttaaaatgtcgtttagcatcttaaaatgtccaaaatcaaactgctgattttgccccgaaatcttttgtgtc

SEQ ID NO: 732338 - DNA, 623 bp, Homo sapiens
acacagatgatggatcctcctcctggaggcactttgtttggtttccaggacactaccccctcctggctcaccttatgttccttggtacttctttttcagtccccacagcctattccttcttatctttgtgatctctaattattggaatgccaggagtctgtcttagccatctttatctttttagttgttcaggacaaaaactttggaatcttccttgattccttttatttacccttcctccacctccccagtcagtcagtccatcagcaaatcctgtcagctctmccttaaaatgtacttggaatctatttctcatcacctccactgcatccatcttagaccaagccactacttcttggcctcgtgattaaagtagtttcctaaccagtctcctagcgttgtgcttttgtccctccttcttctcccctccccctccagatttttactacagtagccagaattctctttctaacaggtgagtcagaacatgcagtcttacacttaaaacactccaatggatctccctttcaatgcttttttggttttagcatcttaaaatgtcgtttagcatcttaaaatgtccaaaatcaaactgctgattttgccccgaaatcttttgtgtc

SEQ ID NO: 732339 - DNA, 623 bp, Homo sapiens
acacagatgatggatcctcctcctggaggcactttgtttggtttccaggacactaccccctcctggctcaccttatgttccttggtacttctttttcagtccccacagcctattccttcttatctttgtgatctctaattattggaatgccaggagtctgtcttagccatctttatctttttagttgttcaggacaaaaactttggaatcttccttgattccttttatttacccttcctccacctccccagtcagtcagtccatcagcaaatcctgtcagctctaccttaaaatgtacttggaatctatttytcatcacctccactgcatccatcttagaccaagccactacttcttggcctcgtgattaaagtagtttcctaaccagtctcctagcgttgtgcttttgtccctccttcttctcccctccccctccagatttttactacagtagccagaattctctttctaacaggtgagtcagaacatgcagtcttacacttaaaacactccaatggatctccctttcaatgcttttttggttttagcatcttaaaatgtcgtttagcatcttaaaatgtccaaaatcaaactgctgattttgccccgaaatcttttgtgtc

SEQ ID NO: 732340 - DNA, 623 bp, Homo sapiens
acacagatgatggatcctcctcctggaggcactttgtttggtttccaggacactaccccctcctggctcaccttatgttccttggtacttctttttcagtccccacagcctattccttcttatctttgtgatctctaattattggaatgccaggagtctgtcttagccatctttatctttttagttgttcaggacaaaaactttggaatcttccttgattccttttatttacccttcctccacctccccagtcagtcagtccatcagcaaatcctgtcagctctaccttaaaatgtacttggaatctatttctcatcacctccactgcatccatcttagaccaagccaytacttcttggcctcgtgattaaagtagtttcctaaccagtctcctagcgttgtgcttttgtccctccttcttctcccctccccctccagatttttactacagtagccagaattctctttctaacaggtgagtcagaacatgcagtcttacacttaaaacactccaatggatctccctttcaatgcttttttggttttagcatcttaaaatgtcgtttagcatcttaaaatgtccaaaatcaaactgctgattttgccccgaaatcttttgtgtc

SEQ ID NO: 732341 - DNA, 584 bp, Homo sapiens
tagtattttcttagtcctattttgtgatatagattctttttttctttgtgtgtgctcatacattcatactttccttctttggatttggaagcttattggaagcttattgtcttttttcagttcttctggtagttacctttaattactttatatgttatatcattaccctctttcatgaattaggaaatktattcagtatttatggagttcctgctctggaaaatgggaaactttacgctaatatggtttctttaacttctccctcctcctacctctagagttttgcttattatagtcttattttagtccttctagtggttttctttgtaacattaattaatgtacttaaacctgtttattgacttaatagactctgtttagaaagggaagaaaataaacactcatattccttcctatgagtttcctcctttctctcttgtttgttccaatgttatttttgtgttaccaagttttataatagttatcttttgaaaacatatttcttactggttgttcagtctttgatctgttttttaaaaaagtcaattcattgcctatcaccagtcttattgcagcttctcctt

SEQ ID NO: 732342 - DNA, 584 bp, Homo sapiens
gttaaataattcagtcaaaagacagatttgcggctgggcacagtggctcacgcctgtaatcccagcactttgggaggtctaggtgagcggatcacttgaggtcaggagttcaagaccagcctggccaacatggtgaaaccccatctctgctaaaaatgcaaaaattagctgggtgtggtggtgggcacctgtaatcccaactactctggaggctgagggatgagaatcacttgaacccaggaggcggaggttgcagtgagctgagatcacaccactggactccagcgtgggtgacagcgagactccatccaaaaaaaacccaaaaaacaaaaaacagatyggcaaaaaacatgatccaactatatgttgtctacaagaggcacactttagattcaaagacacaggtagaaagtgaaagtatagaaacagatataccatgcaagcagcaatcaaaagatagctggagtgactatgctaatgtcaaacagtagattttaaggcaaaaactgtttcaagggacaaagaaggacatcacacattggtaaaaggaccaattcatcagaaaaacataacacttaaaaaca

SEQ ID NO: 732343 - DNA, 706 bp, Homo sapiens
caaactcccaaggattcctctaaacaaacaaatcaccgtttctccatttctggcagatcttccccaaacttatgaacccatcacatataaccactttttttttttccattttattttttgtagagacagagtcttgctatgttgcctaggctggtcttgaactcctggcttcaagtgatcctcttgcctccaaagtgctagaactacaagcatgagccaccgcacctggtccacttcctyttttgatttatttatctgggagttctgcccctattgtatgagtctcataaaaaccagtttttttgtttgttttgagacagagttttgctcttgttgcccaggctggagtgtaatggcgtgatcttggctcaccacaacctccgcctctcgggttcaagcgattctcctgcctcagcctcccgagtagctgggattacaggcatgcgccaccacacccagctaattttgtatttttagtagagacagggtttctactaaaccctggtcaggctggtcttgaactcccgacctcaggtgatccacccgcctcggccttccaaagtgctgggattacaggcgtgagctaccgcgcctggccccgataaaagccagttttaaagacagttcattttctccactcatttctaggagggaatcatcaatgggctgggaaactgaaggatccaattccaacccattctcctag

SEQ ID NO: 732344 - DNA, 581 bp, Homo sapiens
tttagggggtagggtgggggttcagaagaatccttcaccagctatgaggcaagtacagctaggtgggatcctggaggcttgagggagcacactgtggtggctggtctggatggtagagcgtttggtgaagcagggcacgagtcacagggaggtcgtcaggatctgagagccaagaaggggtgggtaagaggctgtgggtctcctgggcacccgggccactggcttttctgggactcacccacgcccagctcctgcagcatgctgtgggtctcctgggcactcgggccactggcttttctgggactcacccacgcccagctcctgcagcaggctgtggtactccggcttggtctccagcagyttcaccagattggtagactccatccgctccagctgcacctcccagtacacatagatcttctggttgaaagtgacatatacgaggcaggggctgttgcggccctctttgcaggcgtacaggcctggaagatgttggcagggagataaaggtcaggaagtttcagtgccgacagtggggggcagacagcaagacacagacctccgagtcagcactttccatc

SEQ ID NO: 732345 - DNA, 466 bp, Homo sapiens
gagaaaatggtttctgcttgtgacagcttgtgtccacctcgaacctatcctaccagcccactgaccacgcctaccttttcccaggtcaaaggagaatttgtccttgcgatccagactggagtcaaactttgtgccatctaatarccagccagtgtagtggacaaagactcggtccccaatcatgggcatctctgtacctgtgccctctctcttgatgacctgggaggaagggggagaaagtgagtaccccagggtttggggcagaaaggggcaccagcactgcctgcaagcctccagagggaacataaagggacttctctgtgttcatcctcctctgcctacttgtccctccagattcagttactagcagcttggcttatgagtcaactaaccttcttgtctttcttgaggtgcagcaagacttggtttgaaaaaggagacaaaaggctgagagatctgagttcaa

SEQ ID NO: 732346 - DNA, 535 bp, Homo sapiens
tggaaagtgtgtgactctagaaggtatgcagcttagagcagagtagagggcacctcactgaggttttctaaagatctatgaatttgagacccttatgattctggagcaggagaaattccagttgtcctatcatataggcaggctatgacctctgaagccttttcstagttggagactcagttactagaaacaaaaccctcatcctcatctccagatgaatctgaagagttctatagccaataagggttagcctggcacaaaggcaatttctggctgcttttagagtgcgggcgcttcctcgtgggtgcctttctgtgtgcacctgcagtgccggcgttggtcaccgctgaggagccaccagcctggagctgggttttggcaggacagagtaaaaaaaaaaccgggtttttcagtttggatgggatatatttcaactgagcacgagaatcttcccccacccacgttctccaacatcatctactctgaacaaaacctccgtaagactgcttcgataatatgatttatctcctttttc

SEQ ID NO: 732347 - DNA, 569 bp, Homo sapiens
ttcagcaagtgataatctttttgctggtggagtttcttgccttgatcttgatggctgctaactgatcaggatggtggttgctgaaggctggggtggctacagtaatttcttaaaataagacaacagcaaagtttgccaccatcaactgactctttctttcttgaaagatttctctgtagcatgtgatttggtttgatagcattttacccacagtagaacatctttcaaaattgaactcaatcctctcctctcaaactctgttgctgctatatcaactragtttgtgaaatattttcagtcctatgctgacatttcagcaatgttcacagcatgatcggcagaagtagattctatctcaggaaactttctttgctcatccgtaagaagcaactcctcattggttcaagtttcatcatgagattgcagcaattcagtcacatcttcaggctccatttctaattctagttctcttgctatttccatcacatctgtagtgactgccctccactgaagtcttaaatccctcaaagtcttccataaggactgcaatcaacttctttcaaactcct

SEQ ID NO: 732348 - DNA, 569 bp, Homo sapiens
ttcagcaagtgataatctttttgctggtggagtttcttgccttgatcttgatggctgctaactgatcaggatggtggttgctgaaggctggggtggctacagtaatttcttaaaataagacaacagcaaagtttgccaccatcaactgactctttctttcttgaaagatttctctgtagcatgtgatttggtttgatagcattttacccacagtagaacatctttcaaaattgaactcaatcctctcctctcaaactctgttgctgctatatcaactgagtttgtgaaatattttcagtcctatgctgacatttcagcaatgttcacagcatgatcgscagaagtagattctatctcaggaaactttctttgctcatccgtaagaagcaactcctcattggttcaagtttcatcatgagattgcagcaattcagtcacatcttcaggctccatttctaattctagttctcttgctatttccatcacatctgtagtgactgccctccactgaagtcttaaatccctcaaagtcttccataaggactgcaatcaacttctttcaaactcct

SEQ ID NO: 732349 - DNA, 575 bp, Homo sapiens
tttctttgctcatccgtaagaagcaactcctcattggttcaagtttcatcatgagattgcagcaattcagtcacatcttcaggctccatttctaattctagttctcttgctatttccatcacatctgtagtgactgccctccactgaagtcttaaatccctcaaagtcttccataaggactgcaatcaacttctttcaaactcctgttaatgttggcattttaatcttctcccatgaatcatgaatattcttaatattattttcaatggtaaattatatacaaaaggttttcaaattatttgttcaaatccatcaaaggaatcactatatayggcagctatacctttacaaaatgtattccttaaataataagacttgacagtcaaaataactccttgatctatgggctacagaatggatggtgtgttagcaggcatgaaaacaacattaatttccttgtacatccttatctgtgctcttgggtaaccaggcacattgttaatgagcaataatattttgaaataaatctttttttctggtgagtagatctcaacaatgggctaaaaatattcaat

SEQ ID NO: 732350 - DNA, 551 bp, Homo sapiens
aatctgatattaattcaatccagtgcatttttcattacacgtattatatttttcatcattagaagttcaatttgagtccttttaaatttttcatatctctactcaacatggtcttttacttcttgaatgtatagattataactgtctcattgtccttatctgttaactgtatcatctgtatgatttctggatctccttctattgatcaatttctcttcttyattagtgttacttttctgttattttttgtttgtttgtttttttgtttttttttatggctggtaattttttacttaatggcagacatcaagaatttgacctcattgggcactagctaattttgtattcctagaaataattttaatctttgtcctaaagttatgttacttggaaacagtttgacccctttggggcattattttgagcttcattaggtaaaaccaggaagtctttactttaggggtatttttctccattactgatgcaacacttttgtgagtactctacccattgctccatgaactatgaagttttctgctctggtgggaatg

SEQ ID NO: 732351 - DNA, 551 bp, Homo sapiens
aatctgatattaattcaatccagtgcatttttcattacacgtattatatttttcatcattagaagttcaatttgagtccttttaaatttttcatatctctactcaacatggtcttttacttcttgaatgtatagattataactgtctcattgtccttatctgttaactgtatcatctgtatgatttctggatctccttctattgatcaatttctcttctttattagtgttacttttctgttattttttgtttgtttgtttttttgtttttttttatggctggtaattttttacttaatggcagacatcaagaatttgacctcaytgggcactagctaattttgtattcctagaaataattttaatctttgtcctaaagttatgttacttggaaacagtttgacccctttggggcattattttgagcttcattaggtaaaaccaggaagtctttactttaggggtatttttctccattactgatgcaacacttttgtgagtactctacccattgctccatgaactatgaagttttctgctctggtgggaatg

SEQ ID NO: 732352 - DNA, 565 bp, Homo sapiens
gggactgggataatttgtgtatgtaagttgcccatgaaaacgaggacttgtacttctttaaatacagtgacatttctcttactcagaattacttactgtacaacttcaacagcctaggaacaggaaggcttcagagcagtcaaaataaacatcatactactcatgcactaaaactcatgaagcttactcagggcccatttgttctcggttttcttcttcagatttagctccttttggcttttattatttttaattaacacataataattgtacatatttatggggtacagagtgatattttgatacatatgtatacaaatgtgtaatgatcaaatcaggttaattagcatattcatcacctcaaacrtttatcatttccttgtgttgtatcaagctaatttttatagatgtttgttttttcctgtgttaaaggatttatgcctccacagaactggttccttgaccgagagtcaaatccaggctgcagcagtacccatttatgagtcctagcacaaattcttataaatgataatgctttataagctgcttttgcatatattatcta

SEQ ID NO: 732353 - DNA, 604 bp, Homo sapiens
acactgctcatcttttccttacacgctgtctacttgatttactagagctcttaccacattaatcatgatagctgttttaaattcccagttcgataattccaacatccctgttgtatctgagtctggttctaatgctttttctgtctcttcaaattgtgatttttgccttttaatatgtcttgtaattttcttgatagctggacatactggatagaaggaactgctgtaaataggccgttagtgtgtggtggcaaggcatgagaggagagtaaacattctatagtcctctggagcaggtctcaatctcttagtgaacctgtgcccctgggctgtgaacctcacaagtgcatctcagtccccacaccctgccctwgggtgggacagaatgactctgggggctggagtttggtatatttccctttccccagtttagctaggttctggtaaaactccaacattttaggctcttttagaacagtttctcttgaggggagacagagtactctggtgtatttcagaatggttcttttcgctctttacctgctaggaatacaaggggactttcctctgatactcactgtaagaacctggtggagctcctgca

SEQ ID NO: 732354 - DNA, 628 bp, Homo sapiens
gcaactgggtgaagagatggataaggatcctcttctttcctctgggaacttgctctcacacttaacatgtagtcaattagcatacaccaaaagaataattaataaatgcagaaatcacctagcacttcacagggaatatgaaggccttctaggtggacccaagacagaatacctgagactaataccaaatgtgtgggtttctagcagtgtgcccaggatattgagggcactggatcattccattattcatagaccaccctgagcaaagggacaccaagctgagctcatagatgctttagctatttccatgaaagccagacaccaagaggagggaatgcaggtttgatgtgatgaaaaagagtcacatctgtctacgtgtgtcccttgatctgttctcaagtgttttggttatagcatctaagtttgttttctcaacctcactgggctgaagagcaatactataygatggtatttgttattgcaataggaatagtaatgatggaaacttactaaactctgttcagaacactttgcatttatgagctcacttaatcctcacaattctgtgaggtaagagcgatgaaagacaaggacactgaagagtcgggtcaagcaacctgcccgggcc

SEQ ID NO: 732355 - DNA, 604 bp, Homo sapiens
gcagaccaccacaactggctaagtttttgttttttgctattttttagagatgggggtcttgctatgttgccctgtctggtcttgaattcctggtttcaagagatcctcctacctcagccttctgagtggctgggattacaggcacgagcttgtaaaatgtgttttaaaaggttaagtcttcttctacccaaagcccccttaagcattaagtagtactagagtagttttgtgaaaatcagcaaagggtactctttccttcagggggacacagttctgtgtcagggtgtgyggcttggtgagtagagtgcatactgaccacctcactcacttcctaggcttcaagtcctgtgtagagaacaatctacaccagggatgtccaatcttttggcttccctgggtcacagaagaagaattgtcttgggccacacataaaatacactaatgatagctgatcgatagctgatgggccacattcaaagctgtcctgggttgcatgtggcctgtgggctgtgggttgaacaagcttgatttacacaattgtagataacagtccttttgtccgggggtctggcatttcaccatttggatctcattccatatgatt

SEQ ID NO: 732356 - DNA, 635 bp, Homo sapiens
acaagtcaaagataatttttttgacctggatgattgtctcttgacttgctggggaatccttctccctgaaggaggaaggcagaaagagacgttggaataatttggaggcattcataatgcagattggaagaggaagcaaggcctagcaatagatgccaaacttagaacttcaaagcacatagttctggtttgggtcacctctcaccgtctgctgaggactatatcagcaactcacttgcttgggagtgagatgaagtatgtgaattgccctgggatttttcccagctgatgagctttgttttgaccctcagcataacgtctacgccctttcttcatcttttctttaactcctttcatctgattcctttgacactttaccatgcaatcttgaacatgttcttctatagggatgcttctatagggatattcatctgtttcccagtctagtttgtaaaattacgtasgaccacagatggagaaactgaggcttgagatcttgccagagctcataccattctttccatcagccaaacagaagagcccagctttctggaaaagcaagagaagtggctaataagaagcattcagtggggggcatccatccttttctgggattggcctccatagtagcaaac

SEQ ID NO: 732357 - DNA, 597 bp, Homo sapiens
aacagcatctcaaggcagaagaatttttcttagtacagaacaaaatggagtctcctatgtctacttctttctacatagacacagtaacaatctgatctctcttttccccacacccgccatcatgcccagctaatctttttttttttagacggagtctcactctcaccaggctggagtgcagtggcgcagtctcagctcactgcaacctccgcttcctgggttcaggcgattctcctgcctcagcctcctgagtagctgggattacaggcacctgccaccacgctcagctaatcttttttttttttttttttytgagacggagtctcgctctgtcgcccaggctggagtgcagcggtgtgatctcagctcactgcaagctctgcctcccgggttcacgccattctcctgcctcagcctccctagtagctgggactacaggcgcccgccaccacgcctggctaattttttgtatttttagtagagacagggtttcactgtgttagccaggatgatctcgatctcctgacctcgtgatccgcccgcctcagcctcccacagtgctgagatgataggcgtgagccaccgcgcccggccgcc

SEQ ID NO: 732358 - DNA, 542 bp, Homo sapiens
aagatgctggacccgtgcaatgtgaagtagaccaaggctaaggttacatcctagactgagtcctggaaatgcagagtccaaggccctggattgccatggtgggcagtgtcctaggaacggacagaggatggagagaagcacaaagagcatgcgccctggagttggcctgggtggctgcagagtccaggaatgctgtcagcatcggttctgcactgacctgttcagctcccctccctgaccttgatcttcttcactatgaatgagggggatgggacaaggggctttatagagatttctgggtctcaccctaggagatctgaatgcagtagtttgggatggggatcagcaagatttttttttttttaaacactccccaggwgattgctggggccagacgggaccagttcccatcagcaacagcatgcgctgattctgtggaatgtcccagacacactgcagcaagcacgagtattcttggttctaccactttgctgatgccctcaacctgataacacaggcagctttggaattgtcatcatttc

SEQ ID NO: 732359 - DNA, 602 bp, Homo sapiens
aaaaagcatcagctctgtgacaggagctaattcccctaagctgcgctatcacttaccattcacttggcgatttgtcatttactaaccccagacagtctttcatggtttaatttctcttacgtgtcttgtcccttagtctacgttgtatcacgcaagccatatgaaacatctcagtgaatatgcacttatgggcaccatcagattcttgtccattctgytgctcaccagggaaaaggaaaagggaaaggaacccacctgagaaatagttcgttaaaggattttgggaacattatgttagggaggcctttgaattgaatgcttgggtgctaggtccttatccaactctcctcaagggcttgtcaaatgagcaacataaaaagccaagttccaatgagaacacatggacacagggaggggaacatcacacaccacggcctgtgggcggggagggggggcgcggggggcgggggcaaggagagagcgagcattaggacaaacacctaatgcatgtggggcttaaaacctaaatgatgggttgataggtgcagcaaactaccatggcacatgtatgcctatgtaacaaacctgcacgttcagcacat

SEQ ID NO: 732360 - DNA, 614 bp, Homo sapiens
tcacctcttgggagacgagtcattgtgcttccgagccagtgaaaaaacctcggttgtgggcaaacactatctgattggctgaggacaaagcagtcttctcttctcaggtaaacaacctgaaaccgggagttctgagctgggaggagcttgtgcctctgggaggtctcacgtgtttgtggcctcagcccaacacgaagaacctggtacccagttttttcagctgttcccaggacactggttagtaaggactttaatgcacccaggagacaaagcgagtagctagggtacagctggagcctcagaaaggtgccccgggaggcaaacaaggcttctcttgcattctccctcccytttgtctccaggagacaaacctcccagtctccctcctcaacccgacctcaggatcaggttctccacttgagaatcctgtctttacctcccactcagtatggataaatgagatcattcctttgtattccgagggtagggaacatttgtcaagtacttactctgcactgggctatgtttgcaaaataaaatgagaccaaaaataataaatctttgaagccatgtttcagtattagaggtacctccacagccaccctgaccccacc

SEQ ID NO: 732361 - DNA, 521 bp, Homo sapiens
tcccggtgggctcgtggttttgctggcctcaggagtgaagctgcagatcttcacggtgagagttacagatcttaaaagcagtgtgcacccagagtgagcaatagcaagatttattgcaaagagcaaaagaacgaagcctycacactgtggaaggggaccggagcgggttgccaatgctggctccggcagcctgcttttattctcttatctggccccacccacatgctgctgattggtagagccgagtggcctgttttaacagggcgctgattggtgcgtttacaatccttgagctagatacaaaggttctccacgtccccatcagattagttagatacagagtttccacacagaggttgtccaaggccccagcagagcagctagatacagagtgtcgattggtgcactcacaaatcttgagctagacacagggtgctgattggtgtgtttacaatccctgagctagatataaaaactctccacgtccccaccagactcaggagcccagctggcttcaccta

SEQ ID NO: 732362 - DNA, 593 bp, Homo sapiens
caagcaagggctctgaggactgccagcacgctgtcacctctcaataccttaacttgcaagtaattgaaagtgggtatatgtatgactgttgacctgcccctgagctggtgctctcaacacattgcctaggggttagccctgctctgcaggagtagtcataaagttgtcacactgctgcctccataaagctgttttcttctaccaccagctggctcttgaattctttcctgagcaaagccaagaatcttccagggctaagtcccaatttgggagcttacttgccctgcatcagtgcaatcatagctcactgcagcctggaacttcggggctcaagcaatcctcctgcctgagcctcctgaatagctaagatgacagatgtgtgccactacacctggytaattttttcttttttttgtagacatgaggtctcactttgttgcctaggctgatcattgtttttaaaatttctatctttactgatttttatctgcctgacctatggataattgagaaagcctttttgaagtcaattgtcaatttatgtattttgaagctattttgtaagatgcatataaatttgagttgctgtaact

SEQ ID NO: 732363 - DNA, 582 bp, Homo sapiens
atgtgctgaacgtgcaggtttgttacataggcatacatgtgccatggtagtttgctgcacctatcaacccatcatttaggttttaagccccacatgcattaggtgtttgtcctaatgctcgctctctccttgcccccgccccccgcgccccccctccccgcccacaggccgtggtgtgtgatgttcccctccctgtgtccatgtgttctcattggaacttggctttttatgttgctcatttgacaagcccttgaggagagttggataaggacctagcacccaagcattcaattcaaaggcctccctaacataatgttcccaaaatcctttaacgaactatttctcaggtgggttcctttcccttttccttttccctggtgagcarcagaatggacaagaatctgatggtgcccataagtgcatattcactgagatgtttcatatggcttgcgtgatacaacgtagactaagggacaagacacgtaagagaaattaaaccatgaaagactgtctggggttagtaaatgacaaatcgccaagtgaatggtaagtgatagcgcagcttaggggaattagctcctg

SEQ ID NO: 732364 - DNA, 560 bp, Homo sapiens
gactctgcatgtgtgggccacttcctcttgttcttggtggtcctggaatcacactggatagcaatccatacttttcactgtttctctggaaatgaccctggcaggtggacagtgcaaatattactgccattttataaatgaggcaaccagggcacaggaagtggagggatggtgcagcactccagaacttccagggctaggatagactcctctgatcagaggactgatcccactctgacccccaccaaccgtgtcatggcagagcgaggattagttctctgcctcatgcctttcccatcagaacaaaaagtggttctcgctttttggtcttgaatgcctttacactcttaaaaattattgaggacctcaagatcttgtaggaggattatatttattggtatttatcagattgraaattaaattagagacatttaaaatatgtatttattaactcattcaaaaattataataataaacccactacacattaatataaacatcactgttttggggaaaagtaactgtttgccagaacaaaaataagcaacaagaataatacc

SEQ ID NO: 732365 - DNA, 526 bp, Homo sapiens
aggatcaatgtctggcacctatgaaggagagggaaggaagggcatctctcaccggagaaggagtgagtcttccagacggcagcaggagactggtcccctgggatgtggtaggcaggaggtgtgtggctgggcaatgtcttggggctgagcccaccttcatgcccattttctctaacacaaaaccctcctccatggaccactgagagaactctttttttttttttttggagacagagtcttgctctgttgtacaggctggagtgcagtgacgcgatctcggcttaytgcaacggaaaccacctttgcaaaactatgactgagacagtgaaagagatctaacttcaccaaccatcttgcttctaatctctctctttttttttttttttttttgagacagagtctcgctctgtcgcccaggctggagtgcagtggtgcgatctcggctcactgcaagctccgcctgctgggttcacgccattctcctgcctcagcctcccgagtatttgggaatacaggcgcccaccac

SEQ ID NO: 732366 - DNA, 645 bp, Homo sapiens
tgaagtgcagtgctgggccctgtggcctgacgactcctactggaccccatacatgaccatcgtggccttcctggtgtacttcatccctctgacaatcatcaggtaagaagccgtcaggacaggaccacacgggggggtggggcggggggggctttcctgtttctccagctgttgctctcctccccaacagacccatttttcctagtgcccttgagggaactgaccagrccacaagattttatgtgtagctaccataggctaagcccaatttcttcaaagtagagtaaggagaagggaattaacaattactgggtatatagggcaggcattgtgctaaatagctaacaattatcacattagccacagtataaccctgtgaaataatttccattgccccaatttaatgaatgatgaaactcaagctcagagtgattaagtaacttattcaacatcaaacaggattgatatccaggtttttctgaaatcataccatattatttcttttatatctcgcagccttccaaatataaggcaaattaccagtttcagggattttgtaaatgaaaagatagacatacttgaaacaaactgaacacaaaactcagtatgcactaatatgctaaactgtctatgcagtggagtcag

SEQ ID NO: 732367 - DNA, 522 bp, Homo sapiens
agaacattgttaaaaatatatatatatatttctaggtcctacactggaaatgataattcagtgggaattataagaatccatagaatcaacaaaccggggtttatagtgcatttgatgcctagccagacttttgccttagtaaacttccagagacactgtctagtgggctggctcagtgcaggctgcgtttcaaggaccacagcatttggctatgttcccccagacamccacttttcagtttagtaaatcgaactcagtcacacatagaaaacgtcaactgttttgtcaatgacagatataagcacaaattcttcaatttttaagagtaataattcatgctgtaataacattaaaaatcaagaaagcttttattttatattttaattctagaattcaattggcagggttttatatgttatttcattcttagatattgctgtttttaattaaagcaggacacaaacctatttaagaaactatcattttaaaatttaagaactataagtagcaatttttctgtat

SEQ ID NO: 732368 - DNA, 611 bp, Homo sapiens
aataagcagcaattacagtattatcactgtataaatagtatgccctaaagacaaagtggtgtatttgactacataataagtgaaatataattctatattaccaaaactttgaaagcaaattttctatgctctttctcattctgaatggcttcctcytccaacctctgagtcttgctcagctgctagtttcttgaacggcattctatcttctttcttcagtttattttgcattatgctaaaataatgccttgaataacttttttcacacaatgagcctatgtctgtaaatagaatttctgagttgcttcatgttggaaaattctttattttgccttcaaactttgttaattgtttgaattctagattcagaagcattttccttcagaatattgaagaaacttctctcttctagcttctattgatgagtctggctcttatttctttatagataatttatcgatggttttctgaggatttcagaatttttatccttatcctttcatcacgacgtgactagatgtgagtcgcttttaaaattcatcatactcagcatgcagacggcccaatcaaaaggcttgtctttcttctatagaagacacattttctaaaaa

SEQ ID NO: 732369 - DNA, 552 bp, Homo sapiens
cacttttaagagacataaattgacacattaaagaagctaaatcctgaacttcaaacaggaaacttccaaagaagcccactagaagacacatcataggtaaacttctgaaaatgaaagacaaagaaaaaatcttgaaagcagtgagagaaaaatggcactttacctatatgggaaaaaaacttcaattaacatcacatttgtcatcagaaaacacggaggctcaaagaaagtaacacartatttttttctgagtacaaaggaaaagaactatgaaccttgaatcctatacccagccataatatcactcagtaataaaggggaaatcaaaccattttcacatgaaggaagactaagaatttgttgccagtggacttactctaaaagaatgactaaaggaagatctcttaacaaagggaaaacaaatgaagaagtaactgtggaacagtaggaaggaagaaaaaacatagtaagcaaaaacatggttaaatactataagcttttcttctcctcctaagttttctaaattatgtgtgagagttgaggcaaaaacaa

SEQ ID NO: 732370 - DNA, 552 bp, Homo sapiens
cacttttaagagacataaattgacacattaaagaagctaaatcctgaacttcaaacaggaaacttccaaagaagcccactagaagacacatcataggtaaacttctgaaaatgaaagacaaagaaaaaatcttgaaagcagtgagagaaaaatggcactttacctatatgggaaaaaaacttcaattaacatcacatttgtcatcagaaaacacggaggctcaaagaaagtaacacaatatttttttctgagtacaaaggaaaagaactatgaaccttgaatcctatacccagccataatatcactcagtaataaaggggaaatcaaaccattttcacatgaagraagactaagaatttgttgccagtggacttactctaaaagaatgactaaaggaagatctcttaacaaagggaaaacaaatgaagaagtaactgtggaacagtaggaaggaagaaaaaacatagtaagcaaaaacatggttaaatactataagcttttcttctcctcctaagttttctaaattatgtgtgagagttgaggcaaaaacaa

SEQ ID NO: 732371 - DNA, 546 bp, Homo sapiens
ccactaggggcatcttgtgttataaacaaacgcacatcaacaccactctaaatccactcatctgtctcaggccgtcctgaacttctggacatcccatgatactttaaggaatctccctgctagcttaaaatttaatcttaggaaatgggaatagaaaattcacattgkgccccctaatctgaaacagtgctatctctccaaaggaagtgatatgactatcaggaaattagtatggaataaaatctatgcaataaaattcaataaaataaaatttcaataaaatattcagcagagtgttctgaaatatcagcgatctactactgggagaaccaaccaaaatatatatttgaatatactagagaagtggatttacctattatatcctgaaaagcacagagatctgactaagacaaaggttttcaaatctggctgtacactagaattactcagggagtctgaaaaatactgatgcctaagctccaacttcaactggaatttttaaaaggtctccaaggaattctaatatatagtcaaggttgagaacta

SEQ ID NO: 732372 - DNA, 636 bp, Homo sapiens
ggaagattccactgaaattatgccaaataataaaattttgggaaaaaggaaactttagagaagcattctggataattcatagttctctcagataaataactctttcaacaccaaaaccactcctatttttctagcattttataattaagtataactaaaaagtgtaacattttcctgcattattaaatagactcttccaggaagaaattaactttttatctcaatgtttcattattttcattatgaaatccattgccatgccattgggcctgtcacacaaagaatgcctcaggatgacttaggaatagtgctgtccagggctatgaccctgtaatgacctcagaaagatattttggaaacctgggtttactgttctgctcctaggctgtagcaggaggcttctttcygtctacttctctatttccacgcagacagctgggtatattcaaatggtatccaatatgaaagtaaatcatttttccaggaagggcagggtgcccttctatgagtaaagagcatgaatggtcatgcttgtgtaattcaaatataaatggacataacgccagtaaagagtaaaaccttatgaaggcatggggtagtaatgtggggtatagatggagggaaataatccacaga

SEQ ID NO: 732373 - DNA, 636 bp, Homo sapiens
gagatccctaaggatttttaaaacttgctctattgccattcattcagatgaaaagcaacaaacataaaaacccaccaaagaccaaagtaaagagaatgatttaacctgccaatggtacattcagatgtgcttcctgtawccctgtgttcttggcacaaagaaagatgctgttaagaaaattaattctatttattttggaatggagcattctctgctcagccactaacacaagaggagatggccacacacatagaatagaaattgcacctcaaagctcagtgttggttttgatttgagcttggaattgttgcatgttttgttttttgtttgtaactattaatatcaaaagcattttttaagttaatgtttacttctttttgctctgaaaggacaatacaaaggtagaaagctgaagatttcaactcactcccaattactattgtcaagtttccaatggcatgaaaaggacactcgagggtactagaatggcaactcttcacattctgggttcattccctactacagacgtgctgcagcagcggtatcctcaccctttgcttctctttctggccagcttttgataaccctttcaatccccaagggaagagaaggaaggagactgtggttgtttgtctc

SEQ ID NO: 732374 - DNA, 615 bp, Homo sapiens
gaaaatgaagacgagattgcaaatacacaaagaagtagagggctttggaggagttctgtgtgaaatggggtcttaaagcttaatctccacatcagctccgtggtgaatccacctggctgttgtgctcacaactgtttcttacccccaagaccttgggacatgccatgctcctttcaggaaagttctgcyggcttctattaatctagttgacttcccttccctctcagatgtcagcttaggtcttacttcctcagggaagacaaagaaaaccagagggaaggtcatatgatttggctgtgtcctcacccaaaatctcatcttgaattgtaatccccataatgcccacatgtcaagggagaccaggtggaggtaattgaatcatgggggtcttttcccccatactgttctcatgataatgagcgagttcttgcgagatcggatggttgtataagtgtttggtggttcctcctgtgttcattctccttcctgctgccttgtgaagaaggtgcctgcttccgccgcttcactttctgtaagtttcctgaggcctccccagttatgctgaactgtgagtcaattaaacctctttcatatatatgtgtatatatataattg

SEQ ID NO: 732375 - DNA, 619 bp, Homo sapiens
caggcaatcagaggaaaagcggctatctggtgggaaccgcataactctctcactcgatctggatttactagcactcagagagctgaggttggagccctaatattggccctggaaaccttttccgttcagcccatcaatatcgttagtgactctgcttattctgtttatttagtgcaaaaccttgaaacagctctcattaaatccactcttgagcccaccctgtgtgccctttttctctgacttcagcaattgttggawcaatgaacacatcctgtttttatcacacacattcaggcccacagctcgctgcctggtccgctggctcatggcaatgatcaagcagatttgcaggtcatgaggtcactacttgaccaagccacacaatcacatctattttttcatcagaattggagaactttagctaaacaatttcaacttacccaaagactaaacaaattattttacattgcccagattgccagctcacaggcacatcccctccttcaacaggtgttaaccttagaagactagaacctaatgagttatggcaaacagatgttatgcacgtccctgaatttggaaaactaaggtatgtacatgtatctgttgatacctattc

SEQ ID NO: 732376 - DNA, 529 bp, Homo sapiens
cttttaattggggcatttagcccatttacatttaaggtgaatactgttatgtgtgaatttgatcctgtcattatgatgcttgctggttattttgcccattagttgatgcagtttcttcatagtgtcgacggtctttacaatttggtacgttttgcagtggctggtaccrgtttttccttttgatatttagttcttccttcaggagctcttgtaaggcaggcctggtggtgacaaaatgtctctcagctttgtttttctgtaaaggattttatttctccttcgcttatgaagcttagtttggctggatatgaaattctgggttgaaaattccttttttaagaatgttgaatattggcctctcttctggcttgtagggtttctgcggagagatctgctgttagtctgatgagcttccctttgtgggtaacccgacctttttctttggctgcctttgacattttttccttcatttcaaccttggtgaatctgatgattatgtgtcttggggttgctcttctcgaggagtatc

SEQ ID NO: 732377 - DNA, 565 bp, Homo sapiens
caggagttcgagaccagcctggcctcggtgaaatccctaaacatacaaaaaattagccggacgtggtggctcatgcctgtagtcccagctactcagaaggctgaggcacaagaattgcttgaacccaggagatggaggttgcagtgagccgaggttgtgccactgcactccagcctgggtgacagagcaagacttcatctcaaaaaaaaaaaaaaagaaagaatttccaagactcattattattgattgggttctacaatttcccctaggcatttcygaaatggtatagaatatagctatgaaatttgtattctgcattacatagatgtaatattcagaaactgttgattgcattcatccatccatctatccatccatccatccatccatccatccatccatccattcagtcagtcagtcaataaatatttatggtgtggccaccatgggcctggcatgatgcttagggtgaggagacactggcgagccaaaatagaaatagtccctgttctcctggagcttattcagaaatccattaatcagattattgcactgaaggagattc

SEQ ID NO: 732378 - DNA, 616 bp, Homo sapiens
cttggtttgattttagaaagcaaaatagaagttctaagtatgctttctctgaaaagctgagactgcagataagagtgagggcagttgatggagttcattctcctctttcaatcactgcttctcatcctttcattataataatctaagaatctcagagattatgaaagagaaagcagtcttatggaagaccccagactcacagaatattagggtgtgtttcacagggaaggatgtcattacccacagttagtctttgaaacgcagttggacattatttgtaagtgcatcatagtgtcgcctccaggwtccattgaggggaacgtcattccaatgcaacatctctgagttcatctgggttattaaatggggttgagggatttgttatttttaaattagtagccccaatttaggactactcaagaccataggacaagcctgtccaaccctcggcctgcgggctgcatatggccgaggacagctttgaatgcagcccaagacaaattcataaactttctgaaaatattatgcatttgttttttagcccatcagctactgttagtgttagtgtattttatgtgtggcccaagacaattcttcttcttccagtgtggcccag

SEQ ID NO: 732379 - DNA, 570 bp, Homo sapiens
acatctgaatgtcaaaattcccagactggtagatgtcatttgtgccagtcctggggatcaaagagggaagagtattgtgagtctggagctaacaacttgtgtttcagatgtcactgcagtgatattatttttcttcacgttctttatcaccaccatggttatgttggctgccctggctcaccatttgttttactgggatgtttggtttatatataatgtgtgtttagctaaggtaaaaggctacaggtctctttccacatcccaaactttctatgatgcttacatttcttatgacaccaaagatgcctctgttactgactgggtgataaatgagctgcgctaccaccttgaagagagccgagacaaaaacgttctcctttgtctagaggagagggattgggayccgggattggccatcatcgacaacctcatgcagagcatcaaccaaagcaagaaaacagtatttgttttaaccaaaaaatatgcaaaaagctggaactttaaaacagctttttacttggctttgcagaggctaatggatgagaacatggatgtgattatatttatcct

SEQ ID NO: 732380 - DNA, 578 bp, Homo sapiens
ggtgagtagcagtcctctacaccaaaaacattcaagctgagagccaaatcaagaatgaataccattcacaatagctacaaaaagaataaataccagctgagcatggtgactcacacctgtaatcccagcactttgggaggctaaggcaggcgggtcacttgaggtcaggagtccaagaccacctggccaacatggggaaaccctgtctctactaaaaatgcaaatattagccaggcctagtggtgtgtgcctgtaatcccagctactcaggatgctgaagcacgagaattgcttgaacccaggaggtggagtttgcagtgagccaagattgtgccactgaacttaagtgtgggccacagagcragactctgcctcaaacattcaaacaaacaaacaaagaaaataaaagaataaatacttaggaagaaaactaaccagggtttagattaatatggaaccaaaaaagaccctgaatagccaaggtaatcttaagtaaaaagaacatattaatagttggaggtatcatgataactgacttcaaactatgctgcaagtctacagtaaccaaaacagcatgg

SEQ ID NO: 732381 - DNA, 638 bp, Homo sapiens
agatgtattcccttgtattcactggtttaatggcattttaagattaattttgttgttaaaataaagatacacaatttatttttcatacattggctttatagactttggccttactaaatttacttattagttatagtagatttatttgtaggttctacagtgttttcagcacatataataatgttattctggtaaaaaagacatttgatgttttcctttctaacctttctgaactttctttttaattcctccacctttttgcactgamtagaatgtccattatactggtgaatagtaaggataatgaacattattacctttttttttttggtctgaggaaaaaagggcttaatatttcacaattaagtattatgttaactgtaggtttttcattgatgttatttatcaaattgagtaaattttattttattcccacttttctcaaattatttttaaaaaattgttaatgagtgttgcatcttgtcaaatgcaatttctgtgtctaaagaggtgatgttttatttctttattctgttcatgtggtaaattacatagatcaatttttaaactttgaaaccactatgcattcctgaaattaatccctaattgtatataatgtgttactattttgatatgtt

SEQ ID NO: 732382 - DNA, 638 bp, Homo sapiens
agatgtattcccttgtattcactggtttaatggcattttaagattaattttgttgttaaaataaagatacacaatttatttttcatacattggctttatagactttggccttactaaatttacttattagttatagtagatttatttgtaggttctacagtgttttcagcacatataataatgttattctggtaaaaaagacatttgatgttttcctttctaacctttctgaactttctttttaattcctccacctttttgcactgactagaatgtccattatactggtgaatagtaaggataatgaacattattacctttttttttttggtctgaggaaaaaagggcttaatatttcacaattaagtattatgttaactrtaggtttttcattgatgttatttatcaaattgagtaaattttattttattcccacttttctcaaattatttttaaaaaattgttaatgagtgttgcatcttgtcaaatgcaatttctgtgtctaaagaggtgatgttttatttctttattctgttcatgtggtaaattacatagatcaatttttaaactttgaaaccactatgcattcctgaaattaatccctaattgtatataatgtgttactattttgatatgtt

SEQ ID NO: 732383 - DNA, 488 bp, Homo sapiens
cctctccactccatactcaggcagatctccaagcatttggaggacccactctcctggatttaaagtttagtctacaccccatccctgtgcagagaacttgggaccaaggagttttcccaactccccacccaggcataacttttggtgcttggtggycacccactagatcctccgtttgtgcttgccatcagcagaccggtaggccaacctacaggtccagccctgtccatattggtccccaccagccaggggctgagcagtgagctcataccactgtgcactccttgaatcagctctatgcctggggcaacagaaagcttctcccagtaaacaaagatcaagtatatacccagcagtgttgactgcaaccagctcttacctataagtgccatctactggcttttatgttgaactgcacagcccaatataaaacctgctgacctgagtgcatagggctacagaaacaaagccaaaatacctacccagca

SEQ ID NO: 732384 - DNA, 614 bp, Homo sapiens
cggagcacccagccccgagcctggagcacaggctggttctgtaaatggtgctgacagtagtcactcctgcagcacaggctgggcaggggcccatgcctctgtgaggccctgctttgttttattggggtcaggtgcttactaccttcaggactccagcttcttttctgaccttttcaatgctcagacgctctcttccttgccctcatccctgscccctgccccaccccctcaatgctgagggagtctcttcattctagaggtgagaagcgagggagaactgcccacaagtcaacagaaaatggacgcgagtgcccagccttgccccttcccctgggtcaggcctgtgggcaccttctacaccaaccttgtgcccgatccaggtttccagctacatgctggacatttcttcaccaaagtgacagctaaaatggatgactcctgggttctgtcttgtccgttctgatgatgatgatgacagcagtatccagccctgtagaacgttcaccaggcaccaggcactgcttcaagtgctttttgtgtattaacttatttttgctttctggtgaccttgaagggcatactcttagtaaacccgcttaacatatatagaaaat

SEQ ID NO: 732385 - DNA, 619 bp, Homo sapiens
tctctacaaaaagtttaaaaaattagccaggtgtggtggtgcctgcctatcatcccagctggtcagcaggctgagctgggaggatcgcttgagcctgggaggtcaaggctgcagtgagccctggtcacgccactaccctccagcctggatgacagagcaagaccctgcctcaaaaacaaaaacaaaaaacccactggcattcctgrgaatcaggccccagaccaggagatccccgaggggcatattactatagaggccggggcttggagccagggtctcccagaggggtttctcttgggaaagccactaggcagggtgcagggctctgctcctggtgcagcatgtgctagtgtggccagcataccccacatccctgccctggcagctccacccagcctgtgactgccctgcctctggcctccccacctccaggccctgcaggaaggagtgaggccagcaggacacggctttccaggtgaggcagtgtggggagtaggcaggttgaagggctagctaggtcatctaggggaagagccactcctacctgtcccaccccatgcatttcccagaggggacagcaaagcgagggcttctgagcactggtggggatcctgcccag

SEQ ID NO: 732386 - DNA, 642 bp, Homo sapiens
gcagtcaagaagacctggccccatcctccacagctgctttccagagtcctgggaggcagggggtctagtggcggagaagtcagactcagacagtgcggctccaactgttggctgtttggcctgcacaggctactcacctctttgaacctcctttctcatctctgaaaatgggcatgacgatggtggtaccatccccacaggcctgctatgaggaggagagattgtgtgtgctgagcctatggtgcatgggagatgctcagtaaatgtctgttatgattgtgacgagagagccctttcccattggcttggccccaacttctgttctggccgaggtggatgggagaggtgtcatgggggatcttttttccaatggagataattactgtatttcctttccctgcctccctytctgcctcctctggccctgctcggatctcatccctctcctgggcctgccagacacggcaaacaaggccctgctggccctgttcacggcagagatgctcctgaagatgtacagcctgggcctgcaggcctacttcgtgtccctcttcaaccgctttgactgcttcgtcgtgtgtggcggcatcctggagaccatcctggtggagaccaagatcatgtccccactgggcatctccg

SEQ ID NO: 732387 - DNA, 559 bp, Homo sapiens
caatggagaggggaggagatggaggagggagggatgagctggatgcattccttgttggttgatcaatggggagaggggaggagatggagaagggaggggaggagatggagaagggagggatgagctggatgcattcattgttggttgataagtggggagaggggaggagatggagaagggagggatgagctggacgcattcgttgtcggtaaggygtggcgtgtggagggaggtgggttctgcatccacctgtcttcagggacagagcttgttcccaagctctcttgagtgccagagtctccataaagttgtcacggccaaccagggaaatgaacacagatgtgttcagagatggcagagcagggaagatcttggaggttctcctgagtcctcctgactgcccacggagaggtgggcggccctctgggggtttggttcaaggaaggtcttgctgaggcgagggccttcgagaaggctgggcaaaaggtggggaggaggagcgacctccctgccccgtgttcacagctcctcccctctcctgatgcagcactacggccag

SEQ ID NO: 732388 - DNA, 588 bp, Homo sapiens
tcgtcattttaatttgcaattctttataacgaatttaggtaaaacatctttttatgattaatgaatttttaaacattttttaaaattcatttttaaaaagtattgtttcttcaaaattgtaaaagctgagtttgactatataactgtgtaacagagaaatggcatattttaaagatttttttcctccagattatggtaacccaatttatcataagcatataattcagtggttttcgctatagaaatcacatctattgcatttaacttttccccttattttgaaatgtcctataaaatccttaagcatttttattatagcagctgattatattactcttctctctttttttaacctggaaaatgtgtagttacatgtattactcttagataaagctattcctgaattgtctgataaatgactatattcttatatcatatcaagagttatctstccatgctttaagagtaaatccattcttttttttctacgaatataagtgtaagatactgaccaggccaaatgggtaaactgtgaatcaacagagcatgctaccacttcagtatttatagatctgaattcttcaagtc

SEQ ID NO: 732389 - DNA, 612 bp, Homo sapiens
ctctcaagtcggagcccttttcaggtccccagaaaacttggagaagaaaagtctaacctgaaaagccatatccctagaccatttcttctcttccagctggaaaggaactatggggcaaacaggcaatgttgcaacttaaccctgtgttaggttttttctggtttttttttttttttttttttttttttttttttttttttagacagagtctcgcyctgtcgcacaggctggagtgcagtggcaatctcggctcactgcaacctccacctcccaggttcaagcaattctcctgcctcggcctgccgagtagctgggattacaggtgcgcgccaccatgcccagctaattgtgatccgcccaccttggcctcccaaagtgctgggattacaggcatgagcctgtatgatcccagggtgccctctgtcctcctgcaagtgcttgttatctttctttttaaattaaaaaaatttttttgtggctacatagtaggtttatgtatatatatatgtatatgtatatatatatatttatggggtatatgggatattttgattcaggcacacagtgtgtaataatcacatcatggcaaatgggttatccatcacctcaagc

SEQ ID NO: 732390 - DNA, 498 bp, Homo sapiens
ggctctgtatccacattctttctccctgtgctccaggataacttcatgctcaatcctttccttattctcccagcatgtaacacctgttcctcaggcctcctccctcaataccgtctctttgacttgctctcctggcacctgctagtctcctacagagctgtgcatgaatatgtcttttctcttccactgcggactctactcctcaacrataggacctgggtttgagtcacctagctcacttcctgacatccattcatttaacattcatttagcaatcatttattgagtgcctgtcctgtgccaggcatacagcagtgagcaaaacagataaagttccattctcttggagttgacattctagtagtgcctagaacctgcctccttcattcattggcaaatattgatcaggtatctgctatttgctggtctttgtgctaaatactagggatataactgggggaaaatggtctttgtcctacaggagctcacggtgcagta

SEQ ID NO: 732391 - DNA, 485 bp, Homo sapiens
cctgtggacagtggggctctgatgcactgtctcccccagacatgcaggaatcaggcagaaatgaagttccccgctcaacatgccctttctgtcttcaacaccatgcagtctcaatagcagaggtagcatccttacaggagcaaaatttgctggtggggttgktagggagcacaaaataatgcaagcctagatgcagtatacaaacagatatgcaatacatctgcagcataaacatttcatggagggagggaaatgattaggaaatagtcttaaaagtctcctcaggctgagagaggtcaataatgaaaaacaaagttgaaacactgccttacacaacagccacacacaaacacacaaacacacacacaatcgtaaaacagaataacagcaaaaacatctagttataataaaacaacgcaatagacagatcatgtgtgaaaaccctgaaaaagcaagtcagcaggaataaaagaaaatgtgaaaat

SEQ ID NO: 732392 - DNA, 485 bp, Homo sapiens
cctgtggacagtggggctctgatgcactgtctcccccagacatgcaggaatcaggcagaaatgaagttccccgctcaacatgccctttctgtcttcaacaccatgcagtctcaatagcagaggtagcatccttacaggagcaaaatttgctggtggggttgttagggagcacaaaataatgcaagcctagatgcagtatacaaacagatatgcaatacatctgcagcataaacatttcatggagggagggaaatgattaggaaatagtcttaaaagtctcctyaggctgagagaggtcaataatgaaaaacaaagttgaaacactgccttacacaacagccacacacaaacacacaaacacacacacaatcgtaaaacagaataacagcaaaaacatctagttataataaaacaacgcaatagacagatcatgtgtgaaaaccctgaaaaagcaagtcagcaggaataaaagaaaatgtgaaaat

SEQ ID NO: 732393 - DNA, 420 bp, Homo sapiens
tcctgtctagctggaaagccccagctgttagagccaggtgggcagcctttgataagcaaatgagagccattagaaactaggtccacccacacatggggattctggctgccttcttgcccttgccccacatgttcctggcaacatggccacccccacatatccccacgtgtgtggaacatcatggcggcctgtatttgcatattcaaaggctagggtgggagggtcagttttttccagggctacgtaaatracatgcctggtcaaacctatcccctaagccctatgcaaatcagacaccgcctcctccagcctctacatatacctggcaggtatccacccaacttggggtttcctcttttgggtttggagactcctcctctctgtctctgtacgagggagcttcttgcttttgtcttctcc

SEQ ID NO: 732394 - DNA, 412 bp, Homo sapiens
ggacattcactttgattatgctccattcgagaatgctagaatgaaaatgtgggtaaatggtgaaggaattcaaggaaaagaaaatgcacccaccatgtttatgttataataccatgctggaccagacattttgtcattcaaggatgaatgtgttacaggggtccttgctcccagagctcccaagatggtggtggctgcttccaagatggcagtggcttccaagatggtgggtggcttccaagatggtggcaagcctygtgttctctgacctggagttcttggcctcacagattccaaggaatggaatcttgggccatgtggtgagtgttatagctctattagaagcagtgggtcatggaagagaaccatggaacccagtaattagtgtttagctcaattaggacgaacccag

SEQ ID NO: 732395 - DNA, 582 bp, Homo sapiens
cagcgttcttttcaatgcagggtagttttctattcaccaagttgagccccttttcacagtctgaagcctgaaagtaaaatgtaaaaagtattcgaaactgacttgcaggaagctgagggagacattaatatatatcagacttmttaatatcttcaaaatgttttaaggggaattttctttgtattaagccagagggattatgtttttattgtaaagaagaattagattaatgaaagcatttatacaaacgctttgaactttaaacaacatgtgttaagtaagctgaagtcatatcataattatatttcttaaagtgattcacacaatattttgtaagtatttgttaataggaggaatggaaacacaagaaaatcactagtaataggtacactgaatatacaatttatgggataatattaaaatgcaattattcagtctccctgagcccttaaattttctccaataagttaatccttcctgtaaatggatgaaaatttcagctagcccaggactttccaccacctctcttagggtcaataataatcctgtgttcccctaaaagctgcaaacagtctaaattag

SEQ ID NO: 732396 - DNA, 557 bp, Homo sapiens
tttttagaaaacattaaagattgaataattgaaggcactatgcttggtgctgaagaaggtctaaggaggtctacaccacagaggctgcacccactcctcagccttgctgagccacaccattctcatctctacagcatccacctctcttggctcttgtaaggattgagacatgccaccaggcttactgtaagcactgaacagctgggaggatttgatgctgtcccactgccataccaaggggcaagttttctggacttgcctagaccttatagcagattaagtacttttatttcactgaacaaagtttagagatcattttacatcactgaacaaagtttagagatttggagagtatttgtttttaattyctatggatctgcttatacttctcttttgcaaattgaaacaccgtggaagattttttggaacttaggttgagagttgtacatggcttcagagttgctgtggatttctatctccatggggccatctgtctcatctgtctatataatggtcatgcactttgcagagcctgcttcaatgtctgctatactatg

SEQ ID NO: 732397 - DNA, 626 bp, Homo sapiens
ataatgtttgtgatcgggtaagtcatgggtcagagttgttttatgcagtctattcatggcaggaagttacaagtagtaaaaagaaagagactaatgggtcagtgggtgcagcaaaccaccatggcacgtatatacctatgtaacaaacctgcacattctgcacatgtatcccagaacttaaagtataatttaaaaaatktaaaaaagagagactaatatgtagcatgtgttgaatagctcactggcaaagtccattcagggttctataacaaaatgccataaactagctagcttaaagacaatggaaatgtattattcatagttctgggggtctatgaagtccaagatcaaggtgccagcgaattcagtgtctggtgagggcccatttccttgtccatagaaagggtcttactgtgtcttcacatggtgggaggagctagctagcattttgctgtctcttttataaggacaccaatcctaatcatgaggtccctgccctcacaacctaatcaccttccaaaagcctcacccccgaataccatcaccttaagagttaggatttcagcatatgaatttgatgtgggggtgacacaaacattcaggctatagcccttgctatgagacaa

SEQ ID NO: 732398 - DNA, 623 bp, Homo sapiens
gttttagaacagaaatttattctctcacagctctggagagtgaaagtctaaaatcaaggtgtcagctcagtttgttccctgtgggtgctcttgaggagaatctattccttgcctctccccagcttctggtgcttactggtcaaccctagcattctttggcttatagacagtcactcctatctcagcgtctgttgtcatttggaattctccctgtgtgtctctgtctctttctctcttctcctcttttttttttttttttttgagatggagtcttgctctatcgcccaggttggagtgcagtggcattatctcagctcactgcaaactctgcctcctgggttcacgccattctcctgcctcagcctcctgagtagctgggactayaggcgcccgccaccacgccctgctaattttttgcatttttagtagagatgggatttcaccatgttagccaggatggtctcgatctcctgacctcgtgatctgcccgcctcggcctcccaaagtgctgggattacaggcgtgagccaccacgcctggcctcttctccgctctttataaggaccccagtcatattggataaagggcctacaccaatccagcatgacctcatgttaattaat

SEQ ID NO: 732399 - DNA, 535 bp, Homo sapiens
cttaaactgcaatgatgtatttgtcctgtcccaagatgagacaatatcctttgtaaccagggaagcctcagctttggcattgctggaaatgcaatctaagtgtttgcaatcactgtgcaatgtcagtactcagcaggagagaggggaatggcctcttctgattctctgaattccccacagtggctagcagaatgctgatcacacaggaggggtatgatgaattctgtggtttgatgttcaaacttgagggatgcagttattggccatggtcccacactgctgccttgcctcttcaggtagctgtggcattcccaagggagtgtaacaccgggagaagtgctcaacacaaatggcaagaggggcagcaaaatttccagcagggaaggctgctyttgtgtccctccacagttgggaacaggttaaattctagggccttaatgttctggcttgaagaattgtgtttagcaataaagggatattaaaattgacatggtttttggcagtggttcttgtcttagtttcctgttgttgctgt

SEQ ID NO: 732400 - DNA, 571 bp, Homo sapiens
atttctatttctggactcttctgttccagctatttatatgcctatttttaaggcagtgacacattatcttgattactatagaatttgagtaaattttgaaatcacagaatataaatccttaaattttattctttttaaaattgttttgattttgtaagtcatttgtatttccatatacaaaggcattrttctcatagaagatgatagctccatgtccctgaagaccttccagtgggacaagatgtagaggtggaagacagtgatattgtgatactgactctgtgtaagcctaatgtgcatgtttgtgttttaggtttttttttttttttttagtttcaagtaaaaaaataatttctaagatagaagaaagttgtagaataaggatacaaagaaaaaaattttttgtatattcatacaacatgtgttttaaactaagtgttattagaagagtcaaaaataataaaaggtttataaagtaaaaaagttacagtaagctgaagttaatgttaatttactttggaagaaaaattctttttacaaacttagtgtagcctaaatacacagtgtttat

SEQ ID NO: 732401 - DNA, 526 bp, Homo sapiens
ttaaactaagtgttattagaagagtcaaaaataataaaaggtttataaagtaaaaaagttacagtaagctgaagttaatgttaatttactttggaagaaaaattctttttacaaacttagtgtagcctaaatacacagtgtttataaagtttacagtagcrtacagtaatgttctaggcctccacattcacacaccattcactcactgactcgcccagagcaacttccagctctacaagctccattcatggtaaataccctataaaggtgccctatagagatttttaaaatcatttatactgtatttttgctgtaccttttctagatttatatatgtttaggtagacaaatacttgccattgtgttccaactgcctacagtcttcagtatagtaacattgagtacaggcttacagcctaggagcaataggctataccatatagcccaggtgtgtaataggttatcccatccaggtttgtgtaagtacaatctatgatgttcacacgatgatactgactaagaatgc

SEQ ID NO: 732402 - DNA, 641 bp, Homo sapiens
ttaatgctgaaatgagttaagattttgggggactgttggaaaggcatgattgtttttgaaatgcgaaaacatgacatttgggaggggccagtggtggaatgatatggtttgtctgtgtccccaccaaaatctcatctcgaattgtagctttcataattcccatgtgttgtgggagggactctgtaggaaataattgaatcatgggggtggttcctccatactgttctcatggtagtgaataagtctcacgagatctggtgatttyataaggggtttcccctgtctcttggctctcattctttcttgcctgctgctatgtaggatatgcctttcaccttccaccatgattgtgaggcttccccagccaggtggaactgtgaggccattaaacctctttcttttataaattacccagtcttgggtatgactatatcagcagtgtgaaaacagactaatacacagccctccatgagcttggattttcttccccaaggtggagttcttcaagggaagaggtgggggactccataccaggctcttgggaggggaacagaaggcttagggaacttcagattgagtgatttctttaggcccatgatagtgtaagcattcagataccatctccctggaatgcttgtctc

SEQ ID NO: 732403 - DNA, 583 bp, Homo sapiens
aagtagctgccaatcatccagatttctctgccttgctatgtgagcctgtattgttgactggtgatgcttatgattttcaaggagaacaaactgtatacatctttccctaggactttaattgctcaacacctgggtttatattgaggccagagtgaatgacagtagctattaatcaagtagctggcaaactgcagaagctgaattggtccaggtgagcttaggctcttaggccaccctaagagaaccacctgtgtttagggagtaaaccttctctgctawccttgcccctggtccaactagtttgaaaatccctacaataaacatgttttggctgcaggtactaatgatgataaagcccagaataaatcagaacctcacatccctatggaaaaaaccctcgccgttcttcacttcctcatttataaaggggagttgtagccacacccactcccatcacgctgttttgtgaggaacgaattagatcattggtacagacactgcacagtggggtgccatgcaatgcatggcagtagctccaatcacaccttcccagaggggacctgtctcaggactctcagggtaa

SEQ ID NO: 732404 - DNA, 579 bp, Homo sapiens
agcacacacacacacacacacacacacatacacacacacacacaacaaacaaacaaacaaacaaacacgagtggaggagcagatgtatacaccaaggattacagcacagatggtaagtggtctggcagagatgaactcagagagtgggcatctgatggaacctgacaagtcaagacaggcttcctggaggargtggaccctaagctgagactcaaaagatgaacaggtgtcattgctctactgtagaagacatggatgctgggaacaactgccaggcagaggccatagcatctgtctaggcctagggtgggtggatgatatagtttggctgtgtcccctctcaaatctcatcttgaattatagctcccataattcccatttgttgtgggaggaacctggtgggagataattgaatcatgggggaggttcctccacactgttctcgtggtagtgaatacgtctcatgagatctgatggttttataaggggtttgtccattcacttggctctcattctctcctgtctgccaccatgtaagatgtgcctttcgccttccaccatgattgtgaggcctcctca

SEQ ID NO: 732405 - DNA, 517 bp, Homo sapiens
cgcgagcgcttgctcttctctgggagtttccttccacgggacgctgggagctgctactcctcagccccacggcagaaagctccactaagaggagggtctctttcagaatgtgggaaattcaggggtgacacacacctcagattggcatttggtttgtggaggtggccgagacgctcatctgctctgtgtagggtgtaagagtgaggtgttggagcgggaccgcctggctagrggaggtgactaatctttccagactgcctgtaggggttggaagtgagttaagggagttagttgtcagccgcggagttcagggaattctttggaacgggtcggctgcatgttgccggaaaaattaaaatttcttaacgctgtaataacgatggtcttacacctacacacaacaggaaaactgaaatgggaatcccagccagtcgcttccggcagctttctgttgggattcaagtgtgaacagaaatttattacgacagaagaagacgttaatgttcactcataaagg

SEQ ID NO: 732406 - DNA, 560 bp, Homo sapiens
ggcgggcacctgtaatcccagctactcgggaggctgaggcgggatcatcagttgaacttgggaggcggaggttgcgttgagccaagattgcaccactgcactccagcctgggcaacagagcaagactccatctcaaaaaaaaaaaaagaaaaaaatggaatgttggccgggcgcgcagtggctcacaccggtaatcccagcactttgggaggccgaggcgggtggatcacctgagggtcgggagttcgagaccagcctgaccattgtggagaaaccccatctctcctaaaaatacagaattagccgggcgtggcggtgcatgcctgtaatcccagctactccggaggctgaggcaggagaatttcttgaacccgggaggcggaggttgyggtgagctgagaccaggccattgcactccagcctggacaatgagtgaaaccccgtctcaaaaaaaaaaagaatgttaataacaatacttcattagatagtttcttgttgaagcaatttgtaattcccggaaagttgttagccatgcttcaagtttacaaataggtgaagtt

SEQ ID NO: 732407 - DNA, 640 bp, Homo sapiens
ggaacacttcggcagtgcttgttactgaaccagacttgctttgcctattgcacagtatgccaatcactgagatgatgagttttgcattgcagaaagggtttattcacaaggcagccaagtgaagagactggagaacaagactcaaatctacctctctgaagatgggggttttagggatatttatgggccaggggagcaaggtggtatgaagcrtagggaaaggtgactgggggtaatgaaaagtgaggcaattggtgatcttcacaagcatagtcaagcttcatggctctttataggatgcatgttcataaaatagcatggttagcatgatctaaaggtatatttttaggccctctgatctcaaatggtcacctatcggacactcatgcaggcttatttgaagggtcggtggtctcagtaggcttgaagtgggtaagaactgactctacgttcctgaaaaacaacttaggcaactgttaccatggtgactcatacatcagagatgtcgtctataaggaagctagtgggaatttagatatatattgtttcgctacatcacttttagctaaatgggttttaaaatcgactaaaagcaagtgaccgaaaacaagtgaggtaagttaagtttgtggatccaaac

SEQ ID NO: 732408 - DNA, 556 bp, Homo sapiens
tttaggccctctgatctcaaatggtcacctatcggacactcatgcaggcttatttgaagggtcggtggtctcagtaggcttgaagtgggtaagaactgactctacgttcctgaaaaacaacttaggcaactgttaccatggtgactcatacatcagagatgtcgtctataaggaagctagtgggaatttagatatatattgtttcgctacatcacttttagctaaatgggttttaaaatcgactaaaagcaagtgaccraaaacaagtgaggtaagttaagtttgtggatccaaacagattagccttaggtttcacaggtgtggtgggggtacagccacaggcaaaaccagatgggaggagtcccatcagcattggattcctaggtgcacgggacagggacggactgtggtgtgcgacacccccgtgcaccaacacctgacaccgggtcactggccataagaagggaaggaaggatggtggcggaaaatcctggcagggctgggggtttatccaaaagacactacattgactctagaagcaactgagtttctcttt

SEQ ID NO: 732409 - DNA, 556 bp, Homo sapiens
tttaggccctctgatctcaaatggtcacctatcggacactcatgcaggcttatttgaagggtcggtggtctcagtaggcttgaagtgggtaagaactgactctacgttcctgaaaaacaacttaggcaactgttaccatggtgactcatacatcagagatgtcgtctataaggaagctagtgggaatttagatatatattgtttcgctacatcacttttagctaaatgggttttaaaatcgactaaaagcaagtgaccgaaaacaagtgaggtaagttaagtttgtggatccaaacagattagccttaggtttcacaggtgtggtgggggtacagccacaggcaaaaccagatgggaggagtcccatcagcattggattcctaggtgcacggkacagggacggactgtggtgtgcgacacccccgtgcaccaacacctgacaccgggtcactggccataagaagggaaggaaggatggtggcggaaaatcctggcagggctgggggtttatccaaaagacactacattgactctagaagcaactgagtttctcttt

SEQ ID NO: 732410 - DNA, 586 bp, Homo sapiens
ccccacctccaggttttgtttcattacgcatacacaaaaatgagtacgccttttacacaaattagaaacaaaaagaacatcattaaaattcacaaaaataccaccacttttagataaatatggttgacaatttgaagcacagtctttaagactttttctctctataggtacacatatattttgcaaaaatggaatattttacgtatgctttgcaacctaattccctttatttaccttattatgcccatattttatgtgaagtagacatcaacatcatttattaaraaatattcattttacctttattttatttatttaatcaattccatattattaaacaattaggttttccccctttcttctctcttaccttccatccacccaattatttatctatatctatgtaaccaaacaccacctgtgctccaaaaacctattgaaatagtgaaaaaaaatctgtttttgtacacatgtagctttctatcaatcaccctatgtgtatatgaatctatttatttctattataaattaagctgcaaaaaatactcttgatcacaaattatatgggtaaatgattatttcccta

SEQ ID NO: 732411 - DNA, 595 bp, Homo sapiens
ttttgtgacattctggaatggatccatattccttcttttgtatttatgcctctagaatcaatatttctaaccacaagatttttttctggtcacaatgcatcctccctgtcagcagggtcattgctgtgttttcacagcaggatactcagtatgtgtttgtatattacaagaagcactgattcaacttccattacacacttgctatgtcattatggggaaaagttaaatatgagaccttgaaagtattatcacagatggcttttctttctctctttttgttcctatactcatctaaattctggagatagtccagtcattttcacattatgttctttggaggggaagtttaggatttccaataggtgcataaaaagaacattcataataaggctagcaataaacaggaaaggatgttgtcttggaaaaggcatttytctaggccagtactaaagaaacgagaatccctaagtaaaagtgggcagctggctccttggtctctaaccagcctccactggtgttgaaattcttttagggtgtatgtcttttatggcttctttgggtccctctggctcccttcaatgagaaccaccaatta

SEQ ID NO: 732412 - DNA, 592 bp, Homo sapiens
gtgtgtgtgaactgagacattttattagacattttgtggtataagcatctctgctgtggcttctatctaggtagaaggtggaagcattttacttgctttccagagccccgtccagctgtcctgctactgagggtgctgggagaatgatggcaagagtaaccagcaaacagctgccccttaaagaggctggggagagattggctgggtgcagtggtagaagctagtcttcctgggctttaggatgtcaggagccatatgaggatggggatgagattgaagctgcatgggacaggccagccgggactgggttgtgggaccaggtaagactcaccttggacgctctcagaaatctttgagttayagagataagtatttgtaacagactagaattcgcacgtggagtagaaataccttaacgctgggggcattgagttgttaatgttaacgccactctacttatctatatatggaggagccttggggacactggattgcagtaatgatgtacataaagtgtccagtccagagtcccgtacatagtaaggactgagtaaaacagttttcttttcaccttgacctttctcatcatgca

SEQ ID NO: 732413 - DNA, 548 bp, Homo sapiens
ttgttagccaggatggtctcaatctcctgaccttatgatctgcccgccctggcctcccaaagtgctgggattacaggagtgagccaccgcacctggctactcttaatttcaaccttctacagatgctaaggacatggacaatgcagccaagctctttgctagggcataacacaggtgaggtgacctttactccagttcccaataacttcctcattttcatttcagacctcatcagcctggacttcattgttcatatttctatcaacattttggtcacaacaatttaacragtgtgtaataagttccaaagtttccctcatcttcctattttcttctgagcccttgaaacccttcccacatctccccattacccagttccaaagcttcttccacatcttcaggtatctttacagcaacaccccacccctcagtactaactttctgtattagtctgattgtgcattgctataaaggaatacctgaggctagataatttataaataaaagagccaataaaaattggctcacagttctacagagtgtacaga

SEQ ID NO: 732414 - DNA, 582 bp, Homo sapiens
tgtgtttgtattttaaggtaaagtacaaaagagtcaaaatggcattaacattaaaaagttacagtaagctaaagttaatttactattaaagaaagaaaaaattttaaataaatctagcgtagtataagtgtatagtgcttataaagtctgtagtcagcccggcgcggtggctcatgcctgtaatcctgcactttaggaggccgaggcaggtggatcacgaggtcaacagatcgagaccatcctggccaacatggcgaaaycccatctctactctaaaaatacaaaaattagttgggcgtggtggcacgcagctatagtcccagctacttgagaggctgaggcagaagaatcacttgaacctgggaggcaggtcgcagcgagccgagatcgtgccattgcactctagcctggcgacagagcgagactccgtctcaaaattaaaaaaaaaaaaaaagagtctgcagtgcagtcatgtacagtaatgtcctaggccttcacattctctcaccactcactcactaactcacccagaactatgtccagtcctgcaagctccattcatggcaaggatcctatacaagt

SEQ ID NO: 732415 - DNA, 682 bp, Homo sapiens
tcctgcaagctccattcatggcaaggatcctatacaagtataccattttttatcctttatatcctatttttgctgtatcttttctatgtttagatacacgaatgcctatcactgtgttatactgcctacagtattcagtacagtaactgaattagttactgtaggctattacagtaggtttgtagcctaggagtaacaggctagaccacatagcccaggctgtaccatctgggtttgtgtamgcatttttctgaacaaattcctgttgttaagtgatgcataactgtactttcaaccctgagttttttctgtccccaagcaaagtggaatgtagtctagggctagagaggagtggagaaaaagtagatttttccttcttttctgacacttacatataagcttgagagtacccttggagagcgtaatatttaattcatttccttcttattctcctgaatcactgaatgctagacctggttgctaccttaggattcttctaagagcagtcctctgttgagtgcgggtaagaggggagatgaaagagattccaggaggatgtcagatgtagggtgtgaaggattcccgaccttcctcaatagattcccgttccagctctctgaggatacgtagattggagtcactgtcctcccctgtcccagaaaggctgctgagctcactgagg

SEQ ID NO: 732416 - DNA, 682 bp, Homo sapiens
tcctgcaagctccattcatggcaaggatcctatacaagtataccattttttatcctttatatcctatttttgctgtatcttttctatgtttagatacacgaatgcctatcactgtgttatactgcctacagtattcagtacagtaactgaattagttactgtaggctattacagtaggtttgtagcctaggagtaacaggctagaccacatagcccaggctgtaccatctgggtttgtgtaagcatttttctgaacaaattcctgttgttaagtgatgcataactgtactttcaaccctgagttttttctgtccccaagcaawgtggaatgtagtctagggctagagaggagtggagaaaaagtagatttttccttcttttctgacacttacatataagcttgagagtacccttggagagcgtaatatttaattcatttccttcttattctcctgaatcactgaatgctagacctggttgctaccttaggattcttctaagagcagtcctctgttgagtgcgggtaagaggggagatgaaagagattccaggaggatgtcagatgtagggtgtgaaggattcccgaccttcctcaatagattcccgttccagctctctgaggatacgtagattggagtcactgtcctcccctgtcccagaaaggctgctgagctcactgagg

SEQ ID NO: 732417 - DNA, 533 bp, Homo sapiens
taactgtactttcaaccctgagttttttctgtccccaagcaaagtggaatgtagtctagggctagagaggagtggagaaaaagtagatttttccttcttttctgacacttacrtataagcttgagagtacccttggagagcgtaatatttaattcatttccttcttattctcctgaatcactgaatgctagacctggttgctaccttaggattcttctaagagcagtcctctgttgagtgcgggtaagaggggagatgaaagagattccaggaggatgtcagatgtagggtgtgaaggattcccgaccttcctcaatagattcccgttccagctctctgaggatacgtagattggagtcactgtcctcccctgtcccagaaaggctgctgagctcactgagggtcacaagaaaatattttcctggggctgaattaggatctttagtgtgtctaagccctaaaattatgaagaagccattcctcctctactcttccacaccctcacccattcaaaattcaaaccgctgtaaact

SEQ ID NO: 732418 - DNA, 533 bp, Homo sapiens
taactgtactttcaaccctgagttttttctgtccccaagcaaagtggaatgtagtctagggctagagaggagtggagaaaaagtagatttttccttcttttctgacacttacatataagcttgagagtacccttggagagcgtaatatttaattcatttccttcttattctcctgaatcactgaatgctagamctggttgctaccttaggattcttctaagagcagtcctctgttgagtgcgggtaagaggggagatgaaagagattccaggaggatgtcagatgtagggtgtgaaggattcccgaccttcctcaatagattcccgttccagctctctgaggatacgtagattggagtcactgtcctcccctgtcccagaaaggctgctgagctcactgagggtcacaagaaaatattttcctggggctgaattaggatctttagtgtgtctaagccctaaaattatgaagaagccattcctcctctactcttccacaccctcacccattcaaaattcaaaccgctgtaaact

SEQ ID NO: 732419 - DNA, 533 bp, Homo sapiens
taactgtactttcaaccctgagttttttctgtccccaagcaaagtggaatgtagtctagggctagagaggagtggagaaaaagtagatttttccttcttttctgacacttacatataagcttgagagtacccttggagagcgtaatatttaattcatttccttcttattctcctgaatcactgaatgctagacctggttgctaccttaggattcttctaagagcagtcctctgttgagtgcgggtaagaggggagatgaaagagattccaggaggatgtcagatgtagggtgtgaaggattccygaccttcctcaatagattcccgttccagctctctgaggatacgtagattggagtcactgtcctcccctgtcccagaaaggctgctgagctcactgagggtcacaagaaaatattttcctggggctgaattaggatctttagtgtgtctaagccctaaaattatgaagaagccattcctcctctactcttccacaccctcacccattcaaaattcaaaccgctgtaaact

SEQ ID NO: 732420 - DNA, 574 bp, Homo sapiens
agattcccgttccagctctctgaggatacgtagattggagtcactgtcctcccctgtcccagaaaggctgctgagctcactgagggtcacaagaaaatattttcctggggctgaattaggatctttagtgtgtctaagccctaaaattatgaagaagccattcctcctctactcttccacaccctcacccattcaaaattcaaaccgctgtaaactgtaaaataattggaagaaattccaacagtgttatgattttttccatattttgagcatattttgaaatactaaattacttcarttggcatgtgtgcgtgcacgtgtgtgttccctttctctttgccgtgctctaagcacatgcttgggctgcttaatggattttctggaactgagttgttggccctgccccagagaggccaagctatccctaaactcagtaaccaaggcccaggatcctgtactccactccaagggccaaaagctggctccttatgggtggaaaagttgtgatacctttcctcacccatcataagggtcaaggccaacactcctgtaacaaaagaggtgaacaggagaa

SEQ ID NO: 732421 - DNA, 574 bp, Homo sapiens
agattcccgttccagctctctgaggatacgtagattggagtcactgtcctcccctgtcccagaaaggctgctgagctcactgagggtcacaagaaaatattttcctggggctgaattaggatctttagtgtgtctaagccctaaaattatgaagaagccattcctcctctactcttccacaccctcacccattcaaaattcaaaccgctgtaaactgtaaaataattggaagaaattccaacagtgttatgattttttccatattttgagcatattttgaaatactaaattacttcaattggcawgtgtgcgtgcacgtgtgtgttccctttctctttgccgtgctctaagcacatgcttgggctgcttaatggattttctggaactgagttgttggccctgccccagagaggccaagctatccctaaactcagtaaccaaggcccaggatcctgtactccactccaagggccaaaagctggctccttatgggtggaaaagttgtgatacctttcctcacccatcataagggtcaaggccaacactcctgtaacaaaagaggtgaacaggagaa

SEQ ID NO: 732422 - DNA, 578 bp, Homo sapiens
aaatgatgactacatgatataaggtggttgttaatagaaaggaaatagattgatcaattcatgaactctttagaaggtagaactagcaatattagtgactgattaaatgtggaggtgaagaaaagacaggtgcaaggagtgacttgaagttttctagtctgagaaacagcaatattgtggtgtcaagtgcaaagaaaaagtagacaaaagatggaaccagatcaygagtagggtggaaatggaagttctgttttaaacagaagcacatgcagatggctgtgaaatgtgctgagctactgcagttgatggtgctagtccagtttagaagagaattgtgggctgggagatattgggaagagcaaagtgattagatcttataggagactagtaaaaagagaagcaaacacaagaccaagccctgaataaataattccaacctttagagattaggaccagggacctcaggagaatggaaaaatagcaccaagaagtggaatgaaaacagcaaagaatggagtcaccagaccaaagggtgaggtatttcatggaggaaggtgttgagtagaacattgctgaga

SEQ ID NO: 732423 - DNA, 578 bp, Homo sapiens
aaatgatgactacatgatataaggtggttgttaatagaaaggaaatagattgatcaattcatgaactctttagaaggtagaactagcaatattagtgactgattaaatgtggaggtgaagaaaagacaggtgcaaggagtgacttgaagttttctagtctgagaaacagcaatattgtggtgtcaagtgcaaagaaaaagtagacaaaagatggaaccagatcatgagtagggtggaaayggaagttctgttttaaacagaagcacatgcagatggctgtgaaatgtgctgagctactgcagttgatggtgctagtccagtttagaagagaattgtgggctgggagatattgggaagagcaaagtgattagatcttataggagactagtaaaaagagaagcaaacacaagaccaagccctgaataaataattccaacctttagagattaggaccagggacctcaggagaatggaaaaatagcaccaagaagtggaatgaaaacagcaaagaatggagtcaccagaccaaagggtgaggtatttcatggaggaaggtgttgagtagaacattgctgaga

SEQ ID NO: 732424 - DNA, 578 bp, Homo sapiens
aaatgatgactacatgatataaggtggttgttaatagaaaggaaatagattgatcaattcatgaactctttagaaggtagaactagcaatattagtgactgattaaatgtggaggtgaagaaaagacaggtgcaaggagtgacttgaagttttctagtctgagaaacagcaatattgtggtgtcaagtgcaaagaaaaagtagacaaaagatggaaccagatcatgagtagggtggaaatgkaagttctgttttaaacagaagcacatgcagatggctgtgaaatgtgctgagctactgcagttgatggtgctagtccagtttagaagagaattgtgggctgggagatattgggaagagcaaagtgattagatcttataggagactagtaaaaagagaagcaaacacaagaccaagccctgaataaataattccaacctttagagattaggaccagggacctcaggagaatggaaaaatagcaccaagaagtggaatgaaaacagcaaagaatggagtcaccagaccaaagggtgaggtatttcatggaggaaggtgttgagtagaacattgctgaga

SEQ ID NO: 732425 - DNA, 578 bp, Homo sapiens
aaatgatgactacatgatataaggtggttgttaatagaaaggaaatagattgatcaattcatgaactctttagaaggtagaactagcaatattagtgactgattaaatgtggaggtgaagaaaagacaggtgcaaggagtgacttgaagttttctagtctgagaaacagcaatattgtggtgtcaagtgcaaagaaaaagtagacaaaagatggaaccagatcatgagtagggtggaaatggaagttctgttttaaacagaagcacatgcagatggctgtgaaatgtgctgagctactgcagttgatggtgctagtccagtttagaagagaattgtgggctgggagatattgggaagagcaaagtgattagatcttataggagactagtaaaaagagaagcaaacacaagaccaagccctgaataaataattccarcctttagagattaggaccagggacctcaggagaatggaaaaatagcaccaagaagtggaatgaaaacagcaaagaatggagtcaccagaccaaagggtgaggtatttcatggaggaaggtgttgagtagaacattgctgaga

SEQ ID NO: 732426 - DNA, 590 bp, Homo sapiens
ttcaaaatatgaaaaccctcctcaactagctaaacaaataactgacggtgccacacatcggtcacactgatttgggttggcttgggggaaagtgctcaggtttggtagcaggctcaccttggttttgaaacctagctctgattcctggytcaccattttgcagctatgtgaccttgggcaagttcattaatgctcatataaaatggggataattacgccaacctactagcttattgtgaggattgcctatattaatgcatggttgataaaggctagctcccaagtattttaaaaatttattctacttttctcttttccgcaaaaggcttgaggtggtttataaccagaattagctaataaaaacacaagtagaaaaacacattaggatcaaggaaaaaggagtaagcatatatgctatcactaagtgctgacaaagttgctataattgagaataaaatctggcttatgagccagcagagcaacatggtagttctctatatcagaaatgtggaaacagtaactctttggtgaatggtgaaggaacagactttgtcctggccctaaattttaaaaagtagtttctcggctgg

SEQ ID NO: 732427 - DNA, 630 bp, Homo sapiens
taagtgctgacaaagttgctataattgagaataaaatctggcttatgagccagcagagcaacatggtagttctctatatcagaaatgtggaaacagtaactctttggtgaatggtgaaggaacagactttgtcctggccctaaattttaaaaagtagtttctcggctggtcgcagtggctcatgcctataatcccaggactttgggaggcctaggcaggyggatcatttgaggcctggagttcaagaccagcctggccaacatggtgaaacactgtctctactaaaaatacaaaaattagcaagacatggtggcgcatgcctgtagtcccagctactctggaggctgaggcaggggaatcacttgaacctgggaggcagaggtttcagtgagccgaaatagtgccattgcactccagcctggatgatagagtgagagtctgtctcaaaaataataataataaataaaatttaaaaataaagaaaaaataaaagtagtttctaatgtaaatgtttattgttatatcgtacagtgttttaccatttacaaagtggtttcacagctgccatctcatttgatactgtattaactccatttttttctctattttatggattcattcatccaaaga

SEQ ID NO: 732428 - DNA, 547 bp, Homo sapiens
ctaaaaatgcaaaattagccaggcgtggtggcacatgcctgtaatcccagctcgggaggctgaggcaggagaattgcttgaacccgggaggcggaggttgcagtgagccgagatggtgccactgtactgcagcctgggcaacaagaacgaaattctgtctcaaaaaaaaaaaaaaattcactaaacaatgttgtaaatagatgtgcgctttattattccatctgtagtacacaggcagagtcgattaagcacagttcttaagggccctaggatttccagaatggtaaatgagcattggcctcaayttaaaatcaccagcgggcagggcgcggtggctcacgcctgtaatcccagcactttgggaggccgaggtgggtggatcatctgaggtcaggagttcgagaccagcctgactaacatcatgaaaccctgtctctactaaaaatacaaaaattagccaggcatagtggcgggcacctgtaatcccagctactcaggaggctgaagcaggagaatggcttgaacccggaggcagaggttgcagtga

SEQ ID NO: 732429 - DNA, 624 bp, Homo sapiens
aaaaagaaagaaagaaaattaagagaaaaaagataaaatcagaatctcagaatcaagctagcatgtagccaccagaagttctagaaaaagcagctcagaaaatgggagtagggatggagtgagttgccagaaaggggcagaggtgatttgtcaaagaaataatacatgacaatttccctgacctggagaacaagagtgttatgatgaaaaggggccccctaggaccatgtatggtggagagaagacccaccacaaaccacatcaccttgaagaccctaaaggcctcccaagcggaaggggcatgagaaactctcagctccctctaagagatgaagcttttaggaagatcagcaaatcagaatgacatgagacttctccacagccacactagaagccrtaagacatcagagtgatgttgtagaagttctaagggaaaagcactttccacctagaaattctatacccaaccatcaaatgtgaggattaaaaaaagacatttcagatgtgcaaggtctcacacaatttacctccccaagcacctttctcaggaagttactggaggatgtgcttcaatgaaacaaatcagtaagtcaaagagaggatgatgtgggatccacaggcaga

SEQ ID NO: 732430 - DNA, 630 bp, Homo sapiens
acacatgatcctttgagtatttgaagggaaaaagatctttcccctacactctctaatctactcaaagctaaagggtcaaggtgaacaggcagtataagaacatcattaagagaacacctatcaacttagattttatgataaattgatctgaaacgatctgcacaccacttctgtgcatgcttgaaaagccaatggtgaatatgaaggaaaaaaattttaattgtttttaaatatttaaaatatgagcaagtrtaatacccttaagagtcaacttttaaagaaacttgtaagttagggtttacattattatgctttatgcttatcacagtcctctctagagtgagcacctaaagactgtgtctctgaacagtcatttgagatacaatatggaatcttctagaatgtccccaactagaaatcacatcagatttcctacctcattttacagctgaggagtgttaagtccagaaaagtaatcatttctgttcaaggcccttcagcaagtcaacaagtcagtggctgaggcaaaaatagagcccaagtctaccaagagttgggttcactatatccacacggtctcaagggcctatgagtatgtaaattcaaattcatatggaaatcattcccatt

SEQ ID NO: 732431 - DNA, 740 bp, Homo sapiens
cccagggatccaactttcagatagcccaccttaagacttcagaattccctttccatttttcctttttgtaggtccccactgaaatctaaagtcaagggccccaatgttgttctccatagaaacacaatagtctcttccctccctctttcttccattcttcattttcaatttcccaatacctaagtaataggtattcttccttttcaatttcccaatacctaaatgataaaccagcacatctgagaaatactaacactgttcaggaagactaaatataagttgtatttttttttctttatgttggtccagttttggtctccaggtacaagtggataccatctcactgccataagattttcacaagtgaagcagaacagagcaatagasaaatagatgggtctgatcctaacaattccttctgataaggagaacatccctcactcctccagggggcaggacactctgtcatgcctgtctgtaaaaacaaatgacccttgacccttgctctcccactgcggatggggccttgacagagctgcccggggtggaaaggatttctatagcctgctccctgaattagaaggaaactgtcattaaaaaaagagaaaaaaaaatcatatattgcttaagggtctatctattttacaaactgtcccatttgtaaacaggcttctccctgaattggcagccacgtcccctaattcctgtacacatgtgtctggcaactggaaaagggagac

SEQ ID NO: 732432 - DNA, 635 bp, Homo sapiens
gattcgatttatttgcttttgttcctatctgcatgttcctacggcgttttagaacgtttcagaacagtgactttaaagcgaaaataaagtaaaagctcagcgtgaattaagaaaaataagtgtttatgggaaggtgctccttacccaaagagaacacactagtcatcctcaattgttggggggcacctgggcagagagactggggaccagacagaagactctccagaggccttcctgagggggtgtctggtccgtgaggatgaaaacaaccaggctcttgtccttttttgtgctttgtttttggagacyggagaggcgagaaatcgccctacggtctagtaacaatataaagctggcctgggccacctctcctatggctgcttctgatccaaaatctgaagggaatagaagacggttccctccaaagaaactagcccatccaaggagcatgtatgaaattcacaagtacacatgtcactttcagaactcctggtctaaagccttgcctcttgaggccttttctacaaaattccctgagcaagtttgttttatgatacctttgctggctcagatttggaatgggggagatttgcaaacagcagctcctgtctagagggaaaaatactgtatctagt

SEQ ID NO: 732433 - DNA, 631 bp, Homo sapiens
ccattcactttaaactgtggtcagcagtctcattagactgtgaacatgctgtgctcatttctgactctctgctttggctcctgtttattcgctgaccaggaatccctaccttgttgacttgctgacctctcactaacccctctccattgaaaaagcctcggtcaagtctctgcctcctccagaagacttctctgattgctactgctgctatggacactcgtgtgcccccacccccacctccccttccctaaaggcctgcagcacctggcttcccctttgatgacatacattcttgtgtcttgtgtgattgcttcttggctataaatcctgtctctccaaccacygtgtgggtccttaagcaaggatcacctccttaaccccctctccctgctgctaagtgttatgctcacagcgggcactaaatactctgattagtctgcacaggatcataaaagcccacatagatcaccagaaattgtcagctgatatttacaaaaatcccataaagtttatggtagcacacttggcccttagatggtaaaaatataaaacagagggaaaattgggtcctttgcacaccaggaattctaattaaggaagataaacagatcctgaaggctatatgcagaac

SEQ ID NO: 732434 - DNA, 492 bp, Homo sapiens
ttcttactacttaaaaaaaaaaaaacactaagtcacaaatccttaatactgacataagcttgttaaacaggactttggaggatcattaaataggaaatcattaaaaatattgaccttttgtaatcccagttttctaataagaccctttgaaataagcaccacccctctattccctttgattaacacagtagagaggacttagccacttcagtaagttttctttctgtttgacaaaaatgcaatatgaaaatgcagtgacctcttgcagcttcatgcttatgrtttaaaatggatgctaaaaattggaattggactgtgggtttgaaagtttggtaaaatagccaaactttatatttcctaggttattggaacaaacacacagaggaaaaagtactttttaaaaggttctaattcgagaaatttttgaagaggaaggttatgggatccaaaactacttatttgaagaagaatcattatacaaacttagataac

SEQ ID NO: 732435 - DNA, 633 bp, Homo sapiens
tctaataaacatggcctactttttgtaaattaaaaaaaaaaagaagggaaagtggatgtaatgtgggagaaggcaaagacaagctgggcccctcagggcagaatggagcccatatctctgtcctcactgcctccaaccctgatgacgtgcttgtcctaaaggggaaggtggctccctctgtcatggagctaaaacacatacctggtccaggaatcagagaagctggtgaaggattcagagaaaagcagaacatgtgcaggcccacctgccgccaccccaagggcatgagtcacagatcagtgacaatgtgcctgagctgcagaagcacctgccccaccttctgacagtgaaaagtaacacggctgccacttcacttttgtccttcaaatttcaagcaaaaatgtctcttattccccactctaactgggaacttgcagggaaaagaattctgggaaacatatttcagcctggcccacttgacacattacaaagccrccacagcaattgttgaaaaacctagacgagccccttacagtgagttcacatattcacaagctgcaaggttctcaactctaatataaaaacataacttttttttataactgtttcatctattttgtgccacattcagtc

SEQ ID NO: 732436 - DNA, 620 bp, Homo sapiens
aaaaagtataaaactataaaaatattaaaaggtatttataactattctctaaacctttctaaacttcaaaacattttatgctgaaatatttaattaaacaagaaaaaaagtcctattttgtaaagttcaaaatatgcttagtgttcaaatgacatttaaaaagaagcttgacctaagctttaggagtaaaagttatctaaaagttttagttggatgattggaatttgttttaaaagtttaaaaaagggaaaacagaaataagctaataatatataccagaagagtgaggagacacaaagaaaatgcaaccactcaaccctgtggggaatggagggagcrtgtgggatccactgcccagcccagggagtctccctacagtccaactgcctttctcagatcagaaggcaaaagagcagtctagcaagcaaacaaacagcaacaacaacaaaagtactgaaagttttctagaaaggccagactcaggagcagagaagaggcacagtgggcagtgccagtgagaggcatgagtcctgagtcagctgggatgtccagggagctggccaagggcctcaagaggagggtagaaggaaaatggtatcctgacacctgctggaaagagc

SEQ ID NO: 732437 - DNA, 429 bp, Homo sapiens
cacatgatttgtacacatgtgagcaactgtacgtgcatgaatatgtgtgtatgtgagcaagtatgcatgtgaatgagtgtgtgcatgtgagtgtgtgtgcgtggatgtatatgcatgtgaatgagtctgtatgcatgtgaatgcgtgtatgtgagtggatgtgtgtgcacggatttgtgtgcatgtraatgtatgtgtgcctgtgactgtgtgcacccacacaggagatgaagggtggtgatgataagagcagaatctcaggcataatctggtcacgtgattgctttaaccaaggacaaagaaatggatcacattgcaaaggactaacagggtggattaggtaaaccatgaagcaagtagtgtgtttcttggcaactgaatagcgtggtgctaaaaacacacataaattgacttatacctatatcattg

SEQ ID NO: 732438 - DNA, 578 bp, Homo sapiens
gcatagacatatttagcaactggcagaatccctacattggttctttgacctgtggaatgaaggcaattatgttatgaaagagcaagtaaaatccaccaaaacagcttctacctagaaaaatagtacacccaaagcattaccgagtccctgtagggaatacagagattactgccaacatcaagaacttgaaggatgtaggggaggtgattcccaytgcattactattcaattcatctatttggcctatgcagaaaacagatggatcctggatgacagtggactttcatagacttagctatgtggtgacctcaattgcagctgctgttcagaatgtggtttcatttcttgagcaaatttacacatcccctgctacctgctgtacagctataaatctggaaaatactttttttttctcaatacatgatagtaaagacaaccagaagcaaaacttgctttcatctggccaggccagcacaacactaccactttcctactcaggggtatatcaattctacagccctacatcataatttagttgcagaaatctggactgtctttcccttgcacaagacatgaca

SEQ ID NO: 732439 - DNA, 444 bp, Homo sapiens
ggatgacagtggactttcatagacttagctatgtggtgacctcaattgcagctgctgttcagaatgtggtttcatttcttgagcaaatttacacatcccctgctacctgctgtacagctataaatctggaaaatactttttttttcycaatacatgatagtaaagacaaccagaagcaaaacttgctttcatctggccaggccagcacaacactaccactttcctactcaggggtatatcaattctacagccctacatcataatttagttgcagaaatctggactgtctttcccttgcacaagacatgacactggcccattacattgaaaatattatacggattggacctaatgagtgagaactagcaacttctctagacctattgataagacatttgcatgtagaaggatgggaaattaatccaacaaaaattcaggggcctt

SEQ ID NO: 732440 - DNA, 635 bp, Homo sapiens
agatggatcctggatgacagtggactttcatagacttagctatgtggtgacctcaattgcagctgctgttcagaatgtggtttcatttcttgagcaaatttacacatcccctgctacctgctgtacagctataaatctggaaaatactttttttttctcaatacatgatagtaaagacaaccagaagcaaaacttgctttcatctggccaggccagcacaacactaccactttcctactcaggggtatatcaattctacagccctacatcataatttagttgcagaaatctggactgtctttcccttgcacaagacatgacactggcccattacattgaaaatattatayggattggacctaatgagtgagaactagcaacttctctagacctattgataagacatttgcatgtagaaggatgggaaattaatccaacaaaaattcaggggccttctacttcagtgaaatttctggagatcctgtggtacagtacatgtcaagatatcttctctaagttgaaaaattaagttgttgcatctgaccccttctataatcaagaaagaggaacaatggtaagtagacctctttggatttggaggcaacacattccttatttgagtatactactccagg

SEQ ID NO: 732441 - DNA, 648 bp, Homo sapiens
tgtctaagaaggggctgaggtgcacgtgtgctctgtgactaagggatgggagccaagccccagggctgagtgaccggaatccatgccagtgaaggccaagatgggcagcagagtggactgggggcagaagatgccaggtcattagcaaaccagagacttcaaggactggaattccagcttgtggttttaggtattaccactaacctatgctgccaccaagtgctcattttaccagcaaaggcttcttagagccagggctggagatgcctctctcctccaggcttgcctggcttccaccacccctgcaacacacacagcacacacattcagaaatgggaaaggtcaaaccgcaaacctccctgactgctctgtccccatggctttatttttaggctagaaaagaccctttcctcttctgactcatgatcccgctgacaaatattcccttagtrgagaaagctaaatagaatcattcctcatgtcacattctcttgaatcaaagaagctcttgtgactggagcctgttttgtcattctgcatgctgcatgcacccaatgtccatgctctgtggacacttcttcagaccaggacactaaggccaaagaagccactccctccctccaactataccgaccttccctcttgccc

SEQ ID NO: 732442 - DNA, 615 bp, Homo sapiens
aaagcaggagcaagcggtctccatactagaggctgtctccaagccacagctccaaataaccttttatgcttcactcaaaatctccccttcctaccagtcattcctttctctggcacaaagccctcccttccccatcacccctaaccttccctaaagggaacgaggggatcacaggtggtcgagctccagatgaccatgggcttccactacccactgtcttttccttgcaacgccatagccccgggtggggtttgctgccaggcacccgaaggggcatgtgcagggcagccccaatgcagcttttcctcagcttggccctccayattcgtcccttccactcttgccattgggcaaaggcaatctcccacggaactgctgggttttctccttgtttgactctcttgctccacgatgcccagtggcctgtacagattctcttaaatgtgccagcctaactccttaaatagaaattgtgctaactggcatgacctggatgcctttcccttcacctgtcatatagacttgacctctaaatttcccctctaaccaagaccttcgctcaacatttgctgatcacaaaacatgcctagaagaaacagaatatgaccagagtgt

SEQ ID NO: 732443 - DNA, 663 bp, Homo sapiens
aagattctacagcctagggtaacaagtcttgccaagctctctctctgctatatcccgaaatcctgcaccctgcgggtcagcccccgagggccatccagcttccgtctcccaacattaagttcacttcatgtctctcacracagggaggaaacttaacgttccttggagacctgaagggatgcagtgagcttaagaattttcaagagcttatcaatcagtcagcccttgttcatccctgagcggatgtgtggtaggcctttactgggcactctgccgaataattggagtggcacttgttctttagtccaattggctatccctttcaccctggcatttcatcaaccagagggagaaaaacaagacactgtaaagcgagagaagctcgcctttcgacactcacatctatttagatgcagctggagtcccatgggaaatacctgatcaattaaagcccaaaatcaaatagctgcagaatttaagtcaatattttggtaggtgacagttaataaaatgtaaactaaataaactacatctattacaaccaacagcaatgagcttttcatgagttaaaagacaaattcatgtcagccccagccctggggctacctgacctgacaaaaccttttacactatctgtgtcaaagagaaaattttaaaaaatgg

SEQ ID NO: 732444 - DNA, 641 bp, Homo sapiens
aattgaagtttttttcctttataaattacccagtctcgggtatatctacattagaagcatgcaaatggaagagtacacttcataaatcaaaaagtggaaaagatatccaaggctaaccaaatgaaaactgctatggctatcctaatagagggaaaaaatagactttcaggcaaaaacattactcaggataaagagaggtatttcataatcataaagtggtcaattcaccagaaagctatcacaattataaatctatatgcatgcaactacatagttttaatatattttaacaaaaattgacaaaattaaaaggagaaacaagaaattcctactcatagagagagagtttaatacatctctctcaatcactgataatggacccaataaaatcaataaggaaagggaagaaccraacaacttaattaacaattgaactaattggcaaatgtagagcaccacatgattcctactatataatgttcaaaaacaggcaaattgatgttattagaaatcatgacagtggctacttttgtacgggaaaaggatagtttttggaaatgggcataatggagagtttctggggtacagatgatattctctaatgttctatttcttgacctgggtggtagttagatgagtat

SEQ ID NO: 732445 - DNA, 643 bp, Homo sapiens
gtgatgacatgtggcgtatggctgaaggtgacaggctcaacccagcaaaactgcatctgttgttcaactctcaggcacacatacaagtgtaaaaaggacaccccagccccagaggccagagtatctgtcagcctgacaatggctcttgacagggcaactccacttaagtgacacctgtcaacctgtgttcttgctgcagctctttctttcacatccacttagtaacttctccaagtgctgtcactccagcttgcacaccatatttgcaggtgttgaagacatagctttttattttttaacttctagaaaactgggcttacatactgcccagatctgctatgcaacgacatcaggactyagttagtgcatcctgagcaaatgtgggcttcatcacaggaaggaaggaaagatctagcaccttggcaagtggctggtggaggaaggaggaggagaatagtatcagaacaactttgcatatatgccccaactcttttccaacctacaaagatggtcttttcttttcttcctttcgccttcttttttaaaaccaatctattgtcatctcgggcaggatagtccatgctacactgggattaatttaaactgaacatctgtaccttttcctcctggcccataaaacaag

SEQ ID NO: 732446 - DNA, 643 bp, Homo sapiens
gtgatgacatgtggcgtatggctgaaggtgacaggctcaacccagcaaaactgcatctgttgttcaactctcaggcacacatacaagtgtaaaaaggacaccccagccccagaggccagagtatctgtcagcctgacaatggctcttgacagggcaactccacttaagtgacacctgtcaacctgtgttcttgctgcagctctttctttcacatccacttagtaacttctccaagtgctgtcactccagcttgcacaccatatttgcaggtgttgaagacatagctttttattttttaacttctagaaaactgggcttacatactgcccagatctgctatgcaacgacatcaggacttagttagtgcatcctgagcaaatgtgggcttcatcacaggaaggaaggaaagatctagcaccttggcaagtggctggtggaggaaggaggaggagaatagtatcagaacaactttrcatatatgccccaactcttttccaacctacaaagatggtcttttcttttcttcctttcgccttcttttttaaaaccaatctattgtcatctcgggcaggatagtccatgctacactgggattaatttaaactgaacatctgtaccttttcctcctggcccataaaacaag

SEQ ID NO: 732447 - DNA, 581 bp, Homo sapiens
tttctcccaggtctgtatcaaaaagaaatgcaaacatgtgccaaaaatgagttctacaaagatgtacacagaacttttattcataatattgaatgcagcatcaaataaatgtgtattaacaagcaaatacaatacatgtttaaatgcagtatacttgtgcagtggattcccatacagcaacagagaaataatgagttattgatatatatatatatatatatatatatatatatatatataggtatatatataagtatacataagtatatatcagtatatatcactatcagtatatatattatayaaatatacttatatataagtatatttattcatatatacttatgtataatatacttatgtataagtaggtatacttatatatacataagtatatatcagtatatatctgtatcagtgtatatattcatatatactaatatgtatatataagtatatatacctatacttatacatacttatatatttatataaactcccttcaaaatgcaaaataatatgttgagtgaaaaaaggcagtctaagtgggtggatactataaatttccatttatataaagt

SEQ ID NO: 732448 - DNA, 588 bp, Homo sapiens
atccagatctatgtttgctattggtctccttgttaagaatccttttctcaatctattactatcattaggacacagttgaagttccttaatgcgactcacacaggcactcatcacctggctcttgcagagtttccatcaccrgctttcactctttcctttctcatcctcaacagccagcatcacaaagcacacacctttgtcatatcatgcactctgtcttgctttcctggctacccacacgagactctgtctgctaggttttatcttaaatggtttgtcccctgggaagccttccataataagcctctatagcagtgctttctcaagcagaggcattttcattcccaagggagcatttagcaatatctggaaatggtttttgttgtcacaactgggagatgctactggcttctaatgggtagaggccagggatgctgctggacatcctaccattcacagacgggtcccctccccttgcaaagaatgatcagatccggagtgccagtagtgctgagaacccctgccacagaccagtctaggtgcctgaaccttctgatgcaaaggccatgccagcttgattcattccta

SEQ ID NO: 732449 - DNA, 606 bp, Homo sapiens
atgaacatgaaaatgaagccttcagattggaaataatgtgtagcttttatgtaaaaacaccaagatattcaaacgtctgtttgttctctccacttagtgttttgagttacttgaaaaaacagtgctaactgtgagatgagtatctttgacacaatgcaaattsttaacccaaatgttccatattcataaactggtttcagattcattggaaactaactatccctgctcctatcctgaaaaacgcttgtgtgaaaaacaatgcacttttgtaaatctgtgagtgtcaatctgatgtaactgttctagtcccagagaagtaatagaattcaataaatacaaataagaaaattgttctaacattttgagatcataattttctctgaatattcaagtttatgccatacaaaaataccggattcttactgtttttcttttgcttaccctaattaatgttcttttcagtgagtaaatgtctcattttttcctttccatatttccgtttctataactttgatcatattatcttctcacttatctttaccttacaccattaggcgtgttggcaaagtcatagtcaacctccaatccctggctaacctcatgcct

SEQ ID NO: 732450 - DNA, 365 bp, Homo sapiens
taaataatgtaaccgtagtcatttcctcttataaagaatcatataatctggagccaaaaaatcatatactactttgttttttaggcaaaggaaaggcattgggatgttttgaatttttaagaagtattgcttcatgtgtgtatgtgtgtgtgttgcaaaacatttgagaatgccagggccataagtatgagtgactaagtggarggagatacacaagtaaacaagtatttagatcacagtgtagtcagtggcaaaacagctctgctcattgaatacaatttcacccgctgtgtgggcagaggggatgtctgagctgaattctaaagagaaggtgtacactgaagtgtaaacgctgtgtgggtgtg

SEQ ID NO: 732451 - DNA, 529 bp, Homo sapiens
gagaatatctatatctattaagtctttttgaaaaattggagtttgatagtgtatctgcctgtgatcaaatataaataatgacaatagtccccaagaggaaggagcattaaaacaagattttaaataatacagaaaggctatatttaactatgttttttattcttatggctgtttacttttcttgggygtttattagatcctgaatgttttatgctaagggattcttcaatattcccttggggaaaattatttttatttttgagagatttctttttacatagttgtgctcaaatgatgctgggaagagattttctggacttgtttatttggagcaaattccttgatacatgagcagaaagtcaatttgtatttttattttttaaatacgaaactaggccaggtacagtggctcagacctgtaatcccagcattttgggaggaccaggcaggaggattgcctgagccaaggagttcaaagttacagtgagctatgattgcaccactgcactcgtctgagcaacagagtgag

SEQ ID NO: 732452 - DNA, 458 bp, Homo sapiens
caccatattgtgttatctttactaagaaaacattgcaagtccgtaaaagagagagaaaacatatcttaatgggaaaccaagcttcatgtttgtctttgcactaggccttacaacttaagtgtttcatccttcataaagcttttcccctttgccatatttttttttctttctggcagcaagtatttcagcaatgggcagaagacaaaagaaccaatttcagaattatarcagtgaaaagtcaggaaggtttgagtacctcgtgcataaagcagacaattctgaccaagaccaagacatttatgttcctgccaatgttgtagtatctacaagtatgactattgactattccatctttatcagtgataaatgtgtgaatctgaataaaaagatgtcagtataaaattcatcagtgactgctggatccagatatgttgatgccattctgagaacatttttgc

SEQ ID NO: 732453 - DNA, 549 bp, Homo sapiens
ggattatcatggtcttgggatccacccctgtgattttgcagggtaccgcctccctcccagctgctttgatgggctggcattgagtgtctgcagcttttccaggcccactgtgcaagctgtcagtggatctaccattctggggtctggaggatggtggccctcttctcacagctccactagtcagtgtcccagtagggattctgtgtggggactccaaccccacatttcctttctccactgtctagcagaggttctccatgagagctccacccctgcagcaaatttctgcctgaacatccaagtgtttccatacatcctctgaaatctaggcagaggttcccaaaccccarttcttgacttctgtgcactttcaggctcaacaccacatggaagctgccgaggcttggggctggcaccctctgaagccactgctcaagctctacattggacactttcagccacagctggagcagctgggacacagggcaccaagtctctaggctgcacactgcatggggaccctgggcctggcctaggaaaccattttct

SEQ ID NO: 732454 - DNA, 549 bp, Homo sapiens
ggattatcatggtcttgggatccacccctgtgattttgcagggtaccgcctccctcccagctgctttgatgggctggcattgagtgtctgcagcttttccaggcccactgtgcaagctgtcagtggatctaccattctggggtctggaggatggtggccctcttctcacagctccactagtcagtgtcccagtagggattctgtgtggggactccaaccccacatttcctttctccactgtctagcagaggttctccatgagagctccacccctgcagcaaatttctgcctgaacatccaagtgtttccatacatcctctgaaatctaggcagaggttcccaaaccccagttcttgacttctgtgcactttsaggctcaacaccacatggaagctgccgaggcttggggctggcaccctctgaagccactgctcaagctctacattggacactttcagccacagctggagcagctgggacacagggcaccaagtctctaggctgcacactgcatggggaccctgggcctggcctaggaaaccattttct

SEQ ID NO: 732455 - DNA, 492 bp, Homo sapiens
cagcctgccccctcttcatgggaacaacccagctgagatgggtccaagggtagacccaatttggaacaaagacagaggcaatgaaaacattctacccatctttaaggctcttctccctgcaactcctggaatcaggtaactcttaagccagaaaggacttcaggcatcataaacccctcacttgacagatggaaaaatctgaggcaccaagaaatgacatgacttgccccaggccagctgggggccctgactcctactgggcagctyttcccactgacccgctctgcctgtcacatccggctgcactctgcactctgcactctggccgacgtcctgcatcggtgcacatctacacatgcgtgtctccacacgtccacactagctcctcaggggcaaagacagaccccggcatcactgagctcctgaacttccacggaggaggtgctcacatgtctccctcatgtgcactgagtgaaaggggcttctctgcct

SEQ ID NO: 732456 - DNA, 669 bp, Homo sapiens
agagtcatcaccactccctaatctcaagtaatcagggacacaaacactgcggaaggccgcagggtcctctgcctaggaaaaccagagacctttgttcacttgtttatctgctgaccttccctccactattgtcccatgaccctgccaaatccccctctgtgagaaacacccaagaattatcaataaaaaaataaatttaaaaamaaaaaaaaaaaaaaaaaaaaagattattgatttttgccgggcgtgttggctcacgcctgtaatcgcagtactttgggaggctgaggctggaggatcacctgaggtcaggagttcgagaccagcctgaccaacatggagaaacctcatctctgctaaaaatacaaaattagccaggagtagtggcagccacctgtaatcccagctactcgggaggctgaggcaggagaatcgcttgaacccaggagcggaggttgtggtgagccgagactgcaccactgcactgcagcctggacaacaagagcaaaactccgtctcaaaaaaaaaaaaaaacaacaacaacaacaacaagataattgatttaaaacaaccacccaaaaaaacagatattcccttaggtgtttctttaaagccacgccatcatcctatgaatgcctatgaggactgcttggcaataattttcttgga

SEQ ID NO: 732457 - DNA, 600 bp, Homo sapiens
gcctgtggttatgcagctaggggcagagctgggacaaggacaaggacaagcccctcccaccgccaccacctcagctgggtgctttacaagtttctcactgccgtggcccttctttgccggccttcactgtggttcccacrctctacctgtaggcccacgctccctactcccttcccctcttgcccctgactctgggggccttctggtgtctacatgatccaggatacgctggctcccaccagctgtgggtaccactgtccatgagtggtgggcaggacctcaggtccaagtagttggatctccctccgggaccttacctcatgcagagacttaggaatcggggggattgatccaaagggaaggagcagcatcgtcccttgcggaggaagctcagccctgtcgggggagcatatcctggggggaaatagccagcatgtaatactctcgaagcactggggcagccttggaaaacataccttctcgtggtgcctgggacactagcaagccatgagactgtgaataagtcatttcccctctctgggcttccatttcatcttcatcaggctaaacaggacctctagagtcacgtggtccagccct

SEQ ID NO: 732458 - DNA, 537 bp, Homo sapiens
gagctgattgcccgctacatcaagctccggacagggaagacccgcaccaggaagcaggtgggcctcaagagacgggtaggggtcccgggggtggtaccccagcaccagtctgctcccaaggtgggccaggccctcccaggaccagacgcaggcttttgaggggcggcagctctggatgagttatccctgttgggcgtgtcacaggtggtccagttttctttttctttcttttttctgagacggggtttcactcatgttgcccagactggagtrcaatgacgtgatctcggctcaccgcaaccttctcctcctgggttcaagtgattctcctgcctcagcctaccgagtagctggggttatagtcacccgccacaatgcccggctaattttttgtatttttagtagagacggggtttcaccacattggccaggctggtctcgaattcctgacctcatgtaatccacccgccttggcctcccaaagtggtaggattataggcgtgagccaccacccccggccgggtggtccagttttct

SEQ ID NO: 732459 - DNA, 614 bp, Homo sapiens
agtaaaccttcattttaaagaggcaacagaggaaaggaagagggaacgagtggccaatgaatttcccaagcaggcatctgaaaccgcggaactgctgggctgaaaggacctccaggatcatctggcacgaactccttgcgctacagagaggcacccaggcccagaaagcagagtgacgtgcacatggtcacacagccagcccatstggagcaacaccagactccggggcgctggcggccaggcccgtgccctttgagtgacagggcaccgtacttcccctcctgccctagcccaacctgggctagggcatattctcacctgggaagagccaacacctccccacaggagcaaaagcccaaagtcacccacacctttcagcacaggtttctctcacctaccaatggctcactcccttccccaaatcaaaggaggtgacctgaaagaagggagaagcggggtgcacaggatgtggtcagtggagaggagcgggggtgcattcacagcagagaggccctccagtgaagcacacagccctccgggcaggggcaggacgggctgagaggatggggagggagagaaggccaagacttcctgcagaaaaaagcacacacaaa

SEQ ID NO: 732460 - DNA, 614 bp, Homo sapiens
agtaaaccttcattttaaagaggcaacagaggaaaggaagagggaacgagtggccaatgaatttcccaagcaggcatctgaaaccgcggaactgctgggctgaaaggacctccaggatcatctggcacgaactccttgcgctacagagaggcacccaggcccagaaagcagagtgacgtgcacatggtcacacagccagcccatgtggagcaacaccagactccggggmgctggcggccaggcccgtgccctttgagtgacagggcaccgtacttcccctcctgccctagcccaacctgggctagggcatattctcacctgggaagagccaacacctccccacaggagcaaaagcccaaagtcacccacacctttcagcacaggtttctctcacctaccaatggctcactcccttccccaaatcaaaggaggtgacctgaaagaagggagaagcggggtgcacaggatgtggtcagtggagaggagcgggggtgcattcacagcagagaggccctccagtgaagcacacagccctccgggcaggggcaggacgggctgagaggatggggagggagagaaggccaagacttcctgcagaaaaaagcacacacaaa

SEQ ID NO: 732461 - DNA, 614 bp, Homo sapiens
agtaaaccttcattttaaagaggcaacagaggaaaggaagagggaacgagtggccaatgaatttcccaagcaggcatctgaaaccgcggaactgctgggctgaaaggacctccaggatcatctggcacgaactccttgcgctacagagaggcacccaggcccagaaagcagagtgacgtgcacatggtcacacagccagcccatgtggagcaacaccagactccggggcgctggcggccaggcccgtgccctttgagtgacagggcaccgtacttcccctcctgccctagcccaacctgggctagggcatattctcacctgggaagagccaacacctccccacaggagcaaaagcccaaagtcacccacacctttcagcacaggtttctctcacctrccaatggctcactcccttccccaaatcaaaggaggtgacctgaaagaagggagaagcggggtgcacaggatgtggtcagtggagaggagcgggggtgcattcacagcagagaggccctccagtgaagcacacagccctccgggcaggggcaggacgggctgagaggatggggagggagagaaggccaagacttcctgcagaaaaaagcacacacaaa

SEQ ID NO: 732462 - DNA, 623 bp, Homo sapiens
aggggagagcataggttctaatccctgctctgccactcaccagggttgcggcattaagcaagttactgtccctctaggagcatcagtttccccatctttaaaatgggagacttaggccaggcgcagtggctcacgcctgtaatcccagcactttgggaggccgaggcggatcacctgaggtcaggagttcaagaccagcatggcaaacatggcgaaatcccgcctctactaaaaatacaaaaaacggctgggagtggtggctcatgcctataatctcagcactttaggaggccaaggtgggcagatcacctgaggttgggagttggagaccagcctgaccaacatggagaaactccgtctccactaaaaatacaaaattagtggggcayggtggcgcacgcctataattctagctacttgggaggctgaggcaggagaatcgcttgaacccgggaggcagaggttgtggtgagccgagatcgcaccatcgcactccagcctaggcaacaagagcgaaactccatctcaaaaaatatatatatatatttatatttatatatatatttatatatttatatttatatatataaataaatatatataaatatatatatatgaaacta

SEQ ID NO: 732463 - DNA, 556 bp, Homo sapiens
tatctgccactatacttagtgtttattctgtgccggccagatcctgggcattttacctagaataccttaactcgtttctttcttttttttttttttttttttttttttttgagacagagtcttgctctgttgcccaggccggactgcagtggcgccatctcggctcactgcaagctccgcctcccgggttcacgccattctcctgcctcagtctccsgagtagctgggactacaggcgcccaccaccgtgcccagctaattttttgtattttcagtagagacggggtttcaccgtgttagccaggatggtctcgatctcctgacctcgtcatcctcccgcctcggcgtgagccaccgcgcctggcaccttaactagtttctaaactccagaaatattagtgttctcaggctttcagaagagagccatggtctaacacgaggtgcttggtaactgcatggtcatgtggtcggcttgctgttttcgcctggtgacttcctcacctgtgcggggtctgcccgtttaacgcacctgcaacatgcattcctggacagtggg

SEQ ID NO: 732464 - DNA, 556 bp, Homo sapiens
tatctgccactatacttagtgtttattctgtgccggccagatcctgggcattttacctagaataccttaactcgtttctttcttttttttttttttttttttttttttttgagacagagtcttgctctgttgcccaggccggactgcagtggcgccatctcggctcactgcaagctccgcctcccgggttcacgccattctcctgcctcagtctcccgagtagctgggactacaggcgcccaccaccgtgcccagctaattttttgtattttyagtagagacggggtttcaccgtgttagccaggatggtctcgatctcctgacctcgtcatcctcccgcctcggcgtgagccaccgcgcctggcaccttaactagtttctaaactccagaaatattagtgttctcaggctttcagaagagagccatggtctaacacgaggtgcttggtaactgcatggtcatgtggtcggcttgctgttttcgcctggtgacttcctcacctgtgcggggtctgcccgtttaacgcacctgcaacatgcattcctggacagtggg

SEQ ID NO: 732465 - DNA, 556 bp, Homo sapiens
tatctgccactatacttagtgtttattctgtgccggccagatcctgggcattttacctagaataccttaactcgtttctttcttttttttttttttttttttttttttttgagacagagtcttgctctgttgcccaggccggactgcagtggcgccatctcggctcactgcaagctccgcctcccgggttcacgccattctcctgcctcagtctcccgagtagctgggactacaggcgcccaccaccgtgcccagctaattttttgtattttcagtagagacggggtttcaccgtgttagccaggatggtctcgatctcctgacctcgtcatcctcccgcctcggygtgagccaccgcgcctggcaccttaactagtttctaaactccagaaatattagtgttctcaggctttcagaagagagccatggtctaacacgaggtgcttggtaactgcatggtcatgtggtcggcttgctgttttcgcctggtgacttcctcacctgtgcggggtctgcccgtttaacgcacctgcaacatgcattcctggacagtggg

SEQ ID NO: 732466 - DNA, 606 bp, Homo sapiens
cgtcctccccacaccagcttacaaaggccatgtgcctttggggtggcacagggacaatctcaggaatatggtggcaaagggctgagtggggagaaagtgctggagaaaagtttaataatagagctgggttgggctcggcccgtttcctttttcagttgccctgatcgctgctcccattacgtgatgtggccgtgggcagagccagtcagctgctggggagattcaaacccaggtcagcctgggggccatgtctcctcaggccacctctgcgaagggtccacatgccacagtcagatgaggtccatgcacagctcacccgggctcgcctaacacagcctctctataaaaagcccggagctggcgggacagacagagtcaggccggaaggcccaaggttgactgtccctgcacccatcagccctcctgctcagctgcgtgccttgctmctcattgtctctcctgattgtgcattgctattttgggctctgggggacaaaggggagctgaagactgcagcaggaagctcacagggtggggagattggcgtcaaagccaatctcttggcgacagggcagctgctgccctccttccagcctctcccctgtc

SEQ ID NO: 732467 - DNA, 615 bp, Homo sapiens
tccagaggactttgataaactcaccagggagagagacacaagggccatgacaggaaacaggggcactggacgcttctgaccttcaaagacagccctggaggaaacatcccaccccacccaccatccatgcccgatgggtggactgctgacccagcatgggtagtcctaatttattcaaagaaatggaggaaagtttaatttctttgaaataaaatcctttaattttaagggatttaaaatgaaatcctttaagccagcactgcccttgtgcatggtgagacgacaaggggcaatcaaccccactcatcaacaaggtgcagcattgcaggaggaaaacatgcgggatttggagtctgacatccagagttcaaatcctggctccatcattcactcagaggctttgaacaaatcacataatctctctrggcctgttccctcattcataaaacaaaggtaaggatgtctgccctggagggatgatgtggagatgaaaccaaacatatgtgaagccctaagacagcacctgctatatggaggtgctcggagagcagccctaaccacagtccattccgaccttgtggacaagtcagacatgggctcggccctcaggaacgt

SEQ ID NO: 732468 - DNA, 655 bp, Homo sapiens
ccccagcacccataggtacgccaccctgggtttgccactgcagatgctgccaaggagaattagcattacagagcaaacgctccatctgcatctgggcaaagagcaatcaaatgaaagggtgggacagaagtacccctgagtacatgcaaggactggaggttcagcctgggagtgccccgaggacctgcccagggagagtctggcccatcaggaagggcttcttggagaaggggwacgtgttgggcttgcatggcatccaaacagaatgaggacagaggagagagaggcctgcgtgcctgaataccgcaagccaagacctgttcatggtgactcttgcagcttttttgaggggctctcacactaatgatcacatctggccctcacccacccctgcaagataagcagggaagttgtctccgtttgtaaaagagggaacaaagggccaaagaggggagagcactcgtctaagcaagtaaggagagctgggactggaacctatgtctcctgacttccaaaacagtgaaaacagtgatctttccttacaccaagcggccttacctgggtccagtgctgggccctgcttttatggacgaagctggccactcctggacatacacgtacccatgccacctgcacaaaggcaggcagaggaagg

SEQ ID NO: 732469 - DNA, 564 bp, Homo sapiens
agaaaaagacaaatgtctttttaaaaaaatgacatacataaactcacacttgccactattctcacttaggggcctttctcattcaggagaaagccattccagctgctacatgaaagatacttactgaaaactgctttgtgtatcacagctgtttgtgtattacgacaccctcccagatgcagtgacctctaaactggcttatttaatcaagatataaatraaaataaaaaaaatatagcccagaattcaaaatgccaaacttccaagagccgatcatgttagaagcaaaatcagtaatgcttctacctcttcaggctatttgcaacaagaccccaaaaaagctagtctgttgaaaacacggacttctcctcccacccctttgtcattttgttttggtagggccaactgtgtatctctttttcttaatgttacaattgttaaaataaaaattcatttgacacaatccaattttaggtttgtttattattatttttaaaatatccaatatgttcaagctttctctgcaacctttgctttctgtttaatgctattaattatattctt

SEQ ID NO: 732470 - DNA, 602 bp, Homo sapiens
tgagaattgctgtgataattacctagtggtggttcttaactctggttgcacattaaaatcacctgggaaacttttaaagccttctcattccagaccaattaaatacaaaattctagggatagggcctaggcaccagtgatttttttttttttttaaagatcttcaggtgattctaacatacaaccaaggtttagaatcagcggcttactgtcatgttgggttactgttggagtccgaatgccctaataacaagaagcagaggtgagcacccgctctgctcctcacagccctctgctttttgtctgattggagttatataaagcccaagtggaactaagactaagcayggtaattgtcatggcaatgccctagattttcctatcaaatccaatcttatttagggtgggagacacagaagtgactcttgtgaagttaaaatacttctgcccctatttagaatattcaacattaaatttgacagagttttgccatgaaatttcaaataccaaaacttttaaaaacagcagatctcacctgaaccacaaaagtttatcattaattgtaaagtgtgcttgatcacagagaattatccaggcaatcag

SEQ ID NO: 732471 - DNA, 573 bp, Homo sapiens
attgtaaataggactttattcacaatttggctctctggttgcctgttgttgatgcataggaatgctagtgatttttgtacattgattttgtatcctgagaatttgctgaagttgcttatcagcttaagaagcttttgggctgagaccaggcatggtggctcatgcctgtaaacccagcactttgggaggccaaggcgggcagatcatctgggatcagaagttcgagaccagcctggctaacatagtgaaaccctgtgtctactaaaagtacaaaaattagccaggcttggtggtgtgtgcctgtaatcccagctaccagggaggctgaggcaggagaatcacttaaatatgggaggcggaggttgcagtgagccaagatcgtgccactacacttcagcctgggtgasagagcaagattccatctaaaaaaaaaagaaaccaaacagacaaaaaaaagaagcttttgggttgagataatggggttttctagatataggatcatgtcatcttcaaaacaatagtttgacttcctttcttcctatttgaataccctttatttctttctcttgcctg

SEQ ID NO: 732472 - DNA, 577 bp, Homo sapiens
gttttctgacaattataggagtccaaaaatgagctggaccacactggaaggtaataagctcttcatcatcagaaatgttcaagaagatgaacacctgtcaaggctgctgtaaaggagctgcccacgtggggaggttagtttcatcaagttgtcagacgccagcaggctgggagctggtggagaagcagacctcacccaaggagtctgacttagtagctctggtagtatgtagagaatctttgttagaaactgctagaccagagcaatggactccacagtggagggcacaagatacatgaaatccccttgatatttacattctatataagagtaaaaaaaagaaagtwggcctactaacatttgatgtctagtgaatcagacagtcttgtgccacatctgagaggtcacacaggacactgcagcaagagcaggagtcctccaacacggaaggctgcagcaggatcttcctttgtttgtttacattcacatgtttccatacacctgtagtttaactgtgccctgtgaaagaaatgcatcttaaattgcagaattgcaaatagtattagctttagcttaa

SEQ ID NO: 732473 - DNA, 641 bp, Homo sapiens
ctcagggttaactctgactcctctcttccccacacgttccctagtcaatcagctgccaagttctatcaattctatctatgaaacacccttgaaatcttccttctcctctctaattctactgccctgctatcctactacttcatcaaggcccagcctattattacaaaaaccctgtaactggccttccttttccagtattgcctcattccaaccccgtctatatattaatgctctcatcctgctttttctctgctcaaaaatcccctggggtgggattctcactgtctaagaaacaaagcctgaattcttcctcctggtgttctcagcattgcaaggcctggctctaacctgtctttcccactttatcttctcccactccccttcatgtacactactgagtaattcttggtttcctgcacggattcatttcccttttggatgctgtcctatgttcacacatctccctcctctggaaattycctcctcctcattatagccttcaaaccccactccaagccccacttattcttcaagagccattcaaatgccacctccccactgcgctcctttaggcttctggttggaaagactctctccctaatctgtactccactgcactttaacaacatctgcccaacttt

SEQ ID NO: 732474 - DNA, 594 bp, Homo sapiens
cacaattgcttcaaagagaataaaatacctaggaatccaacttacaagggaagtgaaggacctcttcaaggagaactacaaaccactgctcaatgaaataaaagaggatacaaagaaatggaagaacatttcatgctcatgggtaggaagaatcaatattgtgaaaatggccatactgcccaaggtaatttatagattcaatgccatccccatcaagctaccaatgactttcttcacagaattagaaaaaactactttaaagttcatatggaaccaaaaaagagcccgcattgccaagtcaatcctaagccaaaagaacaaagctggaggcatcatgctacctgacttcaaactatactacaagcctacagtgacgaaaasagcatagtactgttaccaaaacagagatatagatcaatggaacagaacagaaccctcagaaataatgccacatatctacaactatctgatctttgataaccctgacaaaaacaagaaatggggaaaggattccctatttaataaatggtgctgggaaaactggctaaccatatgtagaaagctgaaactggatcccttccttacaccttatac

SEQ ID NO: 732475 - DNA, 610 bp, Homo sapiens
gccattccagccttctttcctcctggttgaaactatgtcttcctgatctacagatgtggcttttacttctgaggatttagtgaaaacttcctggttcaagcataaaaagaaaaagataaaaaaagatatatgtatatcatctatatctatatatctatatctatatctatatctagggttgcctgtaaatgaggcattacaaaaatcaattgcttttgattcatcaaaaattgattaaacaccatgggctgtaactatatttgaatccacgtagtcaaatcaatgttattcaagtagttatatttataagacagcctcatgactaatcaagtaggattcttagcttgatcttctgttttaagcatttggcttgaccatagaagtcttttggctatttaaaatatcaaatttattttcaaaggataaagatttttcccttttggaaaacagtgcctctgaaagcaatmctaaagatgtaattgctgcaatataaaatttggaacttagcttccaacagtgaccactttggaagtttatgattaagtgtaaattctggtataatagtttaacttcatgctcattatttttacagccagacctattaagaata

SEQ ID NO: 732476 - DNA, 617 bp, Homo sapiens
atagctgagacagaggttggtgggcctgtcttctgatgtactagtgtgcataattcctctttgacaaatgtttttggtagcaggaccaagagaaaatggggttgtagccaagcttgcaaggatatggggcagtttctaggtctggggatgggaccatgatcagtaagtgccaactgggtgtgggtctgtcctgtaaaaatgaaactcctaggtcttgggctctaccagagctttataaactcctacctgaatcccaaggctcctacaaaggcacttttgcctgttgatgactattatgaaattattgttcctttgggggatatgagtgggggatctcctattccaccatcttgctaatgtcttttctgtttyatgaatcttttaaatatgtagatccatggatcatttagaagtatgtcatttaatttccaagtgttgagagatttttcttttgactttgtattattaatttctggtttgattccattatgatcagagaacatattcagtataatttcaattcttataaattttacaaggtttattatatgacctaagatatggtctatgttccactggtgcatgagaagaatgtgttttctgctcttattgagtgc

SEQ ID NO: 732477 - DNA, 644 bp, Homo sapiens
atcacctataatgatacaaattgattggttaactaattatgggtttagttttgaaacagtaattttcttccgaatgatatttttcaatgttgtggatagtgaatcctttggaaaacatccaacattattgtcactaaatcgtatggaacatttagtggactgcatggattttctaaatcaaaaatatttaaaaataaataataaatacagagctataactggaccatcagcttatgtttagaacagtgcatgataacctagatacagttcctgtttagagactttttactgattttgttgtgacctggtcaaatttttaatcttttgctaatttttcccagaaataaaacaagaaaaacagagagtattgtcagtttaatgatttataaggcttgagtttcttaggtgagttattatgagatttcaaagtattattaacataatctatttatctctagatactttataaatacaaattatcttttgtgaaacaagttaaacacatattattaggactattttggargtgagttgtctctgaagctaagtggccacacagattacaaagcatttctatatcaaagcaggactggaatatatgatgcttaactccttcttgaaatgttgtcgcctatttactcacg

SEQ ID NO: 732478 - DNA, 644 bp, Homo sapiens
atcacctataatgatacaaattgattggttaactaattatgggtttagttttgaaacagtaattttcttccgaatgatatttttcaatgttgtggatagtgaatcctttggaaaacatccaacattattgtcactaaatcgtatggaacatttagtggactgcatggattttctaaatcaaaaatatttaaaaataaataataaatacagagctataactggaccatcagcttatgtttagaacagtgcatgataacctagatacagttcctgtttagagactttttactgattttgttgtgacctggtcaaatttttaatcttttgctaatttttcccagaaataaaacaagaaaaacagagagtattgtcagtttaatgatttataaggcttgagtttcttaggtgagttattatgagatttcaaagtattattaacataatctatttatctctagatactttataaatacaaattatcttttgtgaaacaagttaaacacatattattaggactattttggagrtgagttgtctctgaagctaagtggccacacagattacaaagcatttctatatcaaagcaggactggaatatatgatgcttaactccttcttgaaatgttgtcgcctatttactcacg

SEQ ID NO: 732479 - DNA, 628 bp, Homo sapiens
tctttgttgggttctaagtacattgtcttcaccaatttgacaggtgttcccttagctcttcctgtctttgaaatattgatttttctaaacctgctttctataacttacgacattggccctgctgtcttctattctgtgtcctgatactctagtcttagtcatttctctgcatcttagtttattctagacaatttatttccttgcacttgcatttatcctttcttgcttttttttttcttttttttttttttttccgtagatggagtcttgctctgtcgcccaggctggatggagtgcagtggtgtgatcttggttcactgcaacctctgtctcctgggttcaagtgattctcctgcctcagcctcccgagtagttgggactacaggtgcccrccaccatgcccaggtaatttttgtatttttagtagagatggggttttgccatgttggccaggctggtctcaaactcctgacctcaggtgatctgccaccttggtctcctaaagtgctgggattacaggcgtgagccactgcgcctggcctcttgaattttccctctgttgtcttttctctttttgaaaatttttattttgtttaaaaaaatttctacttaggtcattctcacaggc

SEQ ID NO: 732480 - DNA, 626 bp, Homo sapiens
aaacaaacaaacaacaaccagaattcaccactttttcaactgtgtgctttttctttgatacctctgataatttagctatgttaccttattactgtacttgcatgttgtaaatgatcaatacatggtttttaaattgagtagggtatctacaagacacacttaactgcataatttgtgtctaaatatgtcatgtatgtattttttttgtgtgactcacttatagaaaggacttccctgttgtggttcttcggttgagataattaacacctcaaaatatcatatatagttctgaatttctagagttttattagttgtaaagtgattttagaaatgcactctgattctaaatgtttgtcatgtggatagaaattttgctatgaataatacattttcattaaaataaagacgtgtttttcatgctatatatatatatatatttttttttttttagtgtaattgcccatttgttcttttttttktttgtttgtttttttgatatggagtctcactctgccacccagtctggaggggagtggtgtgatctcagctcactgtaacctctgcctctcaggttcaagtgattctcctgcctcagcgtcccaagtagctgagattacaggcatgcc

SEQ ID NO: 732481 - DNA, 623 bp, Homo sapiens
ataatatttacatgatatcagcccaattaaatttgtgttttcccttatggaatttctgcacaaaggaaaatacctttttataggcacaatgcttataacacaaagtcctttggaatgatatgataaatattacttattttcagatgaagttatttgaaactaattttagggatttctggagaagtaacagaaaggggcagatccttaatttctgtatcctgtatattaaatatttgaagtatttaagaataaaatttaggaaaataatatgaaaataaatgacattcttctatttttttcttgaatttgattgattctaagaaaataaaaatttaaatttattaaagcctgtcttggaattttgaaatagctaatgatgtctaactttttccccttatcttatgaaagtrtatgacctctcccctgcccaagagagttaaagaagaatggaggaactgacataatagagttttgtgggtggatttaatgttaaatagcaaacttgtaagtttctccaggttcttgtaaacctctgcagtggctgtgtcttgctccttttgcggttccttttgcaatcataggaaaaaaaaaaaacatgatttcttttttttttttttttgaga

SEQ ID NO: 732482 - DNA, 606 bp, Homo sapiens
aaggaaaaaagactatcgcgatgcaaacagaaaagtgatgacttccgaaaatgtgcctagacaacaacaatttgaaagtaggacactgaaaggaaaaaaaaaaaatcaaatctaggtataatttactcatgattacttttgtttcctggtcatagtatgtgggaaattcacttagataaaaatgagtttattttacctttttttctttttttttctttttgagatggagtctcactctgtcgcccaggctggagtgcagtggcttgatctcggctcactgcaaactccgcctccccagttcaagtgattctcctgcctcagcctcctgagtagctgggattacaggtgcaacaggtgtgcgccatcatgccctgtttatttttgtatttttagtagagagggggtttcaccatgttggtcaggctggtctcgaaatcctgatstcatgatctgcctgccttggcctcccagagtgctgagattacaggcataagccaccgtgccaggcctattttacttttttagagacacagtatctctctgttgctcaggctggaatccagtggcatgatcatagctcactgtggcctccaactcctgggttca

SEQ ID NO: 732483 - DNA, 601 bp, Homo sapiens
agtacacaataaacgtaatgtgcttgaattgtcccgaaaccactccacccacctggtctatggaaaaattgttttccacaaaaccagagcctggtgccaaaaaggttggggactgctaccttaaataatggggctcagaaagcttctgggttgatgaacatstggaggtgctgggagtatggtatgtccagagagggcatggaagttctgtgcctgtttccctatatcctgccctatttatcctttctgtttaactgttcttgagttgatcctttataataaactggtaatagtaggcaaagtgttttcctgagtcccgtgagtcattctagaaattatcaaaacttaagtggggaagattgtggaaaccccaaactttgtagcgaatcagaagtatgggtaacctggtgtacaagtctgttcttgcactgctataaatgaataaatacctgaaactgggtaatttataaagaaatgggctcacagttctgcagggtgtacaggaagcatgatactggcatctgctttgcttctggggaggcctcaggaaacttacaatgatggcagaaggcaaaggagaagcagacatgtcttacgtggc

SEQ ID NO: 732484 - DNA, 456 bp, Homo sapiens
atgattcaaatttgttatcactgaattacacagaagagaagccaaggactttttttttttttttgagacggagttttgctttgtcactcaggctagagtgcagtggtgcaatcttggctctccgcaacctccacctcccaggttcaagcaattctcctgcctcagcctcccaagtagctgggattacaggtgcaygccacaatgcccagctaatttttgtagttttagtagagatggggtttcaccatgttggccaggctggtctcgaactcctgacctcaggtgatctgcccacctcggtctcccaaagagctgggattacaggcatgagccaccgtgcccggccaggaacatttttatttaccatctttgaccaaaaatattcataagtaactaaacttacagtaatatattaaaatattctaatctgaactattctagagataaatgtatcaa

SEQ ID NO: 732485 - DNA, 408 bp, Homo sapiens
gacttcttgttgatcaaagagcacttacattatgagtgtctctctaacaccgcacagatgtgactatttagacagattgttgacgatattgttgctccttttcatttttttattttcattttttgagacaggatctcactctgtcgcccagtctacagtgcagtggtgcaatcaccgctcactgcagcctcaatcccatgggctcaagtggtcctcctgcctcagcctccatggtagctgggaatacaggcacacaccaccatkcctggctaatttttaagtttttttgtggagatgggatctccatctgtttcccagactggtctcaaactcataggctcaagcaatcttcccttcttggcctcccaaattgcagtggttacaggcatgggccaccatgcctagcct

SEQ ID NO: 732486 - DNA, 623 bp, Homo sapiens
ggagccaatgcctgccctgcctcccttgtgaggctattcggtatagataccctgatgattgtttctctttcttggcagtagaaagaacatgggccttgcagaaagacaagaattctggcctaatcgctcactacacttactacagaggatagaattcyggcccaaggatgtttcaccttgaccaaatttctttttttttttttttttttgagacggagtctcgctttgcccaggctggagtgcagtggcactatcttggctcactgtaacctccgcctcctgggttcaagtgattcttttgcctcagcctcctgagtagctgggactacaggcacccgccaccacgcccagctaattttttgtgttttcagtagagacggggtttcaccgttagccaggatggtctctatctcctgacctcgtgatccgcccgcctcggcctcccaaagtgcagggattacaggcatgagccactgcgcccagcccttgaccaaatttctaaccttttgtgcccatttccacaagtgtgaaactgagttttcctataccgcaggatttttttaaattaattattatttttttttagacagggtcttgctctgtcacccggttggagtgcagtg

SEQ ID NO: 732487 - DNA, 542 bp, Homo sapiens
accggtgcatgcagcccctgtcacgtaccgcctgcttgctcaaatcaatcacgatcctttcatgcgaaatctttagtgttgtgagcccttaaaagggacagaaattgtgcacttggggagctcggattttaaggcagtagcttgccgatrctcccagctgaataaagcccttccttctacaactcggtgtctgagaggttttgtctgcggctcgtcctgctacaatcccagcactttgggaggccaagccaggcggatcaagaggtcaggagttcgagatagcctgaccagcatggtgaaacactgtctctactaaaaatacaacaattaactgggcatagtgtcacgcatctgtaatcccacctactcgggaggttgaggcaggagaatcacttgaccctgggaggtgaaggttgcaatgagccgagattgtgtcactgcactctagcctgggcgacagagcgagactccgtttcaaaaacaacagcaataacaacaacaaaacatagatatgtatgtatgtataggaaaaggcatggctt

SEQ ID NO: 732488 - DNA, 504 bp, Homo sapiens
ataattacattatatttaaatgttctaaaaataccaactaaaagacagaaattgtcagaatgtatcataaaagacctgatccagctccgtgctctctataagaaattcatttcaaatatactggcataggtgtcttaaaataaaaaggatagaaagttctataccatgtaaacattaattamaataaggtaggagagactatattaatattagaaaaagtagactttggacctaagaaacttcccagggataaagataggcactacatattgataaaatagttaatttgccaaggaaacctaccaattctaaaagtgtgagaactcaaaagcacaggcaacacagcagaaatagacaaatggggtcacatcaagcaaaaaagcttctgcacagcaaaagaaacaataacaaaatgaacggtaacccacaaaatgggagaaaatatttgcgagctacccatctgacaaaggattaataaccagaatatataagaagtttaggccg

SEQ ID NO: 732489 - DNA, 526 bp, Homo sapiens
cgcgtgagaaaagtaatagagtaaattggtactgcagagagtgtggtatgctataaagatccctgaaaatgtagaagcaactttggaactgggtaacaggcagaggttggactagtttggagggctcagaagacaggaaaagaaagtttggaactacctaaagacttagaggactcagaagacagaaagatgtgggaaattttggaacttcctagagacttgttgaatggctttgaccaaaatgctgatagtaatattaacaatgaagtccaggctgaggtggtctcagatggaaatggggaacttgttaggaactggagcaaaggtgactcttggtatgctttatttagcaaagagactggcarcatttggcccctgctccagagatctgtggaactttgaacttgagagagatgatttagggtatctgatggaaaaaagttctaagtggcgaagcattcaagaggaagcagaacataaaagtttggaaagtttgcagcctgaccatgtgattcaaaagaaaaac

SEQ ID NO: 732490 - DNA, 606 bp, Homo sapiens
gaaggtcacaaactgcataaaaatgacaatcagatgctaacatcaatatgacagaattacgttagaattatctaacaaatattttaaagtagtcataataaaagtgcttgagtgagaaattacaaacacacttgaaacaaatggagtagaaaagagtctcgacaaagaaataaatgacatagagaagagccaaatggaaattttagaactcaaaaatacaataaccaaattttaactcagtgactgagccaaaaagcataatgaaggagacagaagaaaatatcagtgaagtggaagagaaaataatggaaattatccatttgaacaacagagagaaaaaacagactgaaaaaaataacaccacctcagggacctgtgggattacaacaaaaaacataasatttattttatcagagccttgaaatgagaggagaaagaggatgggactgaaaagtactcaaccaaagagtggctgaaaatgtctctgagttattgagacataaatctacagattcaaagagctgagttcacccaaacaagataaatgcaaaaaattccatacaaagacacatcataattaaatttttggaaactaaagacaaatac

SEQ ID NO: 732491 - DNA, 687 bp, Homo sapiens
ttgaccacagatgcttcttaatatttgccgatttattgctgaaacaagtgcagcagattaacattataggactgtggtctttgggaatactctcgtctctctattggatcagtgtttattttcagtgtttatttgtattctgaaggtgagttggatggatatagcaactttagttggcaaatctacttttttcttgaaaacagaattgaaaataaaatcctgttatacagaaacattacataccatgtctaagagtattaaacacttcccaaaccacactctctcagacacaagtgggagcttgggaagctaattttagttactgaatgtccagtatgtgttatatctcctttcctaaggacccctcaagaagagagaagaccatctaagccttactaatcaaaggatgacccatggaccagcarcatctacagcatcaggtagcctattagaaatgacaaatctgaacaggcttctcaaggttattcatgtgctcattaaaacttaagaggcactggtctaaataatgtatatttccagtcatcttacatcagttgtatatatggcatggtataaataataactgaatgaagaaaaagatgaatgaatgaatatttaatgattaaatggactaatgcttcaatggatatagatgattaaatgagtgaatgaataaataatttttcc

SEQ ID NO: 732492 - DNA, 479 bp, Homo sapiens
caatatcatagaacgggtgtacacccgctggaatattgggagtaatatcattttctccacccccggatattagaaacaatatcacagaaccagtgtatacgccctgcaatattgacagtaatatcatcctctcttttcctggatattaggaacaatatcacaaaggggtgtacatgccctgtgctgctggaaatagtatcatcctgtgtcttcctggatattaggaacaatattaaagggggaatgtacaccccctgtgatattgggattaatatttttctttcccctcctggatattagaaacartatcacagagagggtgtacccccctgcagtattaggagttatatcatcctgtttcgttctggatattaaagacaatatctcaaagggtgtgtacacccctttcagttttggaaggaatgtcaccctcttctctcctggatattaggaacaatgtcacaaagaggaagtacaca

SEQ ID NO: 732493 - DNA, 543 bp, Homo sapiens
ctctcagttgctgaggatccaacttttactcatttgttttcttcatgaatatgtatttcctgagttgtatgtttgtacatagctatttgtagcctttgaagtttatggaagtttgtttggttgcattcttggggcacattttctttccctgatgactgttaaggttwggatatttgacccttccaaagctcatgttgaaatttagtccccaatattggaggctgggcctaatacaaggtgtttgggtcatggggacagatcccccccattgaatagattaatgtcctctcctgatggtgaatgaattcttcctctattagttcctgcaagacctggttgttaaaagagcgggccacctccccggtttctctcttgcttcctcgctcatgtaatctctgcacatgctggcttccccttctcttctgccatgagtgggagcagactgtggccatcaccagacgaagatgcccaattttgaactttccagccaccagaatcataagccaaatcatccctttgcctttataaattatccagcctcgg

SEQ ID NO: 732494 - DNA, 543 bp, Homo sapiens
ctctcagttgctgaggatccaacttttactcatttgttttcttcatgaatatgtatttcctgagttgtatgtttgtacatagctatttgtagcctttgaagtttatggaagtttgtttggttgcattcttggggcacattttctttccctgatgactgttaaggttaggatatttgacccttccaaagctcatgttgaaatttagtccccaatattggaggctgggcctaatacaaggtgtttgggtcatggggacagatcccycccattgaatagattaatgtcctctcctgatggtgaatgaattcttcctctattagttcctgcaagacctggttgttaaaagagcgggccacctccccggtttctctcttgcttcctcgctcatgtaatctctgcacatgctggcttccccttctcttctgccatgagtgggagcagactgtggccatcaccagacgaagatgcccaattttgaactttccagccaccagaatcataagccaaatcatccctttgcctttataaattatccagcctcgg

SEQ ID NO: 732495 - DNA, 621 bp, Homo sapiens
tctcaagtctattttctctaggacatagtttaaacccattgtttcttccttgactttctgtcttgatgaccagtctagtgctgtcagtggagtactgaagtccctcacaattattgtgttactgtctatctcatttcttaggtctagtagtaatagctatataaatttgggagctccagtgttaggtgcatatatatttaggattgtgatattttcctgttggataaatccttttattataatattttattattatataatgtccctctttgtcttttttaastgctgttgctttaaagttagtttttttgatataagaatagttactcctgctcacttttgtggccatttgcatggggtgtctttttcttaccctttaaccctttaaagtgtttatgtgacactttagggttaggggagtctcttgagggcagcagatacttgcttggtgaattattatcaattctgcaattctatatcttttaagtggagcatttagaccacttacattcaatgttagtattgagatgtgaggtactgttccattcatcctgctatttgttgcctaaataccttggttttattcatttatttattgtatttttgttttataggtcctgt

SEQ ID NO: 732496 - DNA, 602 bp, Homo sapiens
cttttttgaaagtaacacaccaaaagagatagcatgctagtgtgggcctgttcctaatatttgtaagatgcaggcaagaacacacgcagggaccaggactgggcagccctgtggtttcttaccgaggtcgaggaacactgattacatgcatgtgaacacttcagccagtatatgcaaggtctgtcttcttwcccatcccaccctcatgagacacaggtatgtgtccaccacagtaggcacagggccaggagagtctaggtgctgatcctaagcatagtcgagagtgggttgtcagggtaggcatgggggataatcacaggtgagccagaatagatgtggagtccagggaagaagcagctttagctgcctcaaacctaaagggagtggggaggtaggaggagcgagtactgtactagtattaatccattcatatcaatgcattcaatgtgtcctattgcgtatgagacacccacaaccacttaacgaaacccattgttacaccaacaaaacaaacatgaatgcatgccctgccctaatctagaacccaagttgtagcatttcactcatagaaaacaaaacaaaacaaacaaacaaaaaacaga

SEQ ID NO: 732497 - DNA, 611 bp, Homo sapiens
gaagtaatgtacctaaatttcccaatgtcaatatggcccacatcactttcttacttaaacccctgtaatgatttctcattttttattatgtaaaattaagtttctcatcatggcctgaaaattgcatgatctggccatgcctaactaacaccttccctaccatgtwtgctgagctcctgctgcaggcattccttgcacatcatggttttggtttcttccctctgtaccctttcatgtcatgggtcccttatctggaagattcttctcccttttgtttgactgggtaatatttattcctctttcaaaacatggtttaatgaatattcatcccagtgaccaatgactattgagatctaactattaggcaaacttctagtaaccacacatcatgtccccaagtgccgtatttattaggcactgcaccaggttgctgaagtatcttatgggcaccatattaaaaattcatctagctttcaaacacatagacaaaatatctgattaataggatagggactttctgagcatataaaagctagaaatcaaaaagaaaagacaagtagatctaattacatacaaattagaaacttctgttaaataactcggaaaacttt

SEQ ID NO: 732498 - DNA, 598 bp, Homo sapiens
gctactatttctaaacaatcatttttattcacgaaaacacattttagaccctttccacatcccaccttcatcctatgaatatgtgagatttttatgggctcacagacagttttggaataaagaaaagactattcagagtttactttggatataaaaattaatagtaagtgagttaattttrttaaagttaccaaccaaataaataccaagaatggaccaatgatgagaatgtgttatgaaccaaggattctaaatgatcctctgaacgcctgtcacacatttaaaaaagaatacagaaacttgattattccttaaacttttaagttcagcttacaagtattattttattggtaactgtagcagattttaacaatcacttttaagagctctttggataatattgattcttaatgttcaagtgttacaactaaatttataaatttaacatattcagtatactttttaagtatttcaattgtatttatccaacaaattttcctctgtacttaaagtaattcttatatatctgataaattaaatttgtaaatatggtgaattttgattttataccaaatataagctaattaaaatttcaacc

SEQ ID NO: 732499 - DNA, 478 bp, Homo sapiens
acctcctggttcttggaatctagacacaagacaaaggcaaaagaattaaaaacagtaatcgtatctgtggcaagtgctgcagggtgccatccagatctctcatcaggtcctaagtattcatcccccagctgccaggggtgttgacttctggtggctwagctgagttcctttttaagttatgtccatggcctaagggggccacgtttcccagtgacacctccctcccaaagacagacagtatccaatccagtacctggtcaatgtgtatgtgttgggtgggtttggtggggtggggtgggggcagtcaaagctgatctttctgcttaatttcagagcaactctgaacggccatcccaggtccaaagctccccgtaagattggcaggggcttttatttggactgcattgacgtttgacttctccttctgacctgtccttctcctatcacccaccaaaagaattttctgtgtacaaatctc

SEQ ID NO: 732500 - DNA, 510 bp, Homo sapiens
agctaactgtacaagggagagtacagcaaacaacctcctggttcttggaatctagacacaagacaaaggcaaaagaattaaaaacagtaatcgtatctgtggcaagtgctgcagggtgccatccagatctctcatcaggtcctaagtattcatcccccagctgccaggggtgttgacttctggtggctwagctgagttcctttttaagttatgtccatggcctaagggggccacgtttcccagtgacacctccctcccaaagacagacagtatccaatccagtacctggtcaatgtgtatgtgttgggtgggtttggtggggtggggtgggggcagtcaaagctgatctttctgcttaatttcagagcaactctgaacggccatcccaggtccaaagctccccgtaagattggcaggggcttttatttggactgcattgacgtttgacttctccttctgacctgtccttctcctatcacccaccaaaagaattttctgtgtacaaatctc

SEQ ID NO: 732501 - DNA, 571 bp, Homo sapiens
gccccaagaattatcagcacttgaagtttactctcagatataacacacccaagcatagcattcacctcagatgcaaattcacacataatgctttttgcctcaaaggaaacaatggatagaagggacacaaaagtagatttytgggttgagttgtttcttaaaaaaatagaatttggctgggcgtggtggctcacgcctataatcccagcactgtgggaggccaaggcaggcggatcgcctgagctcaggagttcgagaccactctgggcaacatggtgaaatcctgtctctagtaaaatacaaaaaaaaaaaaaaaaaaaaaaaaaaattagccaggcatggtgacatttgcctgtagttccagctaattgggaggctgggacatgagaatcgcttgatccctggaggcagaggttacagtgagccaagatcgcaccactgcactccagcttgggctacagagtaagactccgtctcaaaaaataataataaaaataaaaatagaactcacttgtaccaatgtctgtaatttacttcatataatcaatgtactatgatgtttgaccagtta

SEQ ID NO: 732502 - DNA, 668 bp, Homo sapiens
actcgatcaagtggaagaaaggatatcagtgttgaagatcaaattaatgaaataaagtgagaaggcaagattagagaaaaaagagtgaaaacaaatgaacaaagcctccaagaaatatgggaccatgtgaaaagaccaaatctacatttgattggtgtacctgaaagtgayggggagaatgtaaccaagttggaaaacattcttcaggacattatacaggagaacttccccaacatagcaaggcagaccaacattcaaattcaggaaatgcagagaacaccacaaagatactcctcgagaagagcgatctcaagacacataattgtcagattcaacaaggttgaaatgaaggagaaaatgttaagggcagccagagagaaaggtcgggttacccacaacgggaagcccatcagattaacagaagatctcttggcaaaaaccctacaagccagaagagagtgggggccaatatttaacattcttaaagaaaagaattttcaaaccagaatttcatatccagctaaactaagcttcataagtgaaggagaaataaaatcctttacagacaagcaaatgctgagagattttgtcaccaccagacctgccttacaagagcacctgagggaagcactaaacatggaaaggaacaaccggtaccagacactgca

SEQ ID NO: 732503 - DNA, 668 bp, Homo sapiens
actcgatcaagtggaagaaaggatatcagtgttgaagatcaaattaatgaaataaagtgagaaggcaagattagagaaaaaagagtgaaaacaaatgaacaaagcctccaagaaatatgggaccatgtgaaaagaccaaatctacatttgattggtgtacctgaaagtgacggggagaatgtaaccaagttggaaaacattcttcaggacattatmcaggagaacttccccaacatagcaaggcagaccaacattcaaattcaggaaatgcagagaacaccacaaagatactcctcgagaagagcgatctcaagacacataattgtcagattcaacaaggttgaaatgaaggagaaaatgttaagggcagccagagagaaaggtcgggttacccacaacgggaagcccatcagattaacagaagatctcttggcaaaaaccctacaagccagaagagagtgggggccaatatttaacattcttaaagaaaagaattttcaaaccagaatttcatatccagctaaactaagcttcataagtgaaggagaaataaaatcctttacagacaagcaaatgctgagagattttgtcaccaccagacctgccttacaagagcacctgagggaagcactaaacatggaaaggaacaaccggtaccagacactgca

SEQ ID NO: 732504 - DNA, 447 bp, Homo sapiens
agaaatctggtaccaggtgttggcttcagataataaggaagtgtaattacttctaaattactcagataaggagttttgcctctggattgtctgcttggtagccactaggtgatctttgctttcctcactcacttttctggtagtcctgtaaattggaataactttggaaaatgtttggtaatatctaccaaagctaaacatatgtcctatgaccctgcagtcctgctcctggatatatactcaacagaaattagttccatgcctatgaaagacttgcacaggaacgttgacagcaatyttattcaaatagccaaaaactggaaatgacccaaattgttcatccacagtaaaaggagcaaataaatgatagtatagtcatacaatgaaatactgtagagcaacaaaaaagaacaagttactgattatataactatgtaaatgaatctc

SEQ ID NO: 732505 - DNA, 583 bp, Homo sapiens
aataatcacatcaggataagtgagttgcccatcacctcaaacatttctcctttatttaagttacaaacaatctaattgaactctcttagttatttttaaatgcacaataaattattattgactgtagtcaccctgttgtgctatcaattattagatcatattcattctatctatctatatttttgaagccattagccatctccatttccaccccctacctgctctagttcccagcctctgataactatcattcattctctatctccattagtttgttttaatttttagctcccacaaataagcaagaacatgcaaagtttgtctttctgtgyctggctgatttcacttaacataatgacctccagttttatccatgttgctgcaaatgacagggtttctttcttttttatggttgactagtactccattgtgtatatgtaccatattttttaatccattcttctgtcgatggacacttaggttgcatccaaatcttggctattgtgaatagtgctgcaataaacataggagtgcagatatctcttggatattctagtttcattttttttaaatatatacctag

SEQ ID NO: 732506 - DNA, 634 bp, Homo sapiens
caaaataccatcatcattcttcatggatctagacaaaataattctaaaattcatatggaatcaaaaaagagccctcatagccaaagcaataataagctaaaaaaaagaaaagaaaagaaaatctagaggcatcacatactcaaattcaaattatattaaaaggctatagttaccaaagcagcacggtactagtatagaaatgaaacagaatagagaatctgtaaataaagccaagtacttacagccaactcatcttcaacaaagcatgcaaaaacataaattkggaaaagaacactcgattcaataaatggtgctgggaaaactggcaagccacatgtggaagaattaaactgcatcctcatcttccaccttatacaaaaatcaacttaagatggatcaaagacttaaatctaaaacctgaaatcataaaaattctagaagataacataagagaaactcttctagacattagcttaggcaaagacttcatgactaagaccccaaaagcaagtgcaacgaaaacaaaaataaaatagaacctagtttaactaaaaagcttctgcacagcaaaagaaataatcggcagagtaagcagaccacccacagagtgggagaaaatatttacaaactgtgt

SEQ ID NO: 732507 - DNA, 522 bp, Homo sapiens
tcccatcatccttcaggacctccctgatcctaggttgctcaggtcccctgtggacctgcctcagtaacaattagtatggctgtcactaattgttagtatcatttacaatttttttttttgagacagcatcttgctctgttgcccaggctggagtgcagtggtgtgatcatagctcactgcagccttgaactcctgggctcaggtggtcctcccacctcagcctcccaagtaamtgagacctcaagcacatgctaccacagcctgctaattttttgttttgttttgttttgagacagagtctttctctgtcatccaggctggagtgcaatggtgtgatcatagctcactgcagcctccacctcctgggttcaagtgattttcctgcctcagcctcccgagtagttgggactacaggcacccatcaccatgcctggctaatttttgtattttcttttttttttttttgtagagagtgggtttccccatgttggccaggctgctgttgaactcctgacctcaagt

SEQ ID NO: 732508 - DNA, 444 bp, Homo sapiens
tggtactcagtgcaccgtgtctgtataccagcagaaccaggccatgctcagtggtctcttattaggagaaagttactgaaatcagtctcctgtccaattgaagtgtagttgtggctgttggaacaggggtcagttagccagtgttggtggatgagcygcgatcatttcaatattgcttatctcgaaggctagtgttactttagccgctagagagaaagaaaattctgtgttagaacatagcttattctttaaatgtaggaaagtgtggcttagcccttgcctgcatgaccttaggttgagtttataatttggtatcttatggccacagagagtctgttctgtcagtctcatgatctcgattttagcgttaatgctagtcagttgtcacctctaaacttccaaagggaggggctgtaatgaggtgtaacctcccatcctgtcatg

SEQ ID NO: 732509 - DNA, 633 bp, Homo sapiens
gttttctgtctctagaatgataagaggaaaagatggaggaggaaaggtggtcagtgactctagggagtagcctctctctgggatgactccacaacgacgaaacaagcccgtcttttttttttttttttttttttttttgagatgaagtctcactctgtcgcccagactggagtacagtggtgcgatcttggctcactgccgtctctgcctcccgggttcaagcgattctccacccaagtagctgggattacaggcacctgccaccatgccctgctaattttttgtatttttagtagaggcgaggtttcaccatgttggtcaggctggtcttgaactcctgacctcagtcgatccacccaccttggcctcccaaagtgctgggattacaggtgtgagccaccgctcccagcccaagcgcatyttttaagcaaaatctttaaaatggcttgtatttctagacggttaatgtctttttctttttcttctttctgtctttggatgtttacttgacaagttcctgatggtacccaaagccccctgttgttttaatcttacaacttgttagcagaataaaattgagggtggcctccatgtgcaccagcctcctaggcagctgtttctctttccaaggtg

SEQ ID NO: 732510 - DNA, 557 bp, Homo sapiens
atattagccagtattgttttttgtttgtttgttttagagatggaatctcgctctgttgcccaggctggagtgcagtggcacaatctaggctcaccgcaacctccgcttcacaggttcaagcaattctcctgcctcagccttccgagtatctaggattacaggcacccaccaccatgcctgcctaattttttgtatttttagtagagacggggttttgccatgttggccaggctggtatcgaactcctgacctcaggtgatctgcctgcctcggcctcccaaatgctgggattacaggcatgagccaccgctcctggccccagagttgttttaaattcctggtctgataatttcaacatccctgccacatccctgccacatctgcatctggttctgatgcttgttctgtctttcraactgcattttttttttttttttttttgcctctagtctgtcttgtagtttttgttgaaagccaggacatgatgtactgggcaacaggaacttgggtgagcaggcgttcagtgatgcggtggtgagtggggggagggaggggtt

SEQ ID NO: 732511 - DNA, 601 bp, Homo sapiens
aagttttgcattttcagtagagatggggtttctccatgttggagttgtgaccattattgcctaaactatttttactgcgcctttctctcctcttcttccaggattctcattatgtgtgtgtcttggtatccttgatggtgtctcacaggcttctgagcctatgttcattttcgtttattcttctttttgctccttagactggatgatttcaattgacctataatatctctagacctctgattccgaaatgccatcatagaggaaaattggattcactccccgacttccacagaaccaaaaacaaatatatagcactgagatctacaccagaaacaacccakagctcaagtataagagtgagacagttcttggggccacagagggatgaaaaaagtccaagcagctgataggagaatcagacttccacatctgggacacccctcatccccattctgtccagcaccaagtgccaaaaaatctcctcccaactacagtttctacactggaaaaactgaaattgaggtggcccaccagcttccttaccttcttggggtccctggcaggagaactgttcttgccttaatccacagatagcatcatg

SEQ ID NO: 732512 - DNA, 601 bp, Homo sapiens
aagttttgcattttcagtagagatggggtttctccatgttggagttgtgaccattattgcctaaactatttttactgcgcctttctctcctcttcttccaggattctcattatgtgtgtgtcttggtatccttgatggtgtctcacaggcttctgagcctatgttcattttcgtttattcttctttttgctccttagactggatgatttcaattgacctataatatctctagacctctgattccgaaatgccatcatagaggaaaattggattcactccccgacttccacagaaccaaaaacaaatatatagcactgagatctacaccagaaacaacccagagctcaagtatragagtgagacagttcttggggccacagagggatgaaaaaagtccaagcagctgataggagaatcagacttccacatctgggacacccctcatccccattctgtccagcaccaagtgccaaaaaatctcctcccaactacagtttctacactggaaaaactgaaattgaggtggcccaccagcttccttaccttcttggggtccctggcaggagaactgttcttgccttaatccacagatagcatcatg

SEQ ID NO: 732513 - DNA, 632 bp, Homo sapiens
atatattggattaaataaaatatattactaaaattaattttgtatgcttccttttactttttaatagagctactagaaaatttaaaattatttggttttccattcatagctcactttatttctcttatttctcgaaagcactattctagatagaggattagtaaataatggcctttgggccaaatcctatctattgcctctttttgtaaataaaattttattggaacacagccacatccatttacttacatattgtatatggcagagttaactagttgagacacatggccagcaaaacctaaaatatttactatcaggctttttytagaaaacatgtgtggagctttgttgtagactctaagcttctaaaagtaacattatttgcaggtagtctaaaatgcatgttcattttttaaaaaggcttgaaaaatgcaaaacatacagagaagataaatttaggctaagaatgtgtaacacagtgcaagtccccttcaaaaattacctttacttcctaatgttgaaataggaagctaacgtaggcgagccttaataaaatattggatagatgagtaaatattcaataacttccattacaaagttctaaaacaatcaaggtgagtaaaaccttgggg

SEQ ID NO: 732514 - DNA, 500 bp, Homo sapiens
tccctaggaaacttacaaccacagtggaaggcaaagaggaagcaaggcaccttcctcacatggcactaggaaggagaaaagcgcaagagagagcagggaaaactaccttataaaaccaccagattttgggagaactcactccctatcacgagaacaggatgggggaaactttccctgtgattcaaatacctccacctggtctctcccttgccacatagggattacggggattataattcaagttgagattttgggtggggacacagccaaaccatagcagagcactaacatgacktaacccatgtgaagtatataacatggtgtctagcacctaggaactattttttaagtattaacaattatcattatcttaaaattcatgtgaaattttcatttacttgattatataaccctatttgctttgatataacaataaatatgtaaattatttactactcaatgaaactgttcaggaaatagcctgatgtttacaatgtggc

SEQ ID NO: 732515 - DNA, 580 bp, Homo sapiens
gttgatatccaacaaccctgaaaaaccttacacatgtgcattaggctacatttacaggaagattatcagaacgttatttacaaaaggggaaactggaaaaaattaaatgttcatcaatatgagaatgggataaatacatttttgtatattccaagttgtgttcctgtactgaacttaaaatccagccattgcagctctacatatcattattacatatcattatcattgtttcccctgtatacagtgcatattcatgggtgtgtgtgtgtgtgtgtgtgtgtgtgtgtgtgcatgagggaagaaaatatacccaattaggttcaccagtttatgtttaccagtttgggagagaagagagaagaaacaattggagcasacacaataaacaaagaccaatttaaatttacatgtaaaaatattttatcttaacaatttcagaagtgaaggaaaaacctgtgaatttgctaatagatgctatatatttatttctagtcaaaagtttaagaaaactgctcatgattttatagaattttgtggcaagtcaggtaaataaatacttgctatatttatttataatgtt

SEQ ID NO: 732516 - DNA, 653 bp, Homo sapiens
atttgcattttttactcaacatctagaagtttatgattcatcctggttaatatgtgagaaactagttcatttatttatgttactaaatagtattcatttgtgtgttcttttcaatttttaaaattgtggtaaaatacacatgacataaaatttaccttttaagcatttttaagtgtacaayttagtgccatcaagtacattcatgatgttgtacaaccatcaccagtatccctttccaaaacttttcaatcatcccagtcagaaactgtactgatggaacaatgactcctgtttagccccttccctcaggccctggtaacctctgttctacttcccatctctaagaatttgtctattctaggtacctcatataagtgaaatcatataatatttgtactttgtgtacaaaaatacagtggcttttttcacttactatgggtttatccatattcaagcatttgtcagaatttcattcctttatagttgaataattttccattgcacgtaggtcatacattttgtttattcatctgttgattgacacttgagttgtttccactatttggttattgggaataatgcttctataaacatcagcatacagctgtttgtttggatcctagtactttcagatatttggggttatatactta

SEQ ID NO: 732517 - DNA, 653 bp, Homo sapiens
atttgcattttttactcaacatctagaagtttatgattcatcctggttaatatgtgagaaactagttcatttatttatgttactaaatagtattcatttgtgtgttcttttcaatttttaaaattgtggtaaaatacacatgacataaaatttaccttttaagcatttttaagtgtacaacttagtgccatcragtacattcatgatgttgtacaaccatcaccagtatccctttccaaaacttttcaatcatcccagtcagaaactgtactgatggaacaatgactcctgtttagccccttccctcaggccctggtaacctctgttctacttcccatctctaagaatttgtctattctaggtacctcatataagtgaaatcatataatatttgtactttgtgtacaaaaatacagtggcttttttcacttactatgggtttatccatattcaagcatttgtcagaatttcattcctttatagttgaataattttccattgcacgtaggtcatacattttgtttattcatctgttgattgacacttgagttgtttccactatttggttattgggaataatgcttctataaacatcagcatacagctgtttgtttggatcctagtactttcagatatttggggttatatactta

SEQ ID NO: 732518 - DNA, 609 bp, Homo sapiens
aataatgcaaaaaagcatttgacaaaatgcagcacactttcatgatacaaattctcaacaaggtaggaatagaaggaaatttaatataataaaggtcatatgtaagaagctcgtagcatactcagtggtgcaaactgaaaggttttcctctaagatcagaaacagggcaaggatgcccactcttgccatttctgtataacgtagtactagaattcctagccagagcagttaggcaagaaaaaggaataaaagtcttccaaatgggaaaggaaaaagtaaaattgtccttatttacagacgtgatctttcctaaagatcttatttttaaaaaacctgttaggactaataaattgagtaaagttgcaatatgcaaaattaacatacaaaaatgagttgtatttctayacactgacaacaaactgtctgaaaagcaaattaggaaaacatttccatttgcagtagtatcaaaacaaatagaacacttaggaataaacttaaggaggtaaaagacttgtatattgaaacccataaaacatttctatatatactgttttattttgatttttatttccttttctgttttccacagtggctatactgttttatatt

SEQ ID NO: 732519 - DNA, 608 bp, Homo sapiens
aactgtctgaaaagcaaattaggaaaacatttccatttgcagtagtatcaaaacaaatagaacacttaggaataaacttaaggaggtaaaagacttgtatattgaaacccataaaacatttctatatatactgttttattttgatttttatttccttttctgttttccacagtggctatactgttttatattcccaccagcaatacacaaggattccaatatcacaacatcttcactaatagttattttatttacttttttaaataatggccttccgaacagctgtgaaccaatatctcatcgtggttttgatttgcatttccctgataattactgatgttgagcatctttccatatacctgttaaccatttgtatgtcttctttggagaactgtctattcatgtcctttgcctgtttttcaatttttttttaatattgrgtttcttaatatattttggatattaaccccttatcagatatatggtttgcagatattttttctcatcctttaggttgcctttccactcttttttttccctttactttgcagaaaccttttagtttgttgtggtcccaatcgtaggttttacttttattgcctgtgctt

SEQ ID NO: 732520 - DNA, 529 bp, Homo sapiens
gcttaaaacacaaattatacagctgtacaaaaataatttttatatccttattctataagctttttctatttttgaaatttttattttttatttttttactttttaaacttttctgttaaaaatgaagacatggggagcgcaatagctgaagcctgtaatccagcactttgggaggccaaggtgggcagatcacttaaggtcaggagttygatagcaacctggccaacgtggtgaaaccccatctctactaaaactacaaaaattagctggatgtggtggcaggtgcctataatcccagctacttgggaggctggggcaggagaattacttgaacccgggaggtggaggctgcagtgagccgagatcaccccactgcactccagcctgggcgacagagcgagactccatctcaaaaaaaaaaaaaaatgaagacataaacactcatgtagtatcctaggcctacacaggatcaggagcattaatatccctgtcttctacctccatgtcttgaatcactggaaggtcttca

SEQ ID NO: 732521 - DNA, 637 bp, Homo sapiens
tttatgtgctttctgaaaggttatgggaaaaaaaaacccaaaaatacataggtaaaatgatttgtattttcaactttatttttttcttcctaacataaaaataggataagtacttataatagaaatataattattataaaatgtatagttttagtgagcatgaatgtttctcctttttgtatgttaagtaaatttttagtaaatttctcatggatttctagcattaaataatacatctaggttttcagagaacaaggactaattatttccawgaatgtaatataagaaaaaataatggggatatgagtagaggtaatttatttaaaaaatgggatttttgggtgtcataggggagtaaatatttttccttgtaggaaattactttggtttctgctgtaacatttcttagtctttgcaaagtgacttattataaatcataaaagtattttctgtagattttgggataggtggtttcatgaaaagtagaagaaaaatagtttcatgtgtattaatgtcgtaagttttaatatttattatacagcagcttttgaaatgagtttattgccaaaacttttggataaagtaattgaaaaaaaagtagtccatatattagaacttttcttatgctgacagatca

SEQ ID NO: 732522 - DNA, 548 bp, Homo sapiens
tcctggagactattttatggtatttgagaagaatgtgtattctgttgctcttgaatgggatattctgtacaggaataccttattttattgtgctttgctttatcgcactttgcaaatattctgggttttttttttttcataaattaaaggtttgtggcaaccctgtgtcaagcaagtctattgtcaccatttttccaatactatgtactcacttcatgtctctgtgtcascatttttttagcaataaagtattttaaaattaaggtatgtatttttttagacataatgccacttgtacacataatagactgcagtatagtataaacattaaccgtttatatatgatgggtaacaaaaatgtatgactcactttattgtgatatttgctttattgtggtggtctgaaactgaacctacaatatctccaaggtatgcctgtaaatgcctgttaggtccatttggtctaaatttattcaagtccaatgtttttaaatatattttctgtctggatgatttgttcattgttgaaagtggggtatcaatgtctc

SEQ ID NO: 732523 - DNA, 580 bp, Homo sapiens
atactgaaatgaatgggatccccaccccaaatcaaatacagtgaacatcaattcccaccaatgcctaatattataaagaataatcagcaggccagaaacggtggctcacgcctgtaatcccaacactttgggagttcgaggcaggtggatcccctgaggtcagcagttcgagaccagcctggccaacatggtgaaaccctatctctactaaaaatataaaaattagctgggtgggtggcacacgcctgtgatcctagctacttgggaggctgaggcaggagaattgcttgaacccgagaggtggaggttgctgtgagccaagattgcaccactgcattccagcctgggtaacagagcaagactccgtctcataaacaaacaaacaaacacacaccagtracaacacagttaatggttaaacactggatatgttgtcaatcaaatcataaatacggataaagttgcctgctttcccttttttgtttaacatagattaaggaaatccactcaaagaaataagaaatggatcagggctgagcgcagtggctcatgcctgtaatcccagcactttgggaagtgg

SEQ ID NO: 732524 - DNA, 488 bp, Homo sapiens
cttaagcccttttaaatctgaagactatgttttttctaatttcagagaaatgctgttctattatttttcagaatcctgtctcttgcctgtggatatgggatgttggaactttttgctgtagctcccatttttaacttttttcctgtggtttctatgtctttgtgctttactgggtactgagagaattcctcagttctctcttagctttcatttacttttcacttctgtgtgttcarctattgtttaccttcagtgattcagtttttagtttctttgattctttaataaattttttttttattttttgagacagagtctcactctgttgcccaggctgaagtacagtggcacaatcttggctcattgcaacctccacctcctgggtgcaagcaattctcatgcctcagcctcctgagtagctgggaccacagacatgtgccaccacgcctggctaatttttgtaattttagtacacacggggtttcgcc

SEQ ID NO: 732525 - DNA, 581 bp, Homo sapiens
ggtagctggcaccacaggtgcatgccactgtgcctggctgatttttgtattttttgtagagatagggtctcactatatccaggctggtctccaactcctggcctcaagcgatccttctgcctcagcctcccaaagtgctaggattataagcatgaaccactgagcccaccccagatatctttatgaggtggtgatttcattccttttgagtatacaaccagaagagggattgctgggtctatagtagttgtatttttaatttctttgggrccttccatactgttttctataatggctataacaatctacattcccaccaacaaaatactagggttcccttttctccataccctcgccaacatttgttgtcttttggagaatagccatccttacaggtgtgaggtgagatctcattgtagttttaatttgcatttccattgtgattagtgatattgagcaccatttcatatatctcttggccatttttatgttttctttggagaaatgtccgttcacttctcttaatatgatatatcccattgattgatttgtgtatgttaaaccagccttgcatgccaggg

SEQ ID NO: 732526 - DNA, 581 bp, Homo sapiens
ggtagctggcaccacaggtgcatgccactgtgcctggctgatttttgtattttttgtagagatagggtctcactatatccaggctggtctccaactcctggcctcaagcgatccttctgcctcagcctcccaaagtgctaggattataagcatgaaccactgagcccaccccagatatctttatgaggtggtgatttcattccttttgagtatacaaccagaagagggattgctgggtctatagtagttgtatttttaatttctttggggccttccatactgttttcyataatggctataacaatctacattcccaccaacaaaatactagggttcccttttctccataccctcgccaacatttgttgtcttttggagaatagccatccttacaggtgtgaggtgagatctcattgtagttttaatttgcatttccattgtgattagtgatattgagcaccatttcatatatctcttggccatttttatgttttctttggagaaatgtccgttcacttctcttaatatgatatatcccattgattgatttgtgtatgttaaaccagccttgcatgccaggg

SEQ ID NO: 732527 - DNA, 581 bp, Homo sapiens
ggtagctggcaccacaggtgcatgccactgtgcctggctgatttttgtattttttgtagagatagggtctcactatatccaggctggtctccaactcctggcctcaagcgatccttctgcctcagcctcccaaagtgctaggattataagcatgaaccactgagcccaccccagatatctttatgaggtggtgatttcattccttttgagtatacaaccagaagagggattgctgggtctatagtagttgtatttttaatttctttggggccttccatactgttttctataatggctataacaatctacattcccaccaacaaaatactagggttcccttttctccataccctcgccaacatttgttrtcttttggagaatagccatccttacaggtgtgaggtgagatctcattgtagttttaatttgcatttccattgtgattagtgatattgagcaccatttcatatatctcttggccatttttatgttttctttggagaaatgtccgttcacttctcttaatatgatatatcccattgattgatttgtgtatgttaaaccagccttgcatgccaggg

SEQ ID NO: 732528 - DNA, 634 bp, Homo sapiens
caggctagggatttatagggaaaatatacaagagagatccaaatcacttcaaaattatttccaagtgggttgatgctatttgatgtggttacttaagaatgtagacaaaagatacacttgcagtgctggccagaagatagccttagttattatgaatgttgcatctggctttgcaaagagcaaatgcctagacacattctcagggatgggatgggatttgttaaacaatctcttgcatccagtctctgaaacataaaagccgttgatattcttttagagcaggtaaaaaatgcttggacttttcttagaaaagggagaacattcctmgaattagcatctaaaacatgtcaaaatttagcttgcaaaaatgagttcaaaatgaactactgttctacagcaatgttttccaattgaggtccacaaatccctgagagtctgtggctaaattctcaggggtccatgcattcctagaaaaattttttacttaaataataatctgaaacatttcatgattatttccttgaaaacttcaaatgaatgtatgttcatgtgattttagtgcttatatttatacatgtgaaagcacaagagtcttctcaaagtaagtgagattttttttccttttaaaaacacc

SEQ ID NO: 732529 - DNA, 624 bp, Homo sapiens
gatgggggcggctgttatacaggcttcatctgagtgttctgtggctcccacatccagcctggtatgaaattttggcaacgttaacaaaacaacaacaaacaatctatgtcttagagatactgaagaatatacaggtgggacagctgatgagaaatgctggattccatgctaaggagtttggtttgtattttgcaggcaaagggcatctattgaaggattctaagtagaaatagttacaagatcagatttgtaattttgaaaggtcattgggttttgtcccagtggcgtccttaatagcaaaagaaagtcytgaatcgcgggtcgtgctctgttgtcacttctccctttaatctgaaatgcttcctcagtgttttcgtcgtccttcatgaacttgacatttttaagggtctggctggttattttgaagaatgttcctcgatttgggttggtctgaggtttcttcacgatcagattccgcttatgccttctgacacaaataccgagaaataatgcggtgtccttccccacacatcatatcggatgacagcttccattcattgtggcatttagatcactcagttaagttggtgacttgtcaaatacctttattgcaaagtaattatt

SEQ ID NO: 732530 - DNA, 599 bp, Homo sapiens
cagtgagccaagattgtggcctgctgcactccagcctgggagacagaatgagaccctatcaagaaaaaaaaaaaaagaggagtggagagagatcattctctctgccatgtgaagacacagtaagaagctgatcatctgcaacccagaaagagagcccttgccagraaccaaattggttagcatcttgaccttagactccctaacttccaaaactgagaaacataaatgtctgttgttgaagccaccagtctatattttgttgtagcagcctgagaagactaatacagacaataactgctctactcagccaaacaccacagcaaacgctttggcccccacccatgccaacaaaggctgagtggggagcctacgattccacccttatgaggctataatgcggcacctcacccaccagggttgtgtcagagaaggccaagtagagagtcaataataagtccactctccacctggcccccatggtatcagtggagaccatgtgggaagcctacacttgcacccccaaaaggcagtaatgaagtgctcctcttcattcctgctcagtggtatcagagtaggactagcggagagtctagactttt

SEQ ID NO: 732531 - DNA, 637 bp, Homo sapiens
caccactagaagcctgaaaggaaggcaaggttttatcagggtaggaactgagctctggagaaagaacaggacaactggccatggctgaaaagggggcacagggtcagcaagttgaagacagatccttatgataatgaaccagggtggaaacaggaaaagagggtttgatgctttctttggggcaaacgattctctccctattcctgcaacaatagcgcaggttcctagatcagtcatttggtccattagcagctaatgctggttgtgggtatcacaccagtagatggccatcaccttcataaagctcctgcacaatgctcagctcrtgagtgctccaaggaaaacatttctgtggtgactgtgtttgggatttttgcaaactacaggtccttcttggggattcacagtgtacattagctctgaatgtgtacagcgtgcattttaaacactctgccaactcctgaggtatagaaatctgtttcattgtttttaatttaatgtttctcaaatgtagttgacacccgggtccaacaggatccttttgctatataacaaccctgaacattctgtggacacaccttgagaaacattgttctagaacattcctaatctggtgttcccaggcccttcacagcct

SEQ ID NO: 732532 - DNA, 637 bp, Homo sapiens
acctatctgccatcagatacagttgattaattcctcctcctcgaagcacgaccttcatctgtccttcaggatacatccctcccagacactcactctccagccccttccctgactcctcctcatcgaaggcttccagggctcagttccttgacgttttctctcytctgtacttgttccttggggagtccatctgatctcatggtttacataccacacacatgtctacaccgacacatcccaaacatacatctccaccgagacccagcccctgagctccaaaccccagttggctggttgacttctccaccagaagagctaatagacatcactcatttaacttctggaactgaacttctgactccacccaaaggccactccccgtcagtcttcctaattctcgtaatgactgtgccattcttcattgctctgagcaaacctcttaggatcttttttagctctttgcttcttcccaccttctcccaacccaatcatcttggctctaccttcaaaatacatccagaatccacatccactgatagatgaatggataaacagaatgtggcttagtcacacaatggaatattgttcagcctttaaaaggaaggcaattctgccacatgctgccacatggatgggc

SEQ ID NO: 732533 - DNA, 612 bp, Homo sapiens
cttatcagcctctaccaggcaaggcaaggtggtgagaaggtggcatcctggcctgggagggtttatatctggcctgtaccacccactgccccaggaccttaaccaagttccctgctggctcttgctcagtcttctccatgggtaagacagataatgagagcactgtcaggagggtttgtggttgttgcagaaaaaggaaactttacagatgagaagcccaaggctcagagaggttgagccactgcccacagctacccacttaataagtggcagtgctgagatttgaacccaggcctcttggaagtcaagcctgtaggctccttctrttcagtgtagctcaagaaaaaggcggagttgattagaggccttaggtgtgtcctggaactcaaggatgggcctcacagtctgatttcatgagaacccggaatctggagttaaagagaggcaggacccacagctcttgcagcctctctaacaccagggccagcagacctagtttcctctgcaggcctcaggccataagagccccaggcagcctgatggaccttaaaaatagacgagcacttcctaaaaggaagcgtctgatggggctggctacgttgggtgttcacc

SEQ ID NO: 732534 - DNA, 567 bp, Homo sapiens
atttttaaaatgcattttcttccttcatttcacaaatagttcttaaacaattagtatgaatcagaatctgtgacagatgctgaatctacaacaggaaataaaagagtccctgcttttatggaatgtatattctagcagagggagacagacaatatataagtacatataatgcaatgtcatggtgataaagctgtgatcaaaaatagggcaagtaagacaatgaagagcaatgagaaggggcaggagttattattttagctagggtggtctgagayggctttaactataaggagtttatattagcccttactctgaaatcaaacaattgttttaataaccaattacagtcatgcaccacaagtcagtgatggaccacatacatgaagggggtcccatgagattataacaccatattgttactgtatcttttccatgtttagatatatttaagtacaaaacaccactgcgctacaattgcctacagtattcagtacagtaacatgctgcacagtttgtagcctaggagcactataccacatggcctaggtgtacagtaggctataccat

SEQ ID NO: 732535 - DNA, 707 bp, Homo sapiens
aattatggagacatgtcaaaagaagacagaagtcagcttgaaggggttcctgttggccaaatcttgaactatttaaggagtaaaatagttaatgacaaatttaaccctttgagtaaaataagagtccatgagtccatgctgatagaaacagagaagggaactctatagtagaatgcgactaataaatgaagaagaaaagatagaattagaaaaccaccatttggcaaccaccatcttaataattgattcaggccagaatcatcaataaatgctaaaattggtgggtaaaagtttgatgaggaacaggatatttacatagtctcaaagcatatctctaaaaatgttcattaatacatcattaattattaataagtacagcatacttattaacatgcagctgtaatacttgggagrtatcatcttaatcgactggtaaaattttacataaatgaaaaccagtgatgggacaaatcagccttgtgcagcatcctgatatgatatgctgagaatgtagtgtcacttcttatgcataaatatgtaagttaggataaaacatcagacaaatgcaaattgaaagaaaaatcaaataactggcctgtattctttaaaaatgtcaagactatgatagtaaagatggtttcagattgaaggatgctaaagagatgagacaactaaatgcagcatgtgatcttgaatgggatccaaaa

SEQ ID NO: 732536 - DNA, 630 bp, Homo sapiens
ccggtctcccttgcctgtagtttgggatcccctcccaacccaattatcctctccccagtgcctgagtgagctttcggagtgcagctctgaacacagcactcctttgcttaaaagtcttcaatagctccttcttgaatagagactggagtcccatcttaatctctctctctctttcccccctctctctcctttctctcctctgtctctctctytccctctctctatgtccttatttctctctctctctccctctctgtctctccctctttttctctccccacaccctctgtccttatttctctctctctctctctctctgtgcaggtgtatgtgtttctgtctctgtctgtctctcacacatacacacatagagcaaactgtatattacacctctactaaattgcatccagttttctgaacatagcaaatactttcataactctgttgcccgaagagagggtcccgatacagaccccaagagcaggttcttggatctcatgcagaaaagaattcaaggcaagtcacagagcacagtaaaagaattgagtttattggaaactactctattacagagtagggcgtcctcagaaaacagaaggaggaacacgccatcctttcttagtgactcta

SEQ ID NO: 732537 - DNA, 630 bp, Homo sapiens
ccggtctcccttgcctgtagtttgggatcccctcccaacccaattatcctctccccagtgcctgagtgagctttcggagtgcagctctgaacacagcactcctttgcttaaaagtcttcaatagctccttcttgaatagagactggagtcccatcttaatctctctctctctttcccccctctctctcctttctctcctctgtctctctctttcyctctctctatgtccttatttctctctctctctccctctctgtctctccctctttttctctccccacaccctctgtccttatttctctctctctctctctctctgtgcaggtgtatgtgtttctgtctctgtctgtctctcacacatacacacatagagcaaactgtatattacacctctactaaattgcatccagttttctgaacatagcaaatactttcataactctgttgcccgaagagagggtcccgatacagaccccaagagcaggttcttggatctcatgcagaaaagaattcaaggcaagtcacagagcacagtaaaagaattgagtttattggaaactactctattacagagtagggcgtcctcagaaaacagaaggaggaacacgccatcctttcttagtgactcta

SEQ ID NO: 732538 - DNA, 638 bp, Homo sapiens
cttgtcacaggaaaggggatccaaagcaaaccccaagagaaagttcttggttctcacgcaagaaagaattcagggcgagtccttagtgcaaagcaaaggcaagtttattaagaaagtaaagtggtgaaaggacagctgctccatagacagagtagggtgttcccgaaagtaagaggaggcacgyatccaccctcggtgcaatccttgtatatatggggacatgtgctctgctacaagggtttgtgataaagaattacttttcttaattactatactttgcaagaattgatattactatctttaaagcaaaattaggaatgtctttgttctccagatattgggatatctggatgctcccaagtctgggtcagtttagtaaccactattaatttgttcctttaatcgtaaacatcgagaggcgaggaatgcctgactttctgagaaggcagcccagcaagtctcagcctcattttcctagccctcactcaaaatggagtcgctctggtttgaacgcctctgacaatcggagggacaaaacagatgcctctatatcaactaagatgaatcctaaaattaaagaaacaaaattacctatgggtcaaaggtccaggacctggctcacatgaaaaatttctaaa

SEQ ID NO: 732539 - DNA, 546 bp, Homo sapiens
tccaaagcaaaccccaagagaaagttcttggttctcacgcaagaaagaattcagggcgagtccttagtgcaaagcaaaggcaagtttattaagaaagtaaagtggtgaaaggacagctgctccatagacagagtagggtgttcccgaaagtaagaggaggcacgcatccaccctcggtgcaatccttgtatatatggggacatgtgctctgctacaagggtttgtgataaagaattacttttcttaattactatactttgcaagaattgatattactatctttaaagcaaaattaggaatgtctttgttctccagatattgggatatctggatgctcccaagtctgggtcagtttagtaaccactattaatttgttcctttaatcrtaaacatcgagaggcgaggaatgcctgactttctgagaaggcagcccagcaagtctcagcctcattttcctagccctcactcaaaatggagtcgctctggtttgaacgcctctgacaatcggagggacaaaacagatgcctctatatcaactaagatgaa

SEQ ID NO: 732540 - DNA, 625 bp, Homo sapiens
tccattcaacagcacctagcacttcattgtaaggtcatccagtaatgtcttttgcctagttccaagttctgcataatttttcttaacgaaccacatattttaaaagtgctttgcagaaagcaggggctcaaacaggtatgcatataccaatgttcatagcagcactattcatgattgccaaaagggggaagcaacctaaatgcccacatcaacacatgaatggataaaccaaatgcgatatacacatatacacatacaatggaatattattcagccataaaaagaaatgmaattctgacatacactacagcacggataaaactttaggacattgtgctaagtgaaataagccggacacaaaaggacagatattacatgattccacacatataagttagctagaataggtgaattcatagagacagaaaatagaagagtggttaccagaagctgagaggggaaattaacagagttaaggaatacagaatttcagtctgggatggcgtaaaagttctggggatatatggtggagatggttgtggaacaatgtagatgtacttaatgccactgaattgcacacttaaatggtttaaaatggtaagttttatgttatgcatattttata

SEQ ID NO: 732541 - DNA, 563 bp, Homo sapiens
gtcacactgatgtaagaggtgggctcccacagtcttgggctgctccacccctgtggctttgcagggtacaccctccctcccggctgctgtcacaggctggcattgagtgtctatggcttttccaggtgcatggtgcaagctgttggtggatctaccattctggggtctggaggacagtggaccttttctcacagctccactaggcaacaccccagtggggactctgtgtgggggctccaaccccacatttcccttccacacagccctagcagaggttgtccatgagggccctgcccttgcagcaaacttgttcctggacatccaggcatttccatacatcctctgaaatcaagacagaggttcccaaacctcaattcttgacttctgtgcactcacagyctcaatatcacatggaagcagccaaggcttggggcttacaccccctgaagccacagtctcagctctgtgttggccccttttagccacagttggagtggctgaggcaaggggcaccaagttcctagactgcacaacagcagagggatcctaggcctggcccacaa

SEQ ID NO: 732542 - DNA, 673 bp, Homo sapiens
tttggatccactgctggtgagcaagagtgatttttggggggtgttaaagagccttgttttgtcatattaccagagttggttttctggttccttcttatttgggtaggctctgtcagagagaaggtttagggctgagggctgttgttcagattcttttgtcccatggggtgttgccttgatgtagtactcttcctcttttcctatgcatgtggcttcctgtgagccaagctgcagtgattgttatctctcttctgggtctagccacttagcaagtctacccggctctgggctggtactggggattgtctgcacatagtcctgtgatgtgaatcatctatgggtctctcagtgtggataccrgtacctgttcccatggaggtggcagggggtgaaatggactctacgaggttgtcagctttggtggtttaatgttctatttttgtgctggttggcctactgccaggaggtggtgctttccagaaagcatcagctgtggtagtattgagagaaaatggcagtgggcggggccttaaaactcccaagagtatatgccctttgtcttcagctaccagggtgcataggaaaggcccatcaggtcggggcagggctaagcatgtctgagatcagactctccttgggcaggtcttgctgtggctgctgtggggtatggggg

SEQ ID NO: 732543 - DNA, 673 bp, Homo sapiens
tttggatccactgctggtgagcaagagtgatttttggggggtgttaaagagccttgttttgtcatattaccagagttggttttctggttccttcttatttgggtaggctctgtcagagagaaggtttagggctgagggctgttgttcagattcttttgtcccatggggtgttgccttgatgtagtactcttcctcttttcctatgcatgtggcttcctgtgagccaagctgcagtgattgttatctctcttctgggtctagccacttagcaagtctacccggctctgggctggtactggggattgtctgcacatagtcctgtgatgtgaatcatctatgggtctctcagtgtggataccagtacctgttcccatggaggtggcaggggstgaaatggactctacgaggttgtcagctttggtggtttaatgttctatttttgtgctggttggcctactgccaggaggtggtgctttccagaaagcatcagctgtggtagtattgagagaaaatggcagtgggcggggccttaaaactcccaagagtatatgccctttgtcttcagctaccagggtgcataggaaaggcccatcaggtcggggcagggctaagcatgtctgagatcagactctccttgggcaggtcttgctgtggctgctgtggggtatggggg

SEQ ID NO: 732544 - DNA, 602 bp, Homo sapiens
ctcacaggaaaacataaggtagaagctatacagcactggctttggcaatgttttcttagatatgacattaaaggcatatataacaaaattaaaaaacagataaattggacttcatgaaaattttaaaattttgtgcatcaaaagacactatcaacagactaaaaaaggcaacacacagaatgggagaaaatattttcaaatcatattcatatatctgacaagggattaacatcacagctatataaagaactgtaactcaacaacaaaacaaacaacttgattcaaaaatgggcaaagatcttggataaacatttctccaaaaaagatattaaaatggccaataagcacataaaaaaatgttcgacatcactaagcattagagaaatacaaatyaaaattacgaggtgccacctcatacccattacaatggcaactatcaaaaaaccagaaaatacgtattggcaaggatgtgaagaaactggaatctttgtgcactgttggtaggaatgtaaaatggtacagccactgtgaagaaaagattatggcagttcatcaaaattttttaatagaactaccagatgatccaatgattctacttctgg

SEQ ID NO: 732545 - DNA, 577 bp, Homo sapiens
gtgtaaactttgatgagttttgacaaacgtatccacctgtgtgcctaccaccacaatcaaaatatagaactttctatcaccccaaaaaattcccttgtgctgtgtctgaaaatcaccatctctgccaccaccagctttggaccaggaggccgctggtgtgctgtctggcaccaaagagccctgtrtcttgtccagagtctcatacacacagagccacccagcgtgcaggcttctgcgtctggcttcctaggctcagcggatgtttctgggatttattcatgccattgcgtgtatcgagggtttgttcctttttactgctgagtggcattcagttgtatggatgaactacgatgtagttatcattcgaccattggtggatgcctggactgcgtccaggctggggttgtgatgaataaagctgctataacatgtgcaaagctgggggtctatgtttttacttctgttaggtaaacaccaagagtggaattgtcagttaacatggtaagcgtatcttgactttataaaaaactaaagtaactgtaccatttcacacaccccccagcagtgagtgagagtc

SEQ ID NO: 732546 - DNA, 604 bp, Homo sapiens
gcaggtttggaaaggatgtatggacaaaggaaagctacatagagaaaacggaagtgaggcacagaaacagccagattggttacagctggtgtctggcttattcaaacacagtttgaacaggtggaccctgtgtgtgattgaagtatggttgtcgtaatgggatgagacttggctacttgttacaagagtaggctatastctgtttacacatccagttaggttacagttcactatgtatggaaaaacctttaggccaaacttaaaacacataagacagcatctttaggctaaacttaattcaacatttctgtttcgtttctggcataactattatatatagaatgtaaatagttctaatatattttaagtgtttctttatgtatgacatattatgagtgaactttagttaaaactgaaatgaacatggtaatgagaaaaatttacacacaagtgattttgaaaacagaatggattgcttacaaattacaggaaatgttataacacaaaccagaagaattcaatggaaggcaataagggattctgaaatgaaaattataaaagtatcaagaccaatgaaggttatttgaatatcaaagctattatg

SEQ ID NO: 732547 - DNA, 604 bp, Homo sapiens
gcaggtttggaaaggatgtatggacaaaggaaagctacatagagaaaacggaagtgaggcacagaaacagccagattggttacagctggtgtctggcttattcaaacacagtttgaacaggtggaccctgtgtgtgattgaagtatggttgtcgtaatgggatgagacttggctacttgttacaagagtaggctatactctgtttacacatccagttaggttacagttcactatgtatggaaaaacctttaggccaaacttaaaacacataagacagcatctttaggctaaacttaattcaacatttctgtttcrtttctggcataactattatatatagaatgtaaatagttctaatatattttaagtgtttctttatgtatgacatattatgagtgaactttagttaaaactgaaatgaacatggtaatgagaaaaatttacacacaagtgattttgaaaacagaatggattgcttacaaattacaggaaatgttataacacaaaccagaagaattcaatggaaggcaataagggattctgaaatgaaaattataaaagtatcaagaccaatgaaggttatttgaatatcaaagctattatg

SEQ ID NO: 732548 - DNA, 624 bp, Homo sapiens
atttctcataaaaactctgaacaaattaggcataaaggggaacaacttctacttgataatagatatctacaaaaacgtagtttttgtagttaatatcatagcaaacagtgtgaaactggatgctttccccctaagagagagaacaagacaagggtgtctggtctcaccactcctattcaacattgtcatgaaagtactagcttatgcaattagaaaaggaaatcaatttatacaggctggggagaaagaattaaaactaccttagtatgcaaatgtcatgattacctatgtagaaaattccaaagaatcaacaaagaagttccrggaacaattaactaattatagtaatgttgtaggattcaaggttaatgtgcaaaagttgttttcctatataccagcaatgaacactcagaatttaaaattaaaaatataaaatcattcacattagcacaaaaattatcaaacacttagatataaggccgacaaaatatgtataagatctacatgagaaaagttgcaaaatgttaactacattaaatcaaagatgatttgaataaatgtaaagatatgatcatgaatagaaagactcaatattgttaaaacctgaattcttcccaaattaat

SEQ ID NO: 732549 - DNA, 614 bp, Homo sapiens
gggccaaaacttttatcagattatgatagaagtttataaatttaaaatagttaataatcactgctttatgacttgatttaaaacagtaacaacatctcataaattaagctaacattcaaatatctttaagatgactgaatttgcttattttcatcaagtgtcatctttttctatataaaggaatgatacactgtgattctgaggcaagttcataggagtggttaatctaaccctgctatcaatctttcacggtaccctcaaattgtttcycatcaccaatcaccatgcatctcatcaatataaagggtgactcctatgaggacagcagaataagggggagccaatctaccttccctctctcctaagatgagcagaaaagctttcacagggaaaactattctcctatgcctgacatctctcacatggaccgatctggaaagaagagaacagagtgtaagtagtgtgcctgttcctacagaagaaccacaaccagctgttccttacggggcccagtcagataaaaagcaagttagtgcagctctcacaagaatatcttctattgctaatcacatattactgcccaatgctgcaactgctctgcgtaacaacttccc

SEQ ID NO: 732550 - DNA, 614 bp, Homo sapiens
gggccaaaacttttatcagattatgatagaagtttataaatttaaaatagttaataatcactgctttatgacttgatttaaaacagtaacaacatctcataaattaagctaacattcaaatatctttaagatgactgaatttgcttattttcatcaagtgtcatctttttctatataaaggaatgatacactgtgattctgaggcaagttcataggagtggttaatctaaccctgctatcaatctttcacggtaccctcaaattgtttctcatcaccaatcaycatgcatctcatcaatataaagggtgactcctatgaggacagcagaataagggggagccaatctaccttccctctctcctaagatgagcagaaaagctttcacagggaaaactattctcctatgcctgacatctctcacatggaccgatctggaaagaagagaacagagtgtaagtagtgtgcctgttcctacagaagaaccacaaccagctgttccttacggggcccagtcagataaaaagcaagttagtgcagctctcacaagaatatcttctattgctaatcacatattactgcccaatgctgcaactgctctgcgtaacaacttccc

SEQ ID NO: 732551 - DNA, 590 bp, Homo sapiens
tgatctgaggtggaacagtttcatcccaaaaccttcccaccgcaccaccttcctgtgcagggaaaaattatcttccacaaaaccagtccctagtgtcaaaaatgctggggaccagtgatctcagccatcaaatttgtgggcatgcagagttgtttctagtatttttgcatatttctttttatgtccatagcatcagtagctatgaccctgttttcatttctgatattgtcaatttgtagtacatttatttttttcttggttaccttaactagagatttatcaattaattttattgattttttaaagaacagcatttcatttctttgattttctcaattgttttcctgttttagatgttatcaatttctgctctaatttttttatgcttttcttctrtaacttcaaataatcaactttggatctttcttcttctcttatatattcagtaatactattaatttctgtctaagcactgctttcattgcatcctacaaattttgataaattgcattttcatttttctttaattcaaaatatttatatttctcttgagcctacttatttagatcatgcgatatttagaattgtgt

SEQ ID NO: 732552 - DNA, 466 bp, Homo sapiens
cagatgcgttctcagttcctcagtgagacctgcacactttagcacagacagctctactgactcgaatgcactaattcctcaggaatttgtgtcaaagtatgatattgatggtcaatatacacaccatcacacctatacaaaatataggtcaaatgtgactcttcaaatttagagcctgtttctctgaaggcaattttccactccacacattgaagcactaaaatatttcaatgcagaaacataaaagttgctctctctctctctctctctctmtatatatatatatatatataatttattatagtttgatatataaatatataaagaaaaataaatgagttattacagtttgaaaaaagtcactgaggctctttttattgacatgggtggaactggctagactcagtctccttaatgattcttcagttacattctacagcttcattagtagaaccttatgaattta

SEQ ID NO: 732553 - DNA, 507 bp, Homo sapiens
agcttaagccacaaatatatattgttcacagttctggaggctgcaaagtccaaaatcaagatggcaggagatcgggtgtctggtcagggtccacactctggtgtgcagatagccacctcctcattgtatcctcatagagcagagagcagagaggaaataagcaaagtccctcatgtctcttcttataaggccactaatcctgttagaagggctctaccctcatgacctaatcaccccccaaaggccccacttactaatatatcccattgcagattasagtttcaacatatgaattttggggtgacacactgagttcacagcagttagcttgcatttgaaaagcgtgttcatgtgtgagctgcttagtgtctctagggattggctagcccttagtgtctctaggaattggctagcttccagagtcctcaaagccccagatgtcaaagcatccaaatacagacaataaaagatatggttaatgcacaaagttaatggcttaccctcaac

SEQ ID NO: 732554 - DNA, 532 bp, Homo sapiens
catccaaatacagacaataaaagatatggttaatgcacaaagttaatggcttaccctcaacacctgcatgggtgtctgatgggatgggtgcactgggggcctcatattaggtggcaaaggaggtcccaggtttcccatagggatgaaaccctgcagaatgtgctgataacggaagtaaggccagtctgtccatttaagacatccccaagaaggtttctagatgaaaaatgcctgccattcactgccaacatttttcatttcccaattcttgctctctgaaacacacgaaaggtgttcccattaaaatagtatgttgtgtgaattctggaaaactgaaccaaggaacagacccttattctctctcccaaatccctctcaagagaattytaatttaaaaaatgaacttaagagttggctggacctgcctcttctcctcaaggatccctggcacttttgcaggctaaagttcttgagaagacttgtaagccagggaaagggctaccttcactgttattcaacggtctggaaaaaa

SEQ ID NO: 732555 - DNA, 581 bp, Homo sapiens
tggatgagactggagaccattattctaagtgaagtaactcaggaatggaaaacaaaacaccatatgttctcactgatatatgggagctaagctatgaggaaacaaaggcataagaatgatacaatggattttggggacttgaggggaagggtgggagggaccaagagattaaagactacaaatgtgatgcagtgtacgctgctcaggtaatggctgcaccaaaatctcacaaatcaccactaaagaacttacttatgtaaccaaacaccacctgtaccccrataacctatggaaattttttaaaattttaatttaatttaattttaaaaaagaaatggcaaataagcatatgaaaaaatgctcctcagcaccagtcattacgaaatgtaaatcaaaatcatgatgagataccagttcacactatccttttagctatctttttttaattttaggatagctaaaataaaaaagatgaagtgtttgtgaagacctgaagaaaatggaagtctcatacattgctagtttggtgtaaaatggtacaaccactctggaaaatagtttgacaactcctcaaaatctta

SEQ ID NO: 732556 - DNA, 581 bp, Homo sapiens
tggatgagactggagaccattattctaagtgaagtaactcaggaatggaaaacaaaacaccatatgttctcactgatatatgggagctaagctatgaggaaacaaaggcataagaatgatacaatggattttggggacttgaggggaagggtgggagggaccaagagattaaagactacaaatgtgatgcagtgtacgctgctcaggtaatggctgcaccaaaatctcacaaatcaccactaaagaacttacttatgtaaccaaacaccacctgtaccccaataacctatggaaattttttaaaattttaatttaatttaattttaaaaaagaaatggcaaataagcatatgaaaaaatgctcctcagcaccagtcattacgaaatgyaaatcaaaatcatgatgagataccagttcacactatccttttagctatctttttttaattttaggatagctaaaataaaaaagatgaagtgtttgtgaagacctgaagaaaatggaagtctcatacattgctagtttggtgtaaaatggtacaaccactctggaaaatagtttgacaactcctcaaaatctta

SEQ ID NO: 732557 - DNA, 624 bp, Homo sapiens
gcctgggttctgatggcaattgctcctgaaaacagttcctttactctccttgggacctgagtttccataacgtcagagctatggtttgaatgttccctccagaatgcatgttgaaacgtgatccccaacatgccagtgttgagagataggtcctttaagaagtgattggattatgaaggctctgcccccataaatggatagattaatgggttatcatgagagtggggctagtggctttataataagagaaagagagacctgacctagcacatgagcacactcagcccccttgccatgggatgccctgcacggcctcaggactcagcagagtccccactagcaggaaggctctcaccagacacagccgtcttgaccctggacttctcagcttccataactgtaagaaataaatttctttgccttataaattacccagtttcaggtattctgttgtaaacaacagaaaatggactgaaacattyagtttccaccaacataaactgaaagtctgtccaagtctctggcagggaatgcctatggctgtttcttagaaaagctacttaactaccacaatccagtttcttatttgtagaaccgagagattccactaaaggatctccaccc

SEQ ID NO: 732558 - DNA, 563 bp, Homo sapiens
ttctctgtctagatttcaaagacatatggaaatgcttggatgtccaggcagaagcctgctgcaggggcagagccctcatggagaacctcttctagggcagtgcataggggaaatgtgggcttgaagcccccatacagaatccccactgggcactgcctagtggagytgtgagaagagggccaccatcctccagatgccaagatgttagatacactgacggcttgcaccatgtgcctgaaaaagccacaggcactcaacgccagcccatgaaagcagccatgggagctataccctacacagccacaggggcatagctgcccaagaccttggaagcccacccattgcatcagtgtgacctggatgtgagacatagagtcgaaggagattattttggagctttgatatttaatgactgcccccatgagtttcggacttgcatggggcctgtagtccctatgatttggccagtttctcccttttggaacaggagcatttacccaatgcctgtgctcacattgtatctttgaagtaactaaatttttcttgattttacaggttcatag

SEQ ID NO: 732559 - DNA, 613 bp, Homo sapiens
tccctgttgtaggctttcatgtgaatggaatcatatagaacatggtcttttgtgactggtttctttcacttggcataatgtttccaaggttcatccatattgtggcgtatacaggcacttcattcctttttatggacaaataatatttaattgtatgaaaatagcatattttgtgtatgcatttgtccactgatggatatttgagtggtttccaccttttggctattatgaagaatgctgctataaacrttcacacacaagtttctgtgtgcctatgttgtcatttatctagagtatatatctagaagaggaattgctaggtcatatggtaactctgcatttaaaatcatttgagaaacttccagattgttttccaaaataattgtaccattttatatttccacgagcagcatacaagtgctacaatctctccaaatctttgttaacatttattgttatacgacttttttattccagccatcctagtgggtatgaaattgtatgtcattgtagttttgatttgcctttccctgatgactaatgatgtccagcatctttttgtgtacttattttgttaactcctttttacatatagctaataagttgcggggct

SEQ ID NO: 732560 - DNA, 578 bp, Homo sapiens
tctaacagcctaagctcatatgtgtgagcaaggaaaagacctaaaactgaaacttatatttaaaagagaagcagaacataaaagattggaaaatttgcagcctagcaatgtggtagaaaagaaaagcccattttcaggggaacaattaaatcaggctgcagaaatttgctttagtaaagaggagccaaggattgatagacaaracaatagggaaaaggcctcaaaggcatttcagagacctttgcagcagcccctctcatcataggcccagaagcctaggaggataaaatggtttaatgggccaggcctaggtccctgctaccctgtgggtccctggaacactgctccctgtataccagccactccagctccagccatggctcaaaggggtccaagttcagctccagtcactaattcaaagggtgcaagcagtaaacattggcagatgccacatggtgttaggcctgcaggtgcacagaatgcaagggttgaggcttgggggcttccacctagattttagaggatgtatgtaaaagcctggatgtccaggcagaagcctgctgcaggggcagagctct

SEQ ID NO: 732561 - DNA, 578 bp, Homo sapiens
tctaacagcctaagctcatatgtgtgagcaaggaaaagacctaaaactgaaacttatatttaaaagagaagcagaacataaaagattggaaaatttgcagcctagcaatgtggtagaaaagaaaagcccattttcaggggaacaattaaatcaggctgcagaaatttgctttagtaaagaggagccaaggattgatagacaaaacaatagggaaaaggcctcaaaggcatttcagagacctttgcagcagcccctctcatcataggcccagaagcctaggaggataaaatggtttaatgggccaggcctaggtccctgctaccctgtgggtccctggaacactgctccctgtataccagccactccagctccagccatggctcaaaggggtccaagttyagctccagtcactaattcaaagggtgcaagcagtaaacattggcagatgccacatggtgttaggcctgcaggtgcacagaatgcaagggttgaggcttgggggcttccacctagattttagaggatgtatgtaaaagcctggatgtccaggcagaagcctgctgcaggggcagagctct

SEQ ID NO: 732562 - DNA, 504 bp, Homo sapiens
gaggtggggtctcactctgtcacccaggctggagtgcagtggtgtaatattggcttgcttcaacttccacctcccaggctcaagtgatcctcccacctcagcctactgtgtaggtgggaccacagccatgcaccaccatcgctgcctaatttttttttttgtatttttttggtagagastgggttttgccatgttgcccaggctgtgtcagtatgttttattttggccattctaataggtttgagtgatatctcatggtggttttaatttgcatttctctaatgattgaacaatgttgatcaactattcatgtgcttatttgccaccacgtcaaaaactgcaaatgttttttttgtagtagccatcctaatgggtacaaagagatatctcattgtggttttgatttgcatttccctgatttaatgatcttgaacactttttcacgtgattattggctgttggtatgtctttggagaattgtctattgcagtccttttcccattt

SEQ ID NO: 732563 - DNA, 600 bp, Homo sapiens
tgaggattccttcataactttagagatgaaacatgattttcctattgcttcttttttgtgattcttttctcatgggaaatactgtcttttctgctttgtagatattgaaatggattccaggcgtgtgcctcgagacaagctggcctgcatcaccaagtgcagcaagcacatcttcgatgccatcaagatcacctagaacgagctggcgtcagcagatgacttcctccccaccctcatctacattgttttgaagggcaacccccatgccttcagtctaatatccagtatatcacgygcttctgcaatccaagccgactgatgactggagaggatggctactatttcaccaatctggtgagtaagtgagttcttggcgttgtggagaaggactaggaaggtggtggttttggggatgtgataggtcactcaggcccatgacaggtgaatgcttctgtgtgagaaggcagcacggctgaggaagctcactttgcatcagggagcacaaggaccaggccgtacagacactccgcctccccgcacttgatcagagattgtgtttatcctacagaaacagatgacatgtgttgggcatcactcccc

SEQ ID NO: 732564 - DNA, 633 bp, Homo sapiens
tttttgtgggatattcaacatgaaaaagaagtcagatgctgccccaccctctgtctcagactggtccatgggctgtggccatccttgagtcaccatgagagatggccatattggagggagtggtggatgtgggtgacagtrcccaccctctgggcatctgtcccaaatcttcctgaggcatttatgtggccttctgtgtctctgccatgttttttgttttttgtttgctcttttttttttttttttttttttgagacagagcctggctttgttccccaggctggagtagagtagcatgatctcggctcattgcaacctccacttcctgggttcaactgattctcctgcctcagcctcctgagtggctgagattacaggcgcccactaccaaccccggctaatcttttttttttggattttagtagagacggggcttcaccatgttggccaggctggtctcgaactcctgacctcaggtgatccacccacctccctgcctcagcctcccaaagcgttgggattacaggcgtgagccaccgcgcccggcctgtctctgcctttgacctgagagcaaaccaggtcgcctccagatctgtatgttcagtgccaggcctgacccttgtaactggctct

SEQ ID NO: 732565 - DNA, 649 bp, Homo sapiens
ggagtgtgggggaaagggaccgacatttgccgaagtcctacgatgttctagattctcttgtaccctttcttcaaaggagaagactgagtcccagggaagggaactgactcgcccagggtcactcagctcagaggtggtgaggttggcctgggaacccctgtgatcatttccaaaccttgctgaccccatgggaccacagtttctagctcatcccatcccccagcaggacacactgcttgaagttaagaaaaattytaggccaggtgcagtggctcacgtctgtcatcccagtactttgggaagccaaggtgagaagatcgcttgagtacaggagtttgaaatcagcttgggcaacatagggagaccccacctctacaaaaaaaaaaaaattagcacggcatagtggtgtgcacctgtagtcccagctactagggaggctgaggtgagaggattgcttgagcctgggaggttgaggttgcagttagccgagattgcaccactacactccagtctgggtgacacagtgagattctagttaaaaaaaaaaacaagaattctgagaacaaggacttgcccagagccgaggcccagagccaggggcctgactctagacagtggaaccaagaagccggcactcgggacatacatg

SEQ ID NO: 732566 - DNA, 632 bp, Homo sapiens
tgaactcctgacctcaggggatcctcccgcttcagcctcccaaaatactgggatgttggcatgagccaccactgctggctttcttatttttaaaggtagatgcttacagctaaacatttccctctgaacgctgctttaacttcatcccataagttctggtatgttgtgttttcattttcattcatctcaaagtgttttctaatttcctgtatgatttcatctycaaccagtgatcaagagtgtgtttattttccatatatttgtgagttttcaagttttccttgttactgatttctagtttcattccatcgtgattagaaaatacttagtattttgcatactttcaaacttttaaaacattaatatttgttttgcagcctaatacactgtatactctggacaatatcccacacgctcttgaaaagaatgtgtattttgctgttgttgggttggtgtctgcatatgaccattagatctaattggattatcatgttgttcaagtgctctctttcctattgatctggtctctgtattattaacattgaggtagtgaggtctccaatgatcatcctgaaactctatttctccctttaattctatccttttttacttcatatgttttgatgctctgt

SEQ ID NO: 732567 - DNA, 522 bp, Homo sapiens
agaccagcctgggtaacatagcttaagtttaattttaattaaaaaatttattaaaattagccgagagtggtggcacatgcctgtagtcctagctactcaggatgctgaggcaggggatctcttgaggccaggagttcaaggatgyagtgggctataatgacactactacactgcagcctgggaggcaaagtgaccctgtccctaaaaaataattttaaaacaataataataataataataaattaagcttaacttaccgcatatttttataacttttaaaatcttaaattttttgacttttgtaataacacagcttaaaacaagcacattatatagctgcagagaaatacttttctttaaacctttataagtcattttctattttaaaaaaatattttcttttttaaaaaatgttttaaatattttccttaaaaactaagacacaaacacacaaattagcctaggcctgcacagggtcaggatcatcaatatcactgtcttctacctccacatcttgtccca

SEQ ID NO: 732568 - DNA, 639 bp, Homo sapiens
cgtaaatacatgaggataaaaaaacatgatgtttgaaatgagggatatttggaatcaggaatgaaaattccaggaagccaagcactatgaatctcagtaaaaaagatgcccttctctagttaacacgtaattctcagtataatgtaacaagttcataggtcaagaaacttccattaacttctttaaattcatctatttaataacatgacaagcatttaattatggctaatttctccaccrcctttaagtataggataaagatgaacaagtctcctgaaagttctctcatcatagtttagctctctgaggtaaatgaacctcataatattccccgtatattcaccaacacctccccacaacatgatttccctccctgaccagagcccactgaaatactgacttagttgttgttctttgtgtatagtacaaatgaaattggtgaaaactaattaaggaattattcttctttgtcttgtatgaccaagtcagaaatattttttaaaaagctattaccagtctaaattccctttactctctgattcagggcttcattcattcagcacattgtgaagatctactatgaactaaattaccaatgtcttgaacagaactcaggaaggctggtgtctagtgaataag

SEQ ID NO: 732569 - DNA, 605 bp, Homo sapiens
aactctcaatacatgtaacacaacaccttggatggatatcaaaggcattgcactgagtgaaaaagccaacttcaaaaggttatattctatatgatttcacttatataatattctctaaatggcaaaattatggagatgaagaacagattagtggttgccaagggcccacaaaagtggagaggaaatggagaaaagggagccaaaagggatgcataagaatataaagggctagaatgaggaatctttgggataacaggaaagttctgcatcttgattatggtggtgtttgcatgaatctacaaatgtgacaaattccataggactatatatacatgtacactgaaatgaatccatataaaactagtgaaatctgaataaggtctgtggattgtaccaacatcwcttccctgcttttgatacagttctaaaattacacaagatgttatcactggagaaaactgggtaaaagaaacacaggacctttcagcattatttttgcaactatgactctatttcaaaataaaaagcttaaaaataaaagactgacaatattccaagtgttgtcaagaatgtgaaggaactcaaactcttatttgttactggtg

SEQ ID NO: 732570 - DNA, 548 bp, Homo sapiens
atgagctgcgatcttttcccttttcttcagaccttcagttgatgatgtatttgcacacgcacacacacacacacacacacacacacaggagtatatatattttttctatgcttcttaaagaaacaacaagtccttttaaaasacctttcaaatgcacagtataagaagcactgtgggggagaggaacagagactcccagagaaggagtttccttaatgcttactggaatttgctattttcttcttttcatggaaaatgtgtctgagagcaccagtacagctattatctgtatcctgtggcctttgtgggtatttccaggcagagagaggactgagtctagtgtgcagagcggcactcccaccccacgctgaggcagcgcatccctctgagagctcaggggcagcaagggcagtgagggcactgcatggcgagagggtaacctggatcacaccaatgtgggatgcttgttgccaggctccacacacagtggataaaaccagccttctctcgtgagtgaggcctagacctgcagggtgggaagaggcagg

SEQ ID NO: 732571 - DNA, 550 bp, Homo sapiens
tgccttctcccttgcctctctggatgacagactgggcccctgctgccctctactcctctctaggctgctctcccaggtgtggggaggctggcactcatgcctccttccctcctcacccctgtcccccccggctgcacctggatgctgcgataggcagtgccctgccgaggaatggagggccgcccaggcccacactcgggccacgcaggagttgcttctggcrtcaagtccacacatttcagtgcaaacgcaaagcctccaggatctgggccaagctgccactccagcttcatcttcattcactgctcgtctgcaccacccacgggagccacgcacctttcccaactgcaccgacatgggcgctgggtcccaggttctgcctcgagagcccctgcacccccgccctgcccctggccctggctccatctgacatgacatcaggaccccccctgagagaccatgtcttctgtcaggcctcccctccctggcgggatcactcccttcccaatgccaggctgcagtcagcattcgtgagcacccaaaatatgcc

SEQ ID NO: 732572 - DNA, 569 bp, Homo sapiens
aacggactgtactatactgacagtaaaacgaactaatctggcatccatacactgtgtctgtcaaactcagtgatgcacacaggtttaaacattgttttttatgtgttttaatttttcatagccttctaacgtgacctgtgagaygtctctgcagagttgatgccatgaggtagtgagctcacctaagaatgtcatcgtcatatagtcagcaagaataagatatagaagacgatgccttcgtggctttacacacctcaaaatgtggagctgtatcatttatgtgattcttttaagacataatcactcaattgaaagcttggagcagataatgcatcttagtagccagagcttcgcggctgccattgtatttccgctccttcgtgaaggggagcgaggcgtgctctgcagagcagcaggtgtgtgccatgtgagggctggagggcacagcccacgagagctgcttcgtggggctctcaccagttctgtggctccatgtccagaccagttctgtggctccgtgtccgtagcaaagctggatctggccacagctgtcgggaatgtctgaggga

SEQ ID NO: 732573 - DNA, 569 bp, Homo sapiens
aacggactgtactatactgacagtaaaacgaactaatctggcatccatacactgtgtctgtcaaactcagtgatgcacacaggtttaaacattgttttttatgtgttttaatttttcatagccttctaacgtgacctgtgagacgtctctgcagagttgatgccatgaggtagtgagctcacctaagaatgtcatcgtcatatagtcagcaagaataagatatagaagacgatgccttcgtggctttacacacctcaaaatgtggagctgtatcatttatgtgattcttttaagacataatcactcaattgaaagcttggagcagataatgcatcttagtagccagagcttcgcggctgccattgtatttccgctccttcgtgaaggggagmgaggcgtgctctgcagagcagcaggtgtgtgccatgtgagggctggagggcacagcccacgagagctgcttcgtggggctctcaccagttctgtggctccatgtccagaccagttctgtggctccgtgtccgtagcaaagctggatctggccacagctgtcgggaatgtctgaggga

SEQ ID NO: 732574 - DNA, 625 bp, Homo sapiens
accagtatattcactttgatgctttaagaatacaaaatacttccatcaccacaaggacctctcctgttgtcattttgtagcctcacatacttccacttgtattcctcctcaacccctagcaaccactaatttcttggcatcatgaaccagagaatttattmatcactaaatctgttctgccaggatctgccactcttcagccaaaactcctagttactcctgatgacttctaggcatctgccctccttgggcatcaagtttactgccagttgccttctgagtcacctgcagtcaccactggagatgtaattgagtcctcatgtgccaaacttatttggttttcaccttaaaattattttttaaaagactattattcccacattttccctctacacttggtttactaatttgcatgtgtagtttatagggccaagctggcaataagttactgttatactcctctctttatttcccgaatctcctattcatgttccagtttaaactcagctgggaacaccttgtctcattcagaacttaatcacagtctttagatatagtcttttttgttttctttatatgcttattattaacatgtagtatccagtatctaatccagtaacagtca

SEQ ID NO: 732575 - DNA, 499 bp, Homo sapiens
ggggaactctaaataagctttgtgcattagatagtagtaatagatgtaaaaaccctcattctaaggtttgtcatggttatataagagcatattcttgtttgtagaaattacagagtaaaatactggggatgatgaaaagtcagccagcagcttacttttaagtgattcagaaggaataaaatgtgcttcatagtattcttaaaatttttgctgtaagtttaaaattgtctgaaaaagagaaaaatgagaaagtaattaggaagatgaagtagtacttttgaaaacgtactaatattaaggagtaaattttaatttgaaattgaacctaaatagtagttstaattgtggtcacaacttgaaagtaaatgacagattaattttagagagttttaattctatataaaatttaaaagttgatcagtatgaaacttgagaattgtgatatttgaggctagtcaagaatcaatgaaactaatttaggcttagaaatatctttgag

SEQ ID NO: 732576 - DNA, 620 bp, Homo sapiens
tgaaaaaatgcaaggatttgattggtattaaacagcatttccctaaaatgtttcaaagaatattagcatatactacacacaagcaatgttccatagtcaaggaagtttatacaattctaatttagacaaaggtaaggccaggtgcagtggctaatgctgtaatcccagcactttcggaggccgaggcaggtggatcatttgaggtcaggagttcaagaccagcctggccaacatggtgaaaccccatctctactaaaaatatttaaaaacaattagccaggtgtggtggcacacacctgtagtcccaactacttggaagggtaacagaattgcttgagcccaggaggtggaggttgcagtgagccgagattgtgccactgcactccagcctgggtgasagagcgagaatctgtgtcaaaaaaaaaaaataaatcaacaaaggtaagcttctttactacagttcttctcaaccattactatgctaatatccaattatgaaatcccaaaaggggagctatataatatagtacagggtatcacctgcttgccaaatcaattcagatactttttagatgaatcccttaatatgtaaaatacagaaatcaaataagatttagata

SEQ ID NO: 732577 - DNA, 657 bp, Homo sapiens
agaaatcccccaactgaggcagaaaaaggccaagttatttgtgtgatgcacgtgaaccgcccgagctggtcactaatgaagtggattcgccctattcctggcgactctacaaggttggagacccccgtagacttcgcagccatcgccccttgctgcagacccccaaagtcaccgacagccttacctagacctgaccttcctcacccacgcgccctcgtcccggaaggcccgccctctacccggctccaagctcgcgcaggcaactattacggggagcagtagagaaacggaagcttggcagctagagcggagccctagtgaacgacccggagttactggctccccctcctgaggcctccgaggtgtacctggcgcctgcgcagtaaggctagcgccgccgcctgtgcggaggacccggggaggtggtgggctggggagagttagraaggtctggctctcctggaagggcatgcacggttcggtagtatgttttggtgggaatggctacagacctgcctccaaaagctctgaagcaatggcgatgcgtgtgccgtgtggtctttctgaccgacttgcggcgccatccccctccccttccatctatctgctcatcttctaatagttaattaggatccctagctgcaagccttccttgct

SEQ ID NO: 732578 - DNA, 595 bp, Homo sapiens
gcgcgggactggcaggcagctccacctgcggccccggtgcgggatccactgggtgaagctagctgggctcctgagtctggtggggacttggagaacctttatgtctaagggattgtaaatacaccaatgggcactctgtatctagctcaaggtttgtaaacacaccaatcagcaccctgtgtctagctcagggtttgtgaatgcaccaatggatactctgtatctagctactctggtggggacttggagaacctttacctctagctaagggattgtaaatacacctatctgcaccctgtcaaaacggaccaatcagctctctgtaaaatggaccaatcagcaggatgtgggtggggccagataagagactaaaagcaggctccaggagccagcaatggcaacccgctcgggtccccttccaygctgtggaagttttgttcttttgctctttgcagtaagtcttggtgctgctcactctctgggtccacactgccattatgagctgtaacactcaccactaaggtctgcagcttctctcctgaggccagccagaccaggaaccaccaggaggaacgaacaactccagatgtgcttc

SEQ ID NO: 732579 - DNA, 537 bp, Homo sapiens
ctcagtgtttcaccagcttgaaataaaaactagaattatggaaaactgctgatattgtttaccaaaaacaatcttacgttacttctaaactaaaggtactgatgttactcttttcatttttcttttctgtttcctcttgaatgcactatatagttttattcatttctgactggcagaaagaaatttcaataaattatgattgctactttatgaattttcagaacatctgagtaatgtaaaatgatatatttcaacagagaaaatgtttcaggtactgtggagacattttcaataggtttagagggctgatgaaaaatgatacttcaaagacatttcagcatgaaatatccttcagaaaatgactgctgaagtgaaaakttctctctatataactaagataactctttaggggtcatctagagaaaaagataatctggaaaagacttgtatgcgatgtaaatgttaactatgcttttattaaaaaagtagtttttaatcccagtagaagtcatagaaaagaaaaatggttttactttt

SEQ ID NO: 732580 - DNA, 571 bp, Homo sapiens
ctatagcagagattaaataacacaattctaaatatcgcacgatctaaataagtaggctcaagagaaatataaaatattttgaattaaagaaaaatgaaaatgcaatttatcaaaatttgtaggatgcaatgaaagcagtgcttagacagaaattaatagtattactgaatatataagagaagaagatccaaaattgatyatctgaagttatagaagaaaagcataaaaaaattagagcagaaattgataatatctaaaacaggaaaacaattgagaatatcaaagaaatgaaatgctgttctttaaaaaaatcaataaaattgattgataaatctctagttaaggtaaccaagaaaaaaataaatgtactacaaattgacaatatcagaaatgaaaacagggtcatagctactgatgctatggacataaaaagaaatatgcaaaaatactagaaacaactctgcatgcccacaaatttgatggctgagatcagtggtccccagcatttttgacactagggactggttttgtggaagataatttttccctgcacaggagggtggtgcggtgg

SEQ ID NO: 732581 - DNA, 571 bp, Homo sapiens
ctatagcagagattaaataacacaattctaaatatcgcacgatctaaataagtaggctcaagagaaatataaaatattttgaattaaagaaaaatgaaaatgcaatttatcaaaatttgtaggatgcaatgaaagcagtgcttagacagaaattaatagtattactgaatatataagagaagaagatccaaaattgatcatytgaagttatagaagaaaagcataaaaaaattagagcagaaattgataatatctaaaacaggaaaacaattgagaatatcaaagaaatgaaatgctgttctttaaaaaaatcaataaaattgattgataaatctctagttaaggtaaccaagaaaaaaataaatgtactacaaattgacaatatcagaaatgaaaacagggtcatagctactgatgctatggacataaaaagaaatatgcaaaaatactagaaacaactctgcatgcccacaaatttgatggctgagatcagtggtccccagcatttttgacactagggactggttttgtggaagataatttttccctgcacaggagggtggtgcggtgg

SEQ ID NO: 732582 - DNA, 571 bp, Homo sapiens
ctatagcagagattaaataacacaattctaaatatcgcacgatctaaataagtaggctcaagagaaatataaaatattttgaattaaagaaaaatgaaaatgcaatttatcaaaatttgtaggatgcaatgaaagcagtgcttagacagaaattaatagtattactgaatatataagagaagaagatccaaaattgatcatctgaagttatagaagaaaagcataaaaaaattagagcagaaattgataatatctaaaacaggaaaacaattgagaatatcaaagaaatgaaatgctgttctttaaaaaaatcaataaaattrattgataaatctctagttaaggtaaccaagaaaaaaataaatgtactacaaattgacaatatcagaaatgaaaacagggtcatagctactgatgctatggacataaaaagaaatatgcaaaaatactagaaacaactctgcatgcccacaaatttgatggctgagatcagtggtccccagcatttttgacactagggactggttttgtggaagataatttttccctgcacaggagggtggtgcggtgg

SEQ ID NO: 732583 - DNA, 712 bp, Homo sapiens
taactggatccttgtgatacaggagctagaaataatttatttaggcagatagtgagggtagaggagtctttggcaaggcttttcttttaacaaaaagcagccccaaaataacttcttttctaacaaagagcagactgaaaaatcaagttgcagacattgataagcaagctagaagcttgcacaggtgaatgccggcaactgtgccaatagwaaagggctaccttgaagccaggtatgttcaacatagaagctccgtcctcccttttcttttttttttttttcgatcctcccttttctttgtcaccgtgtgtacagtaaagaaccaggcaacatggtgccagccagatagagaacccatctgcataataaaagattagggtggggcggccagcctctttgcacagtatgcaaatggcacacctggtccgaccaatctttcataccctatgtaaatcaaacaccacctcttcaagctcatctataaaacctcctgcacttcattgcagaagcagcaacccattttctccaggacacctctctgtgaagagatctcttctctttctttcacctgttaaatttctgctctgaacctcactcattgtgtgtctgcgtcctagtgttctgtggctgtgagacaatgaatctcaggtatttaccccagccaatgacgccacttcattgtggaggctcatccaagatccaaggtagattc

SEQ ID NO: 732584 - DNA, 712 bp, Homo sapiens
taactggatccttgtgatacaggagctagaaataatttatttaggcagatagtgagggtagaggagtctttggcaaggcttttcttttaacaaaaagcagccccaaaataacttcttttctaacaaagagcagactgaaaaatcaagttgcagacattgataagcaagctagaagcttgcacaggtgaatgccggcaactgtgccaatagtaaagggctaycttgaagccaggtatgttcaacatagaagctccgtcctcccttttcttttttttttttttcgatcctcccttttctttgtcaccgtgtgtacagtaaagaaccaggcaacatggtgccagccagatagagaacccatctgcataataaaagattagggtggggcggccagcctctttgcacagtatgcaaatggcacacctggtccgaccaatctttcataccctatgtaaatcaaacaccacctcttcaagctcatctataaaacctcctgcacttcattgcagaagcagcaacccattttctccaggacacctctctgtgaagagatctcttctctttctttcacctgttaaatttctgctctgaacctcactcattgtgtgtctgcgtcctagtgttctgtggctgtgagacaatgaatctcaggtatttaccccagccaatgacgccacttcattgtggaggctcatccaagatccaaggtagattc

SEQ ID NO: 732585 - DNA, 712 bp, Homo sapiens
taactggatccttgtgatacaggagctagaaataatttatttaggcagatagtgagggtagaggagtctttggcaaggcttttcttttaacaaaaagcagccccaaaataacttcttttctaacaaagagcagactgaaaaatcaagttgcagacattgataagcaagctagaagcttgcacaggtgaatgccggcaactgtgccaatagtaaagggctaccttgaagccaggtatgttcaacatagaagctccgtcctcccttttcttttttttttttttcgatcctcccttttctttgtcaccgtgtgtacrgtaaagaaccaggcaacatggtgccagccagatagagaacccatctgcataataaaagattagggtggggcggccagcctctttgcacagtatgcaaatggcacacctggtccgaccaatctttcataccctatgtaaatcaaacaccacctcttcaagctcatctataaaacctcctgcacttcattgcagaagcagcaacccattttctccaggacacctctctgtgaagagatctcttctctttctttcacctgttaaatttctgctctgaacctcactcattgtgtgtctgcgtcctagtgttctgtggctgtgagacaatgaatctcaggtatttaccccagccaatgacgccacttcattgtggaggctcatccaagatccaaggtagattc

SEQ ID NO: 732586 - DNA, 712 bp, Homo sapiens
taactggatccttgtgatacaggagctagaaataatttatttaggcagatagtgagggtagaggagtctttggcaaggcttttcttttaacaaaaagcagccccaaaataacttcttttctaacaaagagcagactgaaaaatcaagttgcagacattgataagcaagctagaagcttgcacaggtgaatgccggcaactgtgccaatagtaaagggctaccttgaagccaggtatgttcaacatagaagctccgtcctcccttttcttttttttttttttcgatcctcccttttctttgtcaccgtgtgtacagtaaagaaccaggcaacatggtgccagccagatagagaacccatctgcataataaaagattagggtggggyggccagcctctttgcacagtatgcaaatggcacacctggtccgaccaatctttcataccctatgtaaatcaaacaccacctcttcaagctcatctataaaacctcctgcacttcattgcagaagcagcaacccattttctccaggacacctctctgtgaagagatctcttctctttctttcacctgttaaatttctgctctgaacctcactcattgtgtgtctgcgtcctagtgttctgtggctgtgagacaatgaatctcaggtatttaccccagccaatgacgccacttcattgtggaggctcatccaagatccaaggtagattc

SEQ ID NO: 732587 - DNA, 467 bp, Homo sapiens
actccacagaatggaaccctttttctattccacagaatggaaaaggaaacacttttcartgtgcatattggagggcctatgaaaacctaggaccaaacctcttagttaaactgtgcatgttagaccaaaagccagataagaatcccacagcctttatggaaaagctgagagaggcactaataaaacacatctctttattccctgattcagtcaaggaacagctcatcctcaaggacaagtttattatataggcagctcccagtattagaaggaaattgcagaagcaggctataggaccagatagcaccttggaaaacctcctgagggaggccacctcggtcttttataaaagagaccaggaggacgcccaagataaagaaaggaaacacaagaggaagacagaggcttctagtagctgctctgcgggcttgcaaagtccaggatccccaaggtgcatccactagttg

SEQ ID NO: 732588 - DNA, 566 bp, Homo sapiens
ctaccacccctggccttggcgctgggtttccacccacgcccacgggccttggctcctggctcctccgacccagccgtgccaccgtctttgccctccccrgtgtctttgctggtcttctggctgcggcgcttggcacttggcaccaggagggccggggatggctcagcacctgtggggcagaggacagagtggctcgtcaggcctggggtccccagcttggagcttccaagaccgtggtctgtcccggggatcagggatgggggcggaagcaactgacaccaggtgtctgaccccgggtgggctcccacgacaggctgtgaggtccagcaggggaaaccccgtctgcagggggcagccagaggctcccgaataatgaagtaaaacaaagcactttgtggaactgggacaggtggataaagatgctgacttttgttggtttttttgtttttttgtttttttttttgagacagagtctcgctctgtagccaggatggagtgcagtggcaggatctcagctcactgcaacctccgcctctcaggttcaagggatcctcctgcctcagcct

SEQ ID NO: 732589 - DNA, 566 bp, Homo sapiens
ctaccacccctggccttggcgctgggtttccacccacgcccacgggccttggctcctggctcctccgacccagccgtgccaccgtctttgccctccccggtgtctttgctggtcttcyggctgcggcgcttggcacttggcaccaggagggccggggatggctcagcacctgtggggcagaggacagagtggctcgtcaggcctggggtccccagcttggagcttccaagaccgtggtctgtcccggggatcagggatgggggcggaagcaactgacaccaggtgtctgaccccgggtgggctcccacgacaggctgtgaggtccagcaggggaaaccccgtctgcagggggcagccagaggctcccgaataatgaagtaaaacaaagcactttgtggaactgggacaggtggataaagatgctgacttttgttggtttttttgtttttttgtttttttttttgagacagagtctcgctctgtagccaggatggagtgcagtggcaggatctcagctcactgcaacctccgcctctcaggttcaagggatcctcctgcctcagcct

SEQ ID NO: 732590 - DNA, 345 bp, Homo sapiens
agcactttgggatcctcccagcaggatgatcacttgagcgcaggagtttgagactagcccaggcaatatggtgaaagcccatctctacaaaccccacaacaattagccgcgtgtggtggcatggacctgtggtcccagatactygggaggctgaggtgggaggatcacttgagtccaggagttcgaggctgcagtgagctattatggtaccactgcattccagcctgggaaacagagcaagaccctgcctcaaggcaaaaaaaaaaaaaaaaaaaaggatgctgtaggagttaggaccagagagatgttgtgctgttttaggtgaactttcgtgttactgatgat

SEQ ID NO: 732591 - DNA, 597 bp, Homo sapiens
aacctctgtgttccaatggatactgtcccatgactggcctcagtgatgctttggtgactcacagccctacctccccccagggcgggtggggtggaagcttcccaaaccaatacacattatagccactttgggaggctgargcggcagatcacaaggtcaagagattgagaccatcctggccaacatggtgaaaccgccccccctactaaaaatacaaaagttagccaggcgtggtggtgtgcacctgtagtcccagctgttgtgtgcagccctcccctaagacacacaacagcacagggaccacaggccaccactcaccccttttctttgcaggtagagaaacggagccacagatcaaggtcacccagtgagtgagaagcaaagtctggagctgaggcaagtttttcaaattcctcttccaaggctttctcttggaaagcccaaagcttattaaatccttaaagggcattatcaacgggacgtgcattgagtttccttaatcctgcaagaggattaggagaattcagccaagataagctccttcagggacaaaccagccgcctctcaccaacccgtgctcttagcgggctgggacaa

SEQ ID NO: 732592 - DNA, 597 bp, Homo sapiens
aacctctgtgttccaatggatactgtcccatgactggcctcagtgatgctttggtgactcacagccctacctccccccagggcgggtggggtggaagcttcccaaaccaatacacattatagccactttgggaggctgaagcggcagatcacaaggtcaagagattgagaccatcctggccaacatggtgaaaccgccccccctactaaaaatacaaaagttagccaggcgtggtggtgtgcacctgtagtcccagctgttgtgtgcagccctcccctaagacacacaacagcrcagggaccacaggccaccactcaccccttttctttgcaggtagagaaacggagccacagatcaaggtcacccagtgagtgagaagcaaagtctggagctgaggcaagtttttcaaattcctcttccaaggctttctcttggaaagcccaaagcttattaaatccttaaagggcattatcaacgggacgtgcattgagtttccttaatcctgcaagaggattaggagaattcagccaagataagctccttcagggacaaaccagccgcctctcaccaacccgtgctcttagcgggctgggacaa

SEQ ID NO: 732593 - DNA, 597 bp, Homo sapiens
aacctctgtgttccaatggatactgtcccatgactggcctcagtgatgctttggtgactcacagccctacctccccccagggcgggtggggtggaagcttcccaaaccaatacacattatagccactttgggaggctgaagcggcagatcacaaggtcaagagattgagaccatcctggccaacatggtgaaaccgccccccctactaaaaatacaaaagttagccaggcgtggtggtgtgcacctgtagtcccagctgttgtgtgcagccctcccctaagacacacaacagcacagggaccacaggccaccactcaccccttttctttgcaggtagagaaacggagccacagatcaaggtcacccagtgagtgagaagcaaagtctggagctgaggcaagtttttcaaattcctcwtccaaggctttctcttggaaagcccaaagcttattaaatccttaaagggcattatcaacgggacgtgcattgagtttccttaatcctgcaagaggattaggagaattcagccaagataagctccttcagggacaaaccagccgcctctcaccaacccgtgctcttagcgggctgggacaa

SEQ ID NO: 732594 - DNA, 426 bp, Homo sapiens
cccctcactggcctctcccccaacaggctacctcttagccttgggccctctcctttttatcagcatctgtgacgtgtggctgcagctcttctctcgggaccaggcctacgccatcaacctggctgctgtgggcaccgtggccttcggctgcacaggtaggaactggggcccaagggggaggccctgagtgcccacttccgaccccatcccaccccagcccttgtctcctgctggtggcatgtgacatgacaggagcygggctggctgagtgccaggtgtgtgtccacctgcatgccagcgtgcacacctgcacaccggctcacacccacacgagcctgtgtatgcagtgtatgcacagcgtgtagccacagagactctgaggcagaccctggtttccctggtataaacagggcttcaaagactgtt

SEQ ID NO: 732595 - DNA, 558 bp, Homo sapiens
tagcacaacagggatgcgtacagtcaataacttaattgttcatttaaaagtaattaaagaagtataatcggattgtttgtaacacaaatgataaatgctttaggtgatggataccccattttccataatgagattattacacataacatgcctgtatcaaaacatctcatgtgccccactccataaatacatacatacatacatatatatatgtgtgtgtrtatatatatccccacaaaaattaaaaataaaaaatttaacaaaagtaactgaattagaatatgggcaaaggatctgaatagatatttctccaaagatacaaattgccaataggcacataaaagatgctcaatgccaatacttattagagaaatgcaaatcaaaaccacaatgagataccaccacaacacatccactgggatgactatcatcaaaaagataaataatggggccgggcgcagttgctcatacctgtaatcccagcactttggggggctgaggcaggcagatcacatgaggtcaggagtttgagaccagcctggccaacatggtgaaacc

SEQ ID NO: 732596 - DNA, 519 bp, Homo sapiens
gctgaaggagagtccctgaggatgtcaactgaggaggggcatgaagtgatcacttaggactagatggcaactggtggtagacagaccagtccaggaaagggaggaggctgattccagcgaggttagggaaatagaattcacagggtcatagcggactgtggtggcatgcacctgtagtcccagctactygggagattgaggtgggaagatcagttgaacccaggagttcgaggctgcaatgagctatgatggaaccaatgcactccagcctgggcagcagagcaagagcccaacacaataataatagtaaataagaagaagaagaaggagaagaagaagtcacaggatctaatactgagcatggcttctcccagagttctggccagggtgacttaggggctggttaccgctcctgaaatggggcatgcagaggtgcccgtgtttacatgagaagtgaagattattaggtgcccaaagggaggcctgacgttggatgacaggcccaggccagaggcaaaa

SEQ ID NO: 732597 - DNA, 607 bp, Homo sapiens
tttttttttttgtatttttagtagagacggggttttactatgttgaccaggctggtcttgaactcctgaccttgtgacccacccacctcagcctcccaaagtgctgggattacaggcatgagctaccgcgcctggtcagcttaccctatttttgaacatatctacattgctggaaaacatcctctttggttctgctggygatagtcaaccaaagtactgctccagtgagtctcatgaggtttcagagctatggagctccttgggggaggatctgggtaacccacttgttttacagatgagaaaattctggcagaaagaggccccaagactcacccaaggtcacagagatggtgggcagcagcgcctggaccagcttcctgtgaaatgctctttggagtgaaccacatggacaccttggctttattcagcaatatgctttaaatctgaatgcgtaaatatgttactgctcagcagatatgggctgcaagatgggaagcagacttgtagttacttttaactcagtcatacactgttgtagttcacccaactttctctatttcccctattatttgattagactctgtcgaatcatcctgccagtgcccat

SEQ ID NO: 732598 - DNA, 607 bp, Homo sapiens
tttttttttttgtatttttagtagagacggggttttactatgttgaccaggctggtcttgaactcctgaccttgtgacccacccacctcagcctcccaaagtgctgggattacaggcatgagctaccgcgcctggtcagcttaccctatttttgaacatatctacattgctggaaaacatcctctttggttctgctggcgatagtcaaccaaagtactgctccagtgagtctcatgaggtttcagagctatggagctccttgggggaggatctgggtaacccacttgttttacagatgagaaaattctggcagaaagaggccccaagactcacccaaggtcacagagrtggtgggcagcagcgcctggaccagcttcctgtgaaatgctctttggagtgaaccacatggacaccttggctttattcagcaatatgctttaaatctgaatgcgtaaatatgttactgctcagcagatatgggctgcaagatgggaagcagacttgtagttacttttaactcagtcatacactgttgtagttcacccaactttctctatttcccctattatttgattagactctgtcgaatcatcctgccagtgcccat

SEQ ID NO: 732599 - DNA, 607 bp, Homo sapiens
tttttttttttgtatttttagtagagacggggttttactatgttgaccaggctggtcttgaactcctgaccttgtgacccacccacctcagcctcccaaagtgctgggattacaggcatgagctaccgcgcctggtcagcttaccctatttttgaacatatctacattgctggaaaacatcctctttggttctgctggcgatagtcaaccaaagtactgctccagtgagtctcatgaggtttcagagctatggagctccttgggggaggatctgggtaacccacttgttttacagatgagaaaattctggcagaaagaggccccaagactcacccaaggtcacagagatggtgggcagcagcgcctggaccagcttcctgtgaaatgctctttggagtgaaccacatggacaccttggctttattcagcaatatgctttaaatctgaatgcktaaatatgttactgctcagcagatatgggctgcaagatgggaagcagacttgtagttacttttaactcagtcatacactgttgtagttcacccaactttctctatttcccctattatttgattagactctgtcgaatcatcctgccagtgcccat

SEQ ID NO: 732600 - DNA, 635 bp, Homo sapiens
aaaaagtactgaagttaaaaaaaggatatataaaaagtactgaagtaaaaaacttgctaaacaaaacatactatactcagtaaaagtatccttcaaacctgaaggaatgaggagcttttcccagaaaacggaagctgaggaaattcaccaagaccagaccctttcttaaaagaartaataaaatgaatttttcagtttaaaagaaaaagacactaatatgcagttaaacaacatcttaatgtatagactcacagataaaagtaagtacacagacaaattcagaatactctaacactgtcattgcaatgtgaaaaccactcatatctatagtatgaagactaaaacacaaatttttaaaaataataactatgagaacttgttaagagatataaaaagatccaaactgagacaacaaaaaggtcaatatgctggggggatgaagttcaaagatcgttttatagttttctttgtttctgtatcttttctttgttatcaaagttaattgttgtttgtttaaaagagctttatatagctataagattttttataagcttcatggtataagagacacacaaaataaaaagcaaggaatcaaaacatactaccagagaaaaattactaaacccaaacggaag

SEQ ID NO: 732601 - DNA, 651 bp, Homo sapiens
gtagacgtctaggagctttttgtcgctggatgcttgataaatgcatttgccttatctgattgttggatgccttaatttttgtgtgcttaagaggagagctgtgtataaatgagcattctcagtttgaatacaaaacaggtgtgtgtgtrtgtgtgtgtgtgctgtgcactcatactcaaagagaataaaaaaatcctctattatagggaagcaagctggaagcaaggagatgggccttaagtgatcaccaggtgaatgcctggcttacagcaggtgctcaataaaacatgggatgaatgaaactgacatagaaactgtgtgttatttactcgttcaccagataaacaagatgtggctgaagactcagacataatgggaagtgaatatttaaaaataaaatagcgtaacaaggttcccagcttgaccttggctcagaaaagtttgagctcttctgagcttcacccagaaggaagctcaatcccaaagccagaagcagtgctggtgagtggggagtggagtgaagatctagcatctagccactgcatttcatggtggggtttccctccaatttaaccttggaggaccacgccatgatttccactataggacctgtcatgtttcattgccatggtggttgcagtgaacatatat

SEQ ID NO: 732602 - DNA, 528 bp, Homo sapiens
ggaaattgttgagaaccaccaagggtcagccagcccatcatcccaatcactgtgatgtccacacgtcctagatggaactgatgtgagagttttgcaaaatcctgcctcttctgaaccttgctttggacagtttataaagctgcacgatgaacaaaatgctgggyagtggatgtccacatcaactccttgcgttactgacccggtctcttcatctggtacatcgggagggtcagcagaggcagtgacaccgccctatctcctgaggccacgtggtgagggggggaagaggaggtgaggaaggcagggcagggggccctttcttagggaccttatcctttctcttagggacccttgcctgtcagattcaccagcttctgctctctctctgtccctcaagcaaaaaactgccattgttataccgcgagagactttctcaaatgcttctgacgggacacaactaacacagcaggctctctgctgcctacaaactagggaacacattttcttcctacaaggagggctgataga

SEQ ID NO: 732603 - DNA, 528 bp, Homo sapiens
ggaaattgttgagaaccaccaagggtcagccagcccatcatcccaatcactgtgatgtccacacgtcctagatggaactgatgtgagagttttgcaaaatcctgcctcttctgaaccttgctttggacagtttataaagctgcacgatgaacaaaatgctgggcagtgratgtccacatcaactccttgcgttactgacccggtctcttcatctggtacatcgggagggtcagcagaggcagtgacaccgccctatctcctgaggccacgtggtgagggggggaagaggaggtgaggaaggcagggcagggggccctttcttagggaccttatcctttctcttagggacccttgcctgtcagattcaccagcttctgctctctctctgtccctcaagcaaaaaactgccattgttataccgcgagagactttctcaaatgcttctgacgggacacaactaacacagcaggctctctgctgcctacaaactagggaacacattttcttcctacaaggagggctgataga

SEQ ID NO: 732604 - DNA, 528 bp, Homo sapiens
ggaaattgttgagaaccaccaagggtcagccagcccatcatcccaatcactgtgatgtccacacgtcctagatggaactgatgtgagagttttgcaaaatcctgcctcttctgaaccttgctttggacagtttataaagctgcacgatgaacaaaatgctgggcagtggatgtccacatcamctccttgcgttactgacccggtctcttcatctggtacatcgggagggtcagcagaggcagtgacaccgccctatctcctgaggccacgtggtgagggggggaagaggaggtgaggaaggcagggcagggggccctttcttagggaccttatcctttctcttagggacccttgcctgtcagattcaccagcttctgctctctctctgtccctcaagcaaaaaactgccattgttataccgcgagagactttctcaaatgcttctgacgggacacaactaacacagcaggctctctgctgcctacaaactagggaacacattttcttcctacaaggagggctgataga

SEQ ID NO: 732605 - DNA, 528 bp, Homo sapiens
ggaaattgttgagaaccaccaagggtcagccagcccatcatcccaatcactgtgatgtccacacgtcctagatggaactgatgtgagagttttgcaaaatcctgcctcttctgaaccttgctttggacagtttataaagctgcacgatgaacaaaatgctgggcagtggatgtccacatcaactccttgcgttactgacccrgtctcttcatctggtacatcgggagggtcagcagaggcagtgacaccgccctatctcctgaggccacgtggtgagggggggaagaggaggtgaggaaggcagggcagggggccctttcttagggaccttatcctttctcttagggacccttgcctgtcagattcaccagcttctgctctctctctgtccctcaagcaaaaaactgccattgttataccgcgagagactttctcaaatgcttctgacgggacacaactaacacagcaggctctctgctgcctacaaactagggaacacattttcttcctacaaggagggctgataga

SEQ ID NO: 732606 - DNA, 581 bp, Homo sapiens
tcctgcagaggagcaaagtccagactctgattgtcagagcagtcttccacggtcacctgtctcctaaccccagcccaatttcattttccagcctctgcccacaacacttccccagcacaccctcccaaccctggcccaccagtctgttttccacctcaaaggggccgtgcttgttcctttcacccgttatcccccatctctaggtccccagaatcactcactctagaatccttccagtgaaaactgcaggctccaccttgcctctcgtttgaccattcttgggttttcggggtgagtctcttcccttcaatagctcccacccttcatttgcrcagtacgcagtacttaacttttctccacaggttccaaaggctgatttcttgcaagcaaaggccacctgatgtgtctttttttacaaatctctgctgaacaggtaacaggtgcccaataaaactttgtgagttggcagtctaagggcatctaccctcaaaacagctaacgtagcattttatgggagtggaaacggagttgtgtggaaagacgaccaggcactttcgtttttgagatggagtctagctctg

SEQ ID NO: 732607 - DNA, 505 bp, Homo sapiens
caaagttaattggctttagtacagagttacaatcactacacaaacagtgcaacaatgcaaaggcattttaaatcaccttagtcaaataggaacattcttagaagcaaacattatttttagtgcaaacacatgaaacatagaggtcttaataaagtttatcaaaagtattgttttaaaacattttatagtgtttcctatatgcttcacaattatagcaccagaacaagaaatctacatggtaaactttaagtattgaaattatttcctggagggaggaatctgtggtttttcggtccttttctgacactgcccccaggatcttatcatacaacttctctagagacctatttcggtttctgtttcaaagmgctgtattcctcattaagtatcagaggttacagtttacaaggcatttattaagcattggagactgagggtacaccttgtcaggtggtaggatcccagggacacttcatgccctcatcatccatgtcataatttgttt

SEQ ID NO: 732608 - DNA, 617 bp, Homo sapiens
cctgttttctgtctttgaacatagttgtgtgaggatttgatgctcaaagctgctgtagcctttttgaaaccatgagaagaggccaggcgccgtggctcacgcctgtaatctcagcactttgggaggccgaggtgggcggatcacgaggtcrggaaatcgagaccatcctggccaacatggtgaaaccccggctctactaaaaatacaaaaattagctggacctggtggcgtatgactgtaatcctagctactcgcgaggctgaggcaggagaatcacttgaaccagggagtcagaggttgcagtgagccaggatttcaccactcactgcactccagcctggccacagagacagactctgtctcaaacaaacaaacaacaaaaaaaacaaacatgagaagaaggggccagtgtttgcaaggatgcacaccttgagccctgatagcatgcaggtactgaactaaaaccagaatcctcttcccacccagataaaatcccccgggcttaggccctttcagccaggaattgtttcacagccaaaagcattcctgttggacacactgcacacctggttcttccactgcctggctcttgcaccaggataggtcgctaagcatca

SEQ ID NO: 732609 - DNA, 599 bp, Homo sapiens
gataaaacttaatttacaaaagtaggctgcagggcagatagggcctctgggctacagtttgcagacccctgttcttccatagggaaggaataatcttacttcactctcctcctgccccttcatctcctgctgatggcttctactatttggacataaatagagccagattgttagtgaagtccaaaaagatcacctcccattctggggrcagagcaggtgcagaaagggacagaaattctagagggttcaaaggagaatattcaacacaaaatgttttcagcaactacttgttgaaatgaatgaatcgtatgactggtcactgtgaatcccactgcaaatgattgaacgctcatggaaaaactgctgaaatttaattcctaagtaggaaaagctgggaaagggccctggaccatcatgacttcaacaaggacctgaggctcagtgtgcttctctcttgctttactttaggaattttgcaaaatatacacatgagaaatactggttcttgaaatgaggaatttcaaacatttttcagtgtagtgacatttgttgtaatgagtgtgacagatctcagaaatttctttataatgaaaagggat

SEQ ID NO: 732610 - DNA, 664 bp, Homo sapiens
aagaataatggtgacttttacttattcctattatgttaatggaaacccaagcaacaaaagtcagattaagtcaatgcagaaaatgtggatgggaaaaaaatgacaaaaataaggataaagtcttgttcctttctgattacttgagtttatgtgagaaaaggkttttttttttttaacctacattagaagaaaagatctataaaattgtggtggtaatagcaggaaaagccatgaacacaaacaatatatggttgcttgaaataatctctcaaaatgttgaacagttgaatatttgggaagactttagctatttttatcataatttatctgaataacagtattcaaaggtagccagggtcattttgatagagacatccattaatcctagagtttacactataagtaaaatcataaccactcatttttaatataaattcaaggggtgcatgtgcaggtttgctacatggacatgttgcatattcaagccacttatttaattaacattttataacatcttggattgaaaagtggcaacaaaaaatagtggtctagaattgtgtgatctgggaaatagaggacaataaaaggaaagagaagttaagaaagtagggatacaaaaggagaaagtcatctatgggatcatttcacagatggcactttttaa

SEQ ID NO: 732611 - DNA, 630 bp, Homo sapiens
tgttttaattgaaaattttatagaaatcatattagactgaattattataccataatgccatacatgcatacatatactagtgcttaatgtcatgttattcgatagagaataaaaatggtaaagtaacagtaaataatttttaagagagcctatgactaaaaattttcatattaaatgacaytcaagctattttacttggtttatctcctgagtgaggaaaggaattcatgatgggagtgtaccttcagggtggaataggtagattcagataggtttctaactctttagatgtgaagggcagggctgggcgcggtggctcacgcctgtaatcccagaactttgggaggctgaggcaggcggatcacgaggtcagaagatcgagaccatcctagctaacacggtgaaaccccatctctactaaaaatacaaaaaaaaattagctgggcgttgtggcgggcgcctgtagtcccagctactcgggaggctgaggcaggagaatggcgtgaacccgggaggcagagtttgcagtgagccgagatcgcacttctgcactccagcctgggcaacagagtgagactccgtctcagaaaaaaaaaaaatgtgaagggcagggccaaggcttattttaag

SEQ ID NO: 732612 - DNA, 553 bp, Homo sapiens
ccaggagcaatatgtcttcattcatgatacactggttgaggccatacttagtaaagaaactgaggtgctggacagtcatattcatgcctatgttaatgcactcctcattcctggaccagcaggcaaaacaaagctagagaaacaattccaggtgagtcctcttggaagcctcttggatgtcactacagaactgaatgtccctgcatcttctcatttgagttgacagggtcacgttgagtgggcagtatgggtacaatgactttgtatttgagccatcgttgttccttactgtgggctacagtgccacatggtaaatttcaaggagaaacataattctgagcagcaagaggaaaagttctcagaaaccttaaactaacttttataaatgcaaacttggtcgagaaaaraagggcacagagcataacagaatgaacagaaagaacttgtaaaacatactatataagtgctctttttactttgaaaaaaaaaaacagaccacttaaacatgagtgcggtggctcaggctgttcctgatactctttggaaaaaatct

SEQ ID NO: 732613 - DNA, 659 bp, Homo sapiens
aaaaatctcagactccatgaaataaaaggtaagaatgagataagccaacaaagtgatatgagagagttgacacagttaagaaaataatgtgactggacgtggtggctcacacctgtaatcccagcactttgggaggccaaggtgggtggatcatctgaggtcaggagtttgagaccaacctggccaatgtggtaaaaccccatytctactaaaaatacaaaaattagccagacacagtggcgtgcatctgtagtcccacctacttgggaggctgaggcagaagaatcgcttgaacctgggaggcagaggttgcagagagcagatatcaggccactgcactctagcctgggtgacaaaaggagactctgtatcaaataataataataatgacatggaagaattgtaaataaacttagcaaccacagtggttacaactggcaatggaagataattcaatcagtgaaaagaaagctaagcataggactgtattctgtaatgcaaaagaaaaggacaaagattagctgggcatggtagcaagtgcctgtggtcccagctacttgggaggctgaggtagaaggattgtttgagcctgggaggcagaggttgcagtgagctgagttgtgccactgcacaccagcctgggtgacagagcaagaacc

SEQ ID NO: 732614 - DNA, 704 bp, Homo sapiens
tttcatttttagaggttctagtgtgtgtatgggtgtgttcttattcccttacacaaaggataacataacacatacagtctgttgttctacgtcttaacttttttctcttaataatacattctggaactctgcatatttgtacatagagattatcttcagtcttttttataaccttagagtactccattttgttgatgtgtgatgatggcacaacaacataatcttggattgtgtctaatcctctgtcttttcaaatcacctgtaatagataaccttgtagacatgtcatttaatacttttgtaggtgcatctgtgaaatgaaatcctagaaatgggattatatagtcaagggacagatacatctgtcatttttaaaagttaytgacaaattcttcctgtagggtttataccgtattctactcatgcaagcagtatgtgaaagtgcctgtttccctagaacatcacccatggaatctgttgtcaaacttttggatttttgctggtaggtgagaaatggtattttgttatagctttaatttatatttctgttattataagtaaggttgatcatattttcatgtatttaaatgtcattttgtgtttatttttatgtggagtgtgttttgaatttcagacattttcccactatgttgttggtctttttcttctttattctgaaagctctttatgtatagtctttgcta

SEQ ID NO: 732615 - DNA, 505 bp, Homo sapiens
tagaaaccagtacttgtaatgttctttaaactattccagaacataagaataattcagtacaagctttcttattcagtcttctcttgaagagtcttattagattaattgatgctcttcattccctctgtaaagaaaaactggcttgataacatggcaagctgaatgcttgtagctagtaggctgtcactttctagtaagactatgtatttatcccaccagttgaagagtatgctgaacaggaggtagttgttagttttcaatttttatgctttttattattataattacwtagtttaagcgtagatacagtgctttacaaaaactttaagacattgctgtctaattagggatggacaagtaattgtgtaagttagaaaagttataaaaatccaagatgtggtattagattgctttgaaagtgtttttaatttctagatttatttaaagaaatcaaaactaaaaatccttgatgatgtgttatgggtgtggtttgtacaagagagct

SEQ ID NO: 732616 - DNA, 607 bp, Homo sapiens
tataatcaatgacatgtcacagcttaactggcagtatttttactaagtggcatataaaataatagtgaatctcaaagcatcttaaattagatgataaattatggaaattatgagcaaaataaaagaggtaattcaggctgggtgcactgcctcacccatgtaagcccagcactttgggaggctgaggtgggtggatcacctgaggtcagctgttcaaaaccagcctggccaacatggcgaaactccatctctactaaaaatataaaaattagccaggcatggtggcttgcacctgtaatcccatctactcaggaggctaaggcaggagaactgcttgaacccaggaggcggaggttgcagtgagccgagatcacaccactgcactccagcctgggcaacacagyaagactctgtcacacacacacaaaaaaagaggtcattaggaagttcagggcttatatcaggtgtactgatgactactatgtatttttttttttcagactagtcaagtgcagcagtgagaagcggggggaagacgagaacaaagagttcgatctgtaactgactgaacaatcaattaagataactcactaccttccaaccaggc

SEQ ID NO: 732617 - DNA, 597 bp, Homo sapiens
gaaaatgaaagacaagccacaaactggaataaaaatctgtaaatcatgtatttactaaagggattgcaaataactcatatcttttaataaaaacaaacacctcaattacaaatggacacaaaatttgaacagatatttcatcatggaaaatataggaatggtaaataagcrtatagatgcttaacattattagtcattagaagacaaaattgaaacaagatgaagtaacattgaacatccactaagattagctataattttaaaagacagacagtaccaattattgacaaaatatagaggactaagaacacttatacagtgctgatgggaatataaaatgatacagccactctgaaaacaggctggcattttcttaaaacatgaaacataaacttatcatataaccagcaattagactcccaggaatttatccaacagaactgaaaacacgtctgtatgaaaatatgcatgtattttcacaacatcattattagtaacaccttaaaactgaaaacaatctgaatatccatcaacagttgaagagatagataaaagtgtagtatgtccactaaatggaaaactattcagtaaataaaa

SEQ ID NO: 732618 - DNA, 597 bp, Homo sapiens
gaaaatgaaagacaagccacaaactggaataaaaatctgtaaatcatgtatttactaaagggattgcaaataactcatatcttttaataaaaacaaacacctcaattacaaatggacacaaaatttgaacagatatttcatcatggaaaatataggaatggtaaataagcatatagatgcttaacattattagtcattagaagacaaaattgaaacaagatgaagtaacattgaacatccactaagattagctataattttaaaagacagacagtaccaattattgacaaaatatagaggactaagaacacttatacagtgctgatgggaatataaaatgatacagccactctgaaaacaggctggcattttcttaaaacatgaaacataaacttatcatataaccagcaattagactcycaggaatttatccaacagaactgaaaacacgtctgtatgaaaatatgcatgtattttcacaacatcattattagtaacaccttaaaactgaaaacaatctgaatatccatcaacagttgaagagatagataaaagtgtagtatgtccactaaatggaaaactattcagtaaataaaa

SEQ ID NO: 732619 - DNA, 595 bp, Homo sapiens
ggacaagatgtggaggtggaagacagtgatactgacaatgctgacctgtgtgggccttggctagtgtatgtgtttctgtcttagtttttaacaaaaagtttaaaaagtaaataataaaattaagatttaaaaacagaaaacagcatatagaataaaaatataaagaaaggaaataattttgtacagttgcacaatgtgttttaagctaagtctyaataaagtaaaatagttacaggaagctagggttaatttttatcagagaaaaatatttttcaataaattttatgtagcctaagtgtatagtgattataaagtctacagtagtgtatcctaatgttctaggccttcacatttgcttagcactcactcactgtctcacccagggcaacttacagttctgtaagctccattcatgataagctccctataaaagtgtatcattttttatctgtcatacttccaccttccaccaacttttctaagtttagataaaccaatattcgccattgttttacaattgcctaccatatttagtacatgatgtacaggtttgtggcctagaagcaataggctataccatatagtttaggtgtgt

SEQ ID NO: 732620 - DNA, 610 bp, Homo sapiens
taaaatggaataacattaagtagagtatttatttttaccactgatataaggactccagtttcagctcagacatgtaaagacctgggaagtcgttatatctgccccacagcaacaagagatctgagcaaaatgaaaatcaatgacttttcttggacccatcagaaaactgaggttgtagcatttgttagtctgcattgctatgaaggaatacttgagactgagtaatttataaagttagttggtatattttggctcatacttctgcaggctgcatgggaagtgtggtgatctgcttctgatgagggcctcaggaagcttacaatcatgrcagaaggtgaaggggagccattgtcatgtgtcaagagagggcacaagagagaaggggctaattttgtgtttttagtagaggcaaggtttcaccatgtttgtcaggctggtctcaaactcctgacctaagggatctgcccccctcagcctcccaaagtgctgggattacaggcgtgagccaccctgcctagcatggtggtgcatgcctgtaatctcagctacttgggagactgaggcaggagaatcacttgaaccagggagacagaagttgcagtgagctgag

SEQ ID NO: 732621 - DNA, 633 bp, Homo sapiens
cctgggagtgttgccatccctctaggattaatttttatctttttattttggtggttacaagattaggtagttatgatgaattaaacctgaaactcctgtgaggacaggcttgaaacacctccttgaaacacgtcttttgcttatcttctgtggcattactttttcttgtgtttcattctcttttttatcttgctggatgcttctactcagtctcttttcctggctcctccttttcctgctctaaacttggaagtgtccgaggacctctgttctactctattcgcattcacctcctactaaactcatcttgtttcatggttttaaataccaatgattttctgactttctggctttcagtttatgtctcctgcctggacttctttcctgaattgcagacctagatagccagctctttatttatcatctccacttgggtgtctactaggttgtttaaatttaacgtgtccaaaaatgaactcttgattgccacccaactgttcmtttggcagcgtcccctgtttcagtaaaaggcaactgcattattttgttcaggcataataccttgaagttattcctgattcttctctctcaaatcgcatatatccatcagtatatcttgtcagcttctacctt

SEQ ID NO: 732622 - DNA, 656 bp, Homo sapiens
ctcatcttgtttcatggttttaaataccaatgattttctgactttctggctttcagtttatgtctcctgcctggacttctttcctgaattgcagacctagatagccagctctttatttatcatctccacttgggtgtctactaggttgtttaaatttaacgtgtccaaaaatgaactcttgattgccacccaactgttcctttggcagcgtcccctgtttcagtaaaaggcaactgcattattttgttcaggcataataccttgaagttattcctgattcttctctctcaaatcgcatatatccatcagtatatcttgtcagcttctacctttgaaatatgccaaggatccaatcaaccttccatttctcaccaactccactgccatcaccccagtctaagttgccactggtttgcctggattattgtgatagccttgtaacaggtcttcgggtttccatccatgcttctccttcaaaatattcagsgtttggggagagtgggtggaggtacaggtgaattaagattggccatgtattggctgggcacagcggctcatgcctgtaatcttagcactttgggaggctgaggggcaggcagatcacttggggtcacgtgttcgagatcagcctggccaacatggcaaaaccctgtctc

SEQ ID NO: 732623 - DNA, 614 bp, Homo sapiens
atgctgtttgacatctaggtaacgagaagtctcaccaaacatgaaaatatcagctttctgtatgcaaatgacagcacaggcaaatctctgcaactctcctcctgaaagatcttcaacatttcgttctgttaggtgggttaattcaagctgctgacatacaattgcctgtgtctttgtttcatcttttcagtccaaratagatcccactgtcccctttgcaggcttaggaatctggtctacatattgagatttgatgatggcttttaggttctcttctagaatcttggtaaagtaattctgtaattcagattcacggaaataagtcaaaatgtcttgccagtcaggaggatcatcgtactttccaaggtttggcttttgttttcctgctaaaaatttttaaagcagttgactttccaataccattagttccaactaatcccaaaactttacctggacgagggataggcaacctgttaatttagatgacattggcacaatatcaatgtgtggtttctttttccaagttgcttggtaaattgtcaattgatagggcgccaaaggggcatttcttaatacagataccacaaccaatacaaagagtttcagaaatccat

SEQ ID NO: 732624 - DNA, 591 bp, Homo sapiens
tgatttttcacatacatgaatgttcatttaaaagtttaatcctttgagtgtctatgctatcaggaaagcacattatttccatatttgggttaattttgcttttattatattggtctaggaggaagggactttggagaatggaactcttgaggactttagccaggtgtatataataaaggtacttttgtgctgcattaaattgcttggaaaatgttaacattatattatataagagtatcctttatgaaattttgaatttgtataacagatrcattagatattcattttatataatggccacttaaaataagaacatttaaaatataaactatgaagattgactatcttttcaggaaaaaagctgtatatagcacagggaaccctaatcttgggtaattctagtataaaacaaattatacttttatttaaatttcccttgtagcaaatctaattgccacatggtgccctatatttcatagtatttattctctatagtaactgcttaagtgcagctagcttctagatttagactatatagaatttagatattgtattgttcgtcattataatatgctaccacatgtagcaata

SEQ ID NO: 732625 - DNA, 468 bp, Homo sapiens
ttcaatttcctttcctatattctcctccatgtgacctctacatctgagatttcctccaggtttggggctaagcccttttccccacccgatctcatcaatgccacggccttgtttgtatgtccgtggaggcagttacctgcttggcatcctcacttggacctctcccccacacctsaaagtagccacacctcctagggtcccctggcttagtgaatggaccactctcatcctgctgagcaggttagtaacctgggggtcaacctggacaccttccttctcatccccatgttccttgtatcacaaagttctcccctaattcctaagaatctagaatgcctccctggaacctctatgtctttggccggccatcttggtctgagcacccatcatctcttccctgcatcagtacaatgtcctactgacaggtcatttccacgtactctggccttctccaattcagtttcctag

SEQ ID NO: 732626 - DNA, 620 bp, Homo sapiens
ccctctggaacttggaggcaggttatttgcggtgttcagggcgccatattgaaatagacgcattggatttctgggctgcagtattggcatctcctcgggtggaagctcacttcagacacaggtcactgctccctggaagcatccttcgcccttcccctcgcgcagctgtgtccgtctggtgccgcgggcccagggcagccccttctaggagatgctggcgtggcgtggttctgcctaccgcaggccatggccatggctccagcccctgaacccggaggacctgagggcccagaacagccatgctttgggccttagctaatccacatcccactgaactagtccctggcagataagcttttctcagtgtttgaatttcccattcacagggtgcgctcgcagaacccagcaggagggaacaggaggtccctagaagtgagggagttccagataccccgtcctggtggatgctgctgcaagtyagtgtttgtgtgcggtgaggggtaggaagtgggtagaactcagaaatagaccacagtgcttctgcgcagaaaagcagaccacccgctggggtaccggcttctctgtcctggcggatccgggtgtggcggggacgagaatcg

SEQ ID NO: 732627 - DNA, 533 bp, Homo sapiens
aagagggccaggtagatgaggccctccacgccgtcatagcagaagccggtcagcgcttgcacgtagtcctgaggccgtgggatgagatggcaggatccagagacagggagggtggagggggcagcgtgagaccttcagcccagccacggcggcctggaccgccccccagaggcagggctgaggacccactgtctgctgagggtccccatcctcccgaacagctgctcccctgttcccaccctacaagctgccatggccctgtcccaggccctgcctctcaccagatgcaggctgcggcagtccaccagggcggtgaggtgctgcaggttcacctcygtgccattcagcacctcctggacgcggaggagggggtcctggggggcacgcaccgcagatggtcagcacttcatttggacgggggacctcgagccagcctcgccccatctgggaagcccccaggtctccctccagcccataatcttcgactgagataccccccaccctggggtctcagtgcaggtcctgaggacaag

SEQ ID NO: 732628 - DNA, 552 bp, Homo sapiens
gcgggccttaactctgtgtgtgaggggctctttgtccctgaggatttctgcagaggagtggcaggatctgacttggacattcacggggttgccctggccaccctcactgagggagaccaggtggacgtgggggcagtgagaggctgtcatcctgatctgtgggaccagcgtgttaggagtggagatgctgggaagcggtcagatcctagaaatgttgtgaaagtgttgatgttgaaaataccatttttgagacaggcagacatgggtgtgatctgttcaactggaaaaggagtcaactatcttttaggaaccatgttttgaatgtgagcaaaaagaatggtggtggcatatggtaatgacactaacatgtaatgagygtttctctctaattaaaggggatttatttttattgcccttatctctgttttctagaatgcgcattattttcatgggaaaaagagtcttagaaaagacattgcttctttctctaagtaattttactgcatgatctttattctatgaagtttactcatttgcattgggttttataga

SEQ ID NO: 732629 - DNA, 625 bp, Homo sapiens
gtcagtacaagaaggtttgggttagcgtattcagaatcataggaaattaaaaccagaatggctagcagctagagtttgcatagctgacaaatgtgtgaaactttttatagtttttattgagtatatatttttttcacatttcactataaattggcatagatattaataagcctcaaagatattttaaaatatttggtctattcattgtataccacaaaacttaagagacatttgactccattatgtatgatattttgcttattattttcaaggagactgctgtaatgctgaaaacctcaagccatgtgtaacccatgrgtggcgtggttaggagtgctaccactctttatcctattaactcaggcagccctcaaaccagcaatgcctccggtgatcaagagccagcctttcaacattttctgggcagccccaacaatgtattgtatgccttccttcaacgtggatataaatcttcaagtatttaacattatatcaaatcctttagagactcagagtgggtcaaaaattgccatattttatccaaatgaattagggtattacccttacttatctcaagatggaaaatcctttaatggaggaataccgcagaatgtgagcctttctg

SEQ ID NO: 732630 - DNA, 618 bp, Homo sapiens
atctctacaaaaggtaaaaaagaaaaaactagccaggtgtgttggtgtgtgcttgtagtcctagcttctcaggaggctacagcaggaggatgacttgaacccaggagttcaaagctgtagtgagctatgactgtgctactgcacttcagcctgggtgacagactccatctgttaaagaaaaataattaaattaaaatgaataaaagagaagtgattagagtgagtatccttgtgttatttctgatgttagagaaaaagctttcaacttttcatcattgactatgatgttagctatgggcttgtcatatgtggcctttrtatgttatggcacattctttctacacctattgttttaagagtttttactgtgaaggggtgttaaatttttaaaaagtgctttttctgcttctagtaagatgatcataggatttttatttttcattctgtttatgtggtatatcacatttattgatttgtgtgtgttgaatcatccttgcatcccaggaataaatcctacttgatcatggtgtatgatacttttaatgtgctattgaatttgggttgctattattttgttgaggatttttgcatccagtttcatcagggatattggctgat

SEQ ID NO: 732631 - DNA, 539 bp, Homo sapiens
ggttccttctcacttgggtaggctatgtcagagggatggtatagggctcaaggctgctattcagattttttgacccacggggtgttctcttgctgtagtattctcccccttttcctatggatgtggtttccagagagctgagyggtagtgattgttatctctcttctgtatctagccacctagctggtctgccaggcttcaggctggcactgagggttgtctgcacagagtcctgtgatgtaaaccatctgcaggtctctcagccatggataccagcacctgctctggtggaggtggcagcagggtggaatggactctgtgaaggtccttagttttggttgcttaatgcactatttttgtattggcctcctgccaggaggtggcactttgaagagagcatcagctgtagtagcataggggcatcaggcagtgggcagggccctagaattcccaaaagtatatgccctttgtcttcagctgccagggtgggtagggaaggaccatcaggggggcagggctaggcatgtgtgagttcagac

SEQ ID NO: 732632 - DNA, 539 bp, Homo sapiens
ggttccttctcacttgggtaggctatgtcagagggatggtatagggctcaaggctgctattcagattttttgacccacggggtgttctcttgctgtagtattctcccccttttcctatggatgtggtttccagagagctgagtggtagtgattgttatctctcttctgtatctagccacctagctggtctgccaggcttcaggctggcactgagggttgtctgcacagagtcctgtgatgtaaaccatctgcaggtctstcagccatggataccagcacctgctctggtggaggtggcagcagggtggaatggactctgtgaaggtccttagttttggttgcttaatgcactatttttgtattggcctcctgccaggaggtggcactttgaagagagcatcagctgtagtagcataggggcatcaggcagtgggcagggccctagaattcccaaaagtatatgccctttgtcttcagctgccagggtgggtagggaaggaccatcaggggggcagggctaggcatgtgtgagttcagac

SEQ ID NO: 732633 - DNA, 612 bp, Homo sapiens
actagtgaattctaccaaacatttaaggaagaaaggatatcagttgtctacaatctcttccagaaaatagaagcagaaggaatgctttctaactaatcccatgaagtcagcattatcccaatacaaaatgagataaaggcatgacaagaagaaaaactacacaccaatgtcccttatgaatatatatgcaaaaatcctcaacaaaatgctagcagatcaaattcaacaatgtgtaaaaataattatacaccatgacccaaaaggatttatcccaggtatttaaggctggtttagtattcaaaagtcaattaagataattcatcatatcaataggccaaagragaaaaatcacacaataatgtcaatagatgcagaaaaagcatttgacaaaatccaacacctattcataataaaaacttgcagtaaactaggaatagagggaaatttcctcaacttgatttttaaaaaatctacaaaaaacctatagctaacatcatacttaatgatgagaaactgaaaactttcctgctaagatcaggaacaaagcaaagagatcccctttcaccagcccttttcaatatcatactggaaattctagctaatgcaataaga

SEQ ID NO: 732634 - DNA, 595 bp, Homo sapiens
ggctgggcttatctcaagagtgccagggcttgtagatctggtggctgatgtcactctgattagcaggacctggggccatttagagagagtggcttgttgcatgtacacatctcaaatctccaacattccactatcagtatcccagcctagatgcccagggacactagccctactgagcctgtcagacaaacacagtaaccagagcaaagttgctacattaaaaacattgaggaacctctttaaatgaattacttaaaaatgggaagtgggccggacatrgtggcccacacctgtaatcccagcactttgagagtccaaggtgggtggattgcttgagctcaggagtttgcgaccagcctgggtgacatggcataaaccccatctctacaagaaatacataaacctcatggcttaaaccccatggcataaaccccgccttacaaaaaattagccaagtgtggtggcacacacctgtagtcccagctaatcaggaggctgagatgggaggatcgcttgaacccaggagacggaggttgcagtgagcagagatcgtgccattgcactccagcctgggcaacagagcaagtccttgtct

SEQ ID NO: 732635 - DNA, 596 bp, Homo sapiens
agtagagaacagcacatgacagggaacttcggtggcctcctgagggtgcagcttcaaggaactaaattgtgccaacaaccaatgaaactgactatacataatctgtaccatcatttgtggacttggactttgaagttggcccagcatagcatgaattcttagctgtgtaactcagtcattgtatatgacttgggttawtttttgaagtcttcagtgaattagtgcctgcaatggaaaaaaaaaaaaaagccaaccatattaatagcctaacagtgttgctctgaggactggagataatgtatgcaaaatgtctggcacacagtagattctccattacagttattgggagggggaatgagtggaggtcactggcctcttcaagcctctgcctttcatctggtaataacacccacacattgttgagaagattaaataagataacagaaaggaaaatccttaaggtctcaataagtgctcattgaacagtggctatccaatgctcatactaccttttctctcataaatatacatgtacatatacatattttcacatatgtatatatttatatacctataaatagagagacagagagaga

SEQ ID NO: 732636 - DNA, 634 bp, Homo sapiens
ttaactataatggcaaattattcaaacattttaactccctactaaccttctccaaatgtgaaccatttactaaatgacagatttttttttttttaggattatggcttaacttactggtctcagttatatatcttctcattttgccacaaaatgctagtaaaaactttcatttagcaagtgcttacaatatgataggtatatttccaaatattatctttactctaaacaacagctcatgtttccaaaatggcagttccagatgtcagagatttttttgactaatccatgctgtctcagcatgttttctcatatcttgaaactccttctaacttcatatattatgagaaatcatgaaaggaacctcttatctgcccagaaaatctcaccatatctttgggaaaaagaaataatatctacctcattcgtaaatgttgtgattarttggccaatgtgtaatattaataatagcaaacatctatggtgcatgctttattatgtgagatgttgtattaagtgtttcaaacatctaatttcagttttcacaacttcatacaagtattttgttatcctcactttacagatagagaaatggaaactccaaaagattaagcaagaagcccataggaacacaatt

SEQ ID NO: 732637 - DNA, 596 bp, Homo sapiens
agtagagaacagcacatgacagggaacttcggtggcctcctgagggtgcagcttcaaggaactaaattgtgccaacaaccaatgaaactgactatacataatctgtaccatcatttgtggacttggactttgaagttggcccagcatagcatgaattcttagctgtgtaactcagtcattgtatatgacttgggttattttttgaagtcttcagtgaattagtgcctgcaatggaaaaaaaaaaaaaagccaaccatattaatagcctaacagtgttgctctgaggactggagataatgtatgcaaaatgtctrgcacacagtagattctccattacagttattgggagggggaatgagtggaggtcactggcctcttcaagcctctgcctttcatctggtaataacacccacacattgttgagaagattaaataagataacagaaaggaaaatccttaaggtctcaataagtgctcattgaacagtggctatccaatgctcatactaccttttctctcataaatatacatgtacatatacatattttcacatatgtatatatttatatacctataaatagagagacagagagaga

SEQ ID NO: 732638 - DNA, 627 bp, Homo sapiens
aaatgttatgcatatgatataatgatctttagttcaaaaatacttactgtgcagatcttaatagaaaatctagagttttaccttcatggtgacatttgtcacttaactgggtgagaaagatgatatgaaagcattctcacatgggggtcatagtaaaataactgaaggagatacagatgaggccaataaaagcaaaaaatcccatatgatgaactgttcagatgtgtcagtaggaaagaataagttctttaaatacttatgtcagtattgttgctattttgtttttaatattaataaatattactmttttattttaatatttaattaatattaaatttttaaataatttttaaaaatttaaattatttaaatttaatttaaattatttaaaatatttttatttaaatatttaaattaatttaatttaaataattaaattaatttaatttaaataattaaattaatttaattatttaaaaattttaaataattaaattaatattaaattaatattaaatttaaaattaatattaaatttgttgaggctgcttttggaaatcaataacttgattttcattatcattttaaagaacataaggccatttattgatttaaggtgactcgatt

SEQ ID NO: 732639 - DNA, 633 bp, Homo sapiens
ttttggttttatttatttatttatttgccttcatcttatagttgagaagttgtagacagtcatatagctaagcaaatggtgcatcaaaatttgagcccaggtagtctgaatacaaaatctggattactctaaacttgcaagatagaatgatgaattaattcttaaatattgtgtttgcatcaagtttgattttggtttaaggatagttttcatacctagaataaaaaacatttcctcctcaagtggaacatcactccttggttttagccatctttcatcagaatggaactaaaattaaaaaaatgaagttgctctatgatatgatcgtgacaaattttaacagtaatttttttcatatttaaaacttgataaaacttttttctgactgattttgaccatttaaaaagaaagccagatgttctctcatcattcatggcagaaaaaggtttttgtttattacattattayatgaaaatttatgcttatacaattgggaaagtttcaaaaatttaaaggtttgaatatgatacattgcaataattgtgacttaaaattttgtaatgaccaggtgacaccttttatgggaaagtgagaataaattctgatccctattatgcagggaaacagaagaga

SEQ ID NO: 732640 - DNA, 670 bp, Homo sapiens
ctcctgcagtgtctatagaattcttattacagttgctcaatggggacaaaatcaggcacactgtgcagatttatggatagccgtttcaatccccatgggattgtggtgccaggcttccaatttccccagcacaagatgggatgccccctttttaggaaatcaatattatcaggaaacccctccaataaacaccgcagtcacacatgcttttcccttctcccagtcaacagtgyccctgtgggtaaagcttgtgtaacacccaggtttgatgtttccttacttacctgaagagaggaaccattattttaaataataatcaggagtagtaataataagacttaagtagtaaaaccaaacagcaaacacacgacaatattcaaaagttgtatttcaggcatagagtagcagagagaaaaatgattttttttggaaatagaatttcaaacttttgaaggggttgagaaatgctgacttacggcaactccttcctgtcatagaatataaggccactaatgtaaatgctttgggggcagctgatcagtcatcaagagactaggtgccttggtgacctactcacacctttttagtatgcacaataaaatgcagaagaaaagcggtggatccagaaagcaaagccctaaagcagggctacatagcctgccaaggaatt

SEQ ID NO: 732641 - DNA, 579 bp, Homo sapiens
ttgctcatttttaatggggttatttcttttttgtttgttaatttgttagtttcttatagattccggctactagaccatcagcagacacatagtttgcaaatattttctcccatttggtaggttgtctgtttactgtgttgatagtttattttgtaatatagaggctcttaattaggtcccacttgtcaatttatgtttctgatgcaattgcttttgccatctttattatgaatctttgccaggtcctatgaacaagatattgcctaacttatattccaatgattttatagttttaggttttacatttaagtctttgattcatctggagttgatttttgtatatgacacaaggaatgagtccagtttyaatcttctgcttatggctagccagttattacatcaccacttattaaatagggagtgttttccctgttgctttttttttgccaaatttgttgaagatcagatggttgtagatattctgctttatttctaggttctctattctgttcaattagtctgtgtgtctatttttcgacaagtaccatgctgttctggttactgtagccttgtattata

SEQ ID NO: 732642 - DNA, 590 bp, Homo sapiens
ttgaagaacaagtgaatggtatagtggtattcctattgatattcactcaaaagagtcgggctgtttgattgctgcattatgtttcatccagcaaactggaagtcttcctgcttcaacctttttctttaaaggaccaaattcccaacttgggtacgcttacaggaacacattccacatccttgtgaatatacagagaagtctgagcccctcttccctcccttgtcatttattccagttcttgctgggtgagtgtggtgtggtgggaagagagtaagtcttatggaccgtcacacttgctctacatcccttctctgctactagtgatgcctgcrtgatcttggaggctacagagtctctctgaatctctggttcctcctctgagaaaggagatgacaatatttaagtgagaaaagcatgtaaagttcccagcctgacactgacttggccctctgcccatccaggccctccctgggcagccaggcaggaagcagaacatgatgtggccatctcaggccaggctgcagttgggtctcagcctttccaccctttcccatccacctttggataacatttctgtgctccccagcgga

SEQ ID NO: 732643 - DNA, 590 bp, Homo sapiens
ttgaagaacaagtgaatggtatagtggtattcctattgatattcactcaaaagagtcgggctgtttgattgctgcattatgtttcatccagcaaactggaagtcttcctgcttcaacctttttctttaaaggaccaaattcccaacttgggtacgcttacaggaacacattccacatccttgtgaatatacagagaagtctgagcccctcttccctcccttgtcatttattccagttcttgctgggtgagtgtggtgtggtgggaagagagtaagtcttatggaccgtcacacttgctctacatcccttctctgctactagtgatgcctgcgtgatyttggaggctacagagtctctctgaatctctggttcctcctctgagaaaggagatgacaatatttaagtgagaaaagcatgtaaagttcccagcctgacactgacttggccctctgcccatccaggccctccctgggcagccaggcaggaagcagaacatgatgtggccatctcaggccaggctgcagttgggtctcagcctttccaccctttcccatccacctttggataacatttctgtgctccccagcgga

SEQ ID NO: 732644 - DNA, 475 bp, Homo sapiens
acaagctgaaagcctcatctgtagtgggaccggggaagggacctccaggatagatggggaggtgagggacaggggataagacttttttcttctatgccacagggaaacccaagggaccaagagtaagtgaaaatgcccaaggccttgttggatcgggaggaagagtccttttgtgtagggctggggcagcatgcaaggctgcgcagggcccaggttgtgcagtagttcrtgccctcgatgcctgtctccaacttcagtactgccaagatagagctgctgccatccttggctatgattttatctgctttcaggatggaatcccactgcacatccaacttggacatggccagctggtggagtgcctcagggacctggcccttctgctggtaccagtgggtgtagctgatcctggtgcggaccacgcactgcaggatgaccaagcttccctagtgccccaggacatgggccagctgct

SEQ ID NO: 732645 - DNA, 514 bp, Homo sapiens
cttgatttggtctttcaactgctttccttttcacattcgcaaggacacttggaggcaaaatacccagggccactctgagaaggcctgaacctgctttattaacagtgtaacacctaaggttcttgcctagccacgccatagaattggtgtggcggctgaccgcagcgagtgatagaaacacggaccgagagagagaaaaagctgtaggctttattgagcagagtgaaagtacaaagcttccaaagcatggagggggtccagaatgggtagccagagttagattataggattgccttttaaactcttcaaggcgggaaatacctgaggcgggaagatgttaccaaagcgagaaacaaaggcaattaaccatttgtaacrtgtcttagatcttgaggaaaaccggaattgcaacttaggttttatctactttatgaccttgcagcgtcatggcaaaggagacaggatcttacaggactttacaaagtatgtttacaaggaattggaattgggagta

SEQ ID NO: 732646 - DNA, 664 bp, Homo sapiens
taactgtgaatctggtgtaattattcttagttggctgatgagaaaactgttactcacaaaatgtaggtcacttacacctaatcattaaaagagctggaatgaaagtctagtctgcaaagctcatgcacccacccagccccacattatgtccctttcgtttcagattcctgccttgtaatgtcttgctatctgtaattcttgctattttttctattgtagaaaaaatagagracttagtaactgcacgaattctttgtttgatgtcctgatttgaaatgccagacctagctgtgtgacatgtataagggatttttatagttatttactttaaagggactgtaaaatgggagaaaatatattgtactactttataggagtattaagatgattaaactagaaaatgcagaacaagcccttctgtgtaaaaagcacttgataaacactagttcgtgttattagctactagcaaagaccaaagactaaaacaaaacaactcaagaagcaacatggtatcatgttttccccagtcattataacaaaagacagaaggccgggcacagtggctcacgcctataatcccagaagtttgggagcccgagggggcagatcacgaggtcaagaattcaagaccatcctggccagcgtggtgaaaccccatctctat

SEQ ID NO: 732647 - DNA, 468 bp, Homo sapiens
aggggaagaaaagaaattggacatatgaaaagtactttgtaggaataatccacagaaatagatagaaagttatttataaagaggcaatataatgtcaccattgtgtactctaagaaaatctctttcagtatgttaattactctcagcaaatggtygtttttattacaggagctcagatttcagtgcaattctttctgggactagaaagacagaggccaagtcacattgacagttctctcaataaaacctgaggtgagagttgaatttatctgtgatgttaaaaaaaaaaaggaagaagcaaacatgcatacaaagacaacatactttaaaacagaagaaaacacagttgcattggtgtgttggtttattatttttctagtagatgtgttcttgtctatacggatatgattctggtgcgcaattttatgcactcactgagatctttatttcatgaattctaaaaacttg

SEQ ID NO: 732648 - DNA, 624 bp, Homo sapiens
tcacaatgcattacaatcgtttagttatgatgaaaaatgcatgaaatttgtggatgaaagacatgaacagaaatgtgttctgattgatgacaatggggtttggtactatcttcagttccaggcatccactgcctgaaacatctcccgtggaaaatataggaccactgcaactcagatgaaaagttttctagagagattccaaggaaggtttgagaagtcaaaagaagtaattggtaaacatgaagatgggatcattgaaattattgaatctgaagaacagaaatttaaaaagtaaacaaagtactaaggaacctgtggtatactatcaaccggaccagcatacacatcttggatattctagaaggaaaagagagagataaaaagtcacagmatatttgaaaatttcctgaatttgatgaaggaaataaatacaaacatctaagaagctccacttgtataaagtacttatcgtagtcaaaatcataaaatagaaagtaaaaaggtggttgccaggggctgcgggaagggagaatggggagttattgtttaatgggtacggagttacagttttacaagatgaaaagaattttggagatgaatggtgttgatggttgttgcatgaca

SEQ ID NO: 732649 - DNA, 576 bp, Homo sapiens
aaggaagtcagtgaatttaacaaatattcaaagaaagtgttggtatttcaaaaaattaaaaaatgttcctaatataaggtccatatccaaatgagaattaaaagtctttcatgtctaaaatatctagaattgcatttggagatactgaaaactaaaaatataatcactgaaaaactcaatagaagactacatagcagaatgagtamaggtgaagataaaattagtgagctggacaactgactccaggagttcttccagaatacagacaaaaaggaagacagaaatacagatgacagatacaagagttccaaaaatgactgataacttacatgatgtgcttatgaatgaaaggaacatcagagttttgtcatagaaaaatgagcaacaaaaggcaaagaaatttgaactaatgattgattcccaaatttgtacaaagaaaaaatagtatgctacaagactcagaagtaaatgccatttatacaatgaaaataatgtgaacagtgaatactgtgttaagtaaaagttgtaataatatgcagacaatgttctctcacagcactacattgtgagaaagaa

SEQ ID NO: 732650 - DNA, 556 bp, Homo sapiens
tagttttccttctaacaggcccctcttctgcaggtctgctggagcttgctgggagtccactacagacactgtttgcccacgtattgccagcagaggctgcagaacagcaaagattgctacttgctccttcctctggaagcttcttcccagaggggcacctgccagatgccagccagagccctcctgtaggaggtgtatgtcgactcctgctgggaggtgtctccctgtcaggggcgtcagggacccacttgaggaggcagtctgtcccttagcagagctcaagcattgtgctgggagatccgctgctaccttcasagctggcaggtaggaacgtttaagtctgctaaggtgtgcccacagctgccccttccccctaaaagtcacctttctttaattttataagtctattttcttacacattctcttccatacctaaatttaatatttataatttttctctacacatctctcccaacctcctccaagaaaaaaaaaaaacattttggacattttaaattaatatcacctgtaaatatttatgattacatatgataaa

SEQ ID NO: 732651 - DNA, 556 bp, Homo sapiens
tagttttccttctaacaggcccctcttctgcaggtctgctggagcttgctgggagtccactacagacactgtttgcccacgtattgccagcagaggctgcagaacagcaaagattgctacttgctccttcctctggaagcttcttcccagaggggcacctgccagatgccagccagagccctcctgtaggaggtgtatgtcgactcctgctgggaggtgtctccctgtcaggggcgtcagggacccacttgaggaggcagtctgtcccttagcagagctcaagcattgtgctgggagatccgctgctaccttcacagctggcaggtaggaacgtttaagwctgctaaggtgtgcccacagctgccccttccccctaaaagtcacctttctttaattttataagtctattttcttacacattctcttccatacctaaatttaatatttataatttttctctacacatctctcccaacctcctccaagaaaaaaaaaaaacattttggacattttaaattaatatcacctgtaaatatttatgattacatatgataaa

SEQ ID NO: 732652 - DNA, 620 bp, Homo sapiens
cctacaaactaccgaaattgaaccatgaagaaacggaaaataagaaaagaccaataacaagtaaggagagtgaatcaagaataaaaagtctcccaccaaggaaaagtctaggacctgagggtttcttggctgaattctaccaaatatttaaaaaactacaagaaaataaactgtattacaaaaacattacacttacaagaaaagaaaattgcagaccaatatctttcaggaacatagatgccaaagtcctcaacaaaatactagcaaaccgaacaacaaattaaaaggataatctactatgacagatgcaaggatgattcaacatatacaaatcaacaagtgctgtacctcatattaacagaatgaaggaaaaaaccatataatctcatycagatgcaaaaaaagcacttgacaaaattcagcatcctttcatgttaaaactctcacattaggtatagaataaacttacttcaacacaataaaggccatatatgggaaacattatgccacagctaacagtatagttaatgctgaagcctttctactaagttccaaaacaagacaacatgcccacacttaccacttctattttatagaatattggaagtccctcccatagc

SEQ ID NO: 732653 - DNA, 591 bp, Homo sapiens
gttctagctttaattgcataatggtttatttcagtgaaccatggctaaataaaatttcctattaggttaattaatgtggaagcattctgagtttgtattgcatccctgtgtgttaaatttagattatgttttgcatttaatctaacttatttcagtgatctgtttctttgttgttcctttggctggagcttgaatatatgttcagagaattgatctgagttataaaactccattcaaaacagaattacccaaattcctttacattatcgcccctcagtacctgattttgagaacagcagcatcaacatggcttggaagcttgttagaaatgcaggatctcaggcctcaacccatacccagtaattagaatctgaattctaagaagatctccatgtggttagyatacacattaaaggatgagaagcactgcttcaagtactttttttggaaggatacataggatttgaggaaatttccgatgccagcataatgttgaaaggcagagaactaacctgtaatgagttatggttctgttcatctgcttgcctcctgtcagaatcagaaacagcttgacactcccttttttaacat

SEQ ID NO: 732654 - DNA, 508 bp, Homo sapiens
actgcaggagaccagggcatatttcagtccttatctcaacctcgtaagacagacactcccagagcagccgtctatagacctccccccaggaatgcattccttcgctagggtatcaattattaatatttctttctgggaaaagaattcagtgatacttctcctattcacataaccatctataggctttctacgagaaggaaaatatggctctattctgcctgaccccacaggcagttagaccttatggttatctttccttgttccctgaaaattgctgttattctgttttttttcagggtgcmctgatttcatattgttcaaacacacatgttttacaaacaatttgtacagttaacgcaatcatcacagggtcctgaggcgacatacatcctcagcttatgaagattacaggattaagagattaagacaggcataagaaattataaaagtattaatttgggtaactaataaatgtccatgaaatcttcacaatttatgttcttctgcc

SEQ ID NO: 732655 - DNA, 647 bp, Homo sapiens
tattcatatattttataatctaagtatttttaaaataatgaaaaccagtatatttgtaaggtaaaggacaccaaagatccaaaaaggcatactggatggatcaaggtattggagcaggcaagagaggatgggtggaggagacagtgccttgaaatgtggatgaaaaatttttctgaaagaagaaggggaaggaaggagggggacatttcaataaatgttttagaggagagagaagaaatttgaagattttatgatctgcatgattcctacgtgaaagggagtggggtatggctggcacagtgatgtgcatatggagggcagatgttgagggaatggataatattcataatgctggtgaaataataaatgatttgcaactgatatgataggaaatagttgctgactagatttttaatctattttttatctgagacattattatggaaatagaaatgttgtcttcccaatttstgatttgtgatagtttatttacttttctattaacataagcttttatatcttcctaccacctgtaaatatttcccagttgtagtaatttttaccaaagacttttctggaggctatggtttacctctgtgatctgtcttaaatgttttgaaaaaaatttaacctaatgtattgctgtt

SEQ ID NO: 732656 - DNA, 591 bp, Homo sapiens
gaaatagaaatgttgtcttcccaatttgtgatttgtgatagtttatttacttttctattaacataagcttttatatcttcctaccacctgtaaatatttcccagttgtagtaatttttaccaaagacttttctggaggctatggtttacctctgtgatctgtcttaaatgttttgaaaaaaatttaacctaatgtattgctgtttaatattactatctttttaatatacatgactttatttttaacatatatgactacttcctggttgttctggttattttttctcatgtaaccacctcaaaaycccctagtttaaataaacaatagtcatttttaaattttcttttatggtttcagggtcaggaattcagtaggagcttggctgggcagctctggacttgggttgcagacacatggtagctggagctcgactaatcagggctggagcagttgggactagccaaacattcctgtttctttcttcagagtcttagggctctccaagggttcttgccatgtgggctggtttggacttccttatatcatggtggttgggttccaagagtgggtggcccaagaggaccagatgga

SEQ ID NO: 732657 - DNA, 459 bp, Homo sapiens
aaaagataaaaattagagccatatttaaatgaaaggagtcattatatgtaatataaaaaatcaaatatgtgtgagaattttacagattcattgcaaaacctcatcccagaagttcaatatacttgaagctctcaaattgtttttctgttgctatctagctaagtaatcttggctgtttgttagatggtcttcgaaagaaagttattgggtcatcagcactattagatattgggctgacctagcccatcactagagtgagggtaaggggctcatttccaattctyatttacctagaaatatacttacatatctcaaggggaaaaatagactcgaggctcagtggcctgagacaggttcctatcaagcagaatttgtaaccaaattcatggagcctgaaggactctattggtgtacaaaatttgactgctaaaactgtgaaagggtaatggtttattaacg

SEQ ID NO: 732658 - DNA, 604 bp, Homo sapiens
caagtcagggtgttcaggggatccacctgaatggacttatcatttataagtgttagagactttttaagccctctcttctagctattttgaaatacacaatatattgttgttaactgtagtcaccttactctgctatctaatgacggaacttatttcttctatctaactgtatgtttgtacccattaaacaacctcatttcatttcacccctcacacacacaaacccttcccattctctggtaactgtcattctattatctacctccatgagatcaattcttttagctcccacatatgagtgagaacatataatgtttgtccttctattcttggcttattttacctaacataatgacctccagttccacatatgttgctgcagatggagaatttcattctgtttcaatggccaagtagtattcctttggttataygcaccacattttctttattcattcaaatctcggtgtacacttaggttgatttcatatctttgctattgtgaatagtgccataataaacacgggggtccaggtttcccttggatgtactgattttctttcctttcaataaatacccagtagtgggattgctggattttatg

SEQ ID NO: 732659 - DNA, 646 bp, Homo sapiens
actttttttttattttttcagatgtgagtctcgctgtcgcccaggctggagtgcagtggcgccatcttggctcactgcaagctccgcctcccgggttcatgccattctcctgcctcagcctcccaagtagctgggactacaggcacccgccaccacgcccggctaattttttgtatttttagtagagatggggtttcaccgtgttagccaggatggtgtagatctcttgaccttgtgatccgcccgccttggcctcccaatgtgctgggattacaagtgtgagccacagcrcccggcctggtactacacataattcttaaccgtcacagtgatactgaattctattaccttactgaaatcctgcattaacttcaggatttattttcttggcgatttctaggtagataaagtgtttactctttttttccccctctttttgatgtgtatttccaattaaccaaatcctggcaaaaaagcaaacttacttttaccagcacttcttgcctactccaagagattttgtaatgctttttaggatatcactgcaacttaaatatactgtctcctgggctaagatcttcgagtaacagtgttaaaaggtacacaggaatttgagtcaagcagaaagccattatgttgacactca

SEQ ID NO: 732660 - DNA, 517 bp, Homo sapiens
tatatattcagaatatgagtgttttgttggaagtatgtatcacaaatattttctcacactcttaaaggtgtcttgataggcggggcgtggtggctcacacctgtaatcccagcactttgggaggctgagatgggaggatcacttgagatcaggagtttgagaccagcctggccaacatggtgaaactctgactctattaaaaaaatacaaaaattagctgggcatggtggcacacgcctgtaatcccaactactcaggaagctgaggcggaagaatcacttgaacccaggaggcggaggctgcagcaktgagccaagatcatgccactgcactccagcatgggtgacagaatgagactgtctcaaaaaaaaaaaaaaaaaaaaaaggtgtcttgataaagagaagtttttaacatgatttatctttttctcccattatggttagtactttatatgccttaagaaatctacttataaaggtgttctgtattttcttctaaaagctttactgtttttta

SEQ ID NO: 732661 - DNA, 496 bp, Homo sapiens
tgaatcaagtcatttctgagtcaaaatctccctctgacctttactagaggttttctcttcctccctaaacaggagtcaatacatcctctgttttgattaagttaactttatttttattattttttgagacgaagtcttgctctgtcgcccaggctggagtgcaatggcgtgatctygggtcactgcaacctctgcctccagggttcaagcaattctcctgcctcagcctccagggtagctggggttacaagcaactgccaccatacccggctatttttttttttttttttttttttttgtatttttagtagagatggggcttcacgatgttggccggggtggtcttgaactcctgacatctaatgatctacccactttggtctcccaaagtgctgagattacaggtgtgagtgactacccctggccagattaagttaatttcaattgttttgcagtcgcttgtactagaaagtgctataatgcagatatttgggac

SEQ ID NO: 732662 - DNA, 567 bp, Homo sapiens
gaacagctcagtctaccacagggggcagctcctttctgcttccagggtgtcccaacaagtgttcagctcctagcaaagaggagaccctggggtgggaagctcctctttgcaggtaggttgtcccaaaatctctgcagctctcagcagagaggaggccctggagtgggtagctcctctctgcagctggtcatcctgaggtctgcccagctctagctgaacctgggcttttatgggcctctgaggggaggaagtgcacaccaattgctccattagcggccatgagcgggcccagaaaaggcaccacaagttcccattctggtctgcgggacaggcagcccagcccctagccttcaggccctatgtggcctgaaggtggggcctcaccggggactcgccctcttmcgcccaggagcctgtcttgcctcccgctgctgttcatggcgcccaggctgttcctgccaaggggcttctgcaagccagtgctgagctgccctcagcccccacttggcttcccacccatgctcataggcacccaaagtccagagggggccaaggtggcagggggct

SEQ ID NO: 732663 - DNA, 560 bp, Homo sapiens
tattaagcattagccgtctctcggtcgctggcttataaaggactcttaatttgtctcaaagtgtggcgtttttctaactcgctcaggtacaacataccgtgttagccaggatggtctcgatctcctgaccttgtgatccacccgccttggcctcccaaagtgctgggattayaggcgtgagccactgcgcccggccccgggaattatttctttttcttttcttttctttttttttttttttttgagacggaatctcactctgtcacccaggttggagtgcagtggcatgatctcggctcactgcaacctccacctcccgggttcaagtgattctcttgcctcagcctcccgagtagctgggattacagacatgtgccatcatgcccagctaatttttttatatttagtagagaccgggtttcaccatgttggccaggttggtctcgaacccctgacctcagatgatctgcccacctcggcctttcaaagcgctgggattacaggtgtgagccaccgcccccagccaaaggttacctttttaattgaaaataaataaataa

SEQ ID NO: 732664 - DNA, 586 bp, Homo sapiens
cttctattcaacattttactgaaggttctacacagggaaattaggcaggaaaaaaaataaaattggctgggcgcaatggctcacacctataatccaagcactttgagaggccgaggcgggcgaatcacttgtggtcaagagtttgagaccagcctgaccaacacagtaaaaacccgtctcaactaaaaatatcagaattagctgggctgggcgtgatggtggatgcctgtaaycccagctacgtgggaggctgacgcaggagaattgcttgaacctgggaggcagaggttgcagtaagccgagatcatgccactgcattttagtctgggtgacagagtgagactctgtctcaaaaagatatatacatacatacataaaatagaataataaaataaaattcatcttgattggaagggaagaactaaactacctctatttggagatctcatgatcttgaatgttaaaactcataagcaatttcctgtctctccctaaaaaaacttttggaactaatgaacaagttcaacaagattgcaggatataagaacaatatagaaagaatcaattgttttcctatatactgcca

SEQ ID NO: 732665 - DNA, 593 bp, Homo sapiens
acaggttgcaacacctctttggttctgcaggcaaggctgcctagcacaggacttcaggggacaatctgcaggttatggaaggtgagattaccacctagagttgagggtatgggactgtcacccctttgggccctgaaggtggggttgccattccagtgggcctgcaaatttggcccagatggcacagcatttagacaaagagaattattctccagccttaagatctaatggaatttgtttagctaaattttggatttgcttgggattcactacctctttcatctttacaatgtcttccttttggaatggtttttctattctttttcaccaagcattttggccgcacataactcttctggatttgcagattcagaactggagaaaaaattcatctcaggaagaatctgtcttgagtctcactcatacctgatttaracaatgtttaaatgagactttggacttggagttgatgctgaaataaggtaggactttgggggctgttgggctgggatgaatataactttacatgtgagaaggaaataaatgtggggggcaaagggcagaatgtatggactgaattgtatctcctttca

SEQ ID NO: 732666 - DNA, 612 bp, Homo sapiens
ctaaggagtttgagatcagcctgggcgacatagtaaaaccccatctctacccaaaatacaaaaaattagccaagtatggtggtgtgcatctgtggtcccagctactagggaggctgagatgggaggatcacctgagcctgggaggcggaaatggcaatgagcaaagatcatgccaacgcatttcagcctaggtgacagagtgagactctgtctcaaaaaaatagaaaataaaatatattgagacaagtctgtgtgtgtgtgtgtgtgtgtgtgtgtgtgtgtgtgtgygcgcgcgcgcgcatgtccaaatggacaatgatatttgcaaagaacgtagatgtgctttttctttgcattatagtaaaggacatagctaaattcaaagctgcttttaatcacaaataaaaataaaaaattatcttcagagagacaaatccaataaataattacataaaaataaaaattcaaataacattgtaattacaaagttctaacattttattgatattgcaaacatttttggtaatataaacataggaaaaatgattttaaaaaattgaattatattatggcttcatttgctgttttcattactcattaaaaccttgaaaa

SEQ ID NO: 732667 - DNA, 611 bp, Homo sapiens
ccacttaattagctgtgccactgaactataggttcctcatttgtgaaaacaaaacaatggaccagtgagctctgaggtaccctcaagaccaaaatatgtggctctatgatgatggtttcctttttttccttctttttgctactgagaacaaagtattcaaactaaggaagattatgagtagtcctacttagttggatactgagttagtagaatttgatatccaaattcttctaatattagaattcttttgagttacattaataaactctattgagtactaatagaataaacctctttattagaaattttggataatttgcaaaggaaatrgaaactatggttctgttcataacctctaaaaattaaactaggaaggaatgaacaaacagaaaaatctgtacctgtgaatatgaggaatatgagatttcactttttcttacaagcaagtcaaagtgattttttttttagctttgttaattctttcagcaaatgtttactgaatatctgccatgtgccaggagtagtgccaggcacaggactcccgctgtccttgaagagttttgtgggatgtgctgacctacaggtacatacagtgagctatggaattttta

SEQ ID NO: 732668 - DNA, 645 bp, Homo sapiens
accaacacaatcagtctacaaagagttccattatccccccgccaaattctcttgtgtccctttggaatgaactcttcctctaacctcagacttgggcaaccactgatctgatatctgtccttataaggttttttccaaaatgtcatacatatggaatcacacaatatgaaggktttttttttttttttttttttttttttttttgagacggagtctcgctctgttgcccaggctggagtgcagtgacgcgatctcggctcactgcaagctccgcctcccgggttcacgccattctcctgcctcagcctcccaagtagctgggactacaggcaccggccaccatgcccggccatttttttgtatttttagtagagacagggtttcaccgtgttagccaggatggtctccatctcctgacctcgtgatccacctgcctcggcctcccaaagtgccgggattacaggcgtgagccaccacgcctggccgccattttttttttaatcagctttttattttagaatactttgagacttacggagaagttgcaaagatagcacaaagttcccatatgccctttaccctgcttcccatattgttcacgttacatagcttgtcaaaattaagaaattaacatttctacaatac

SEQ ID NO: 732669 - DNA, 645 bp, Homo sapiens
accaacacaatcagtctacaaagagttccattatccccccgccaaattctcttgtgtccctttggaatgaactcttcctctaacctcagacttgggcaaccactgatctgatatctgtccttataaggttttttccaaaatgtcatacatatggaatcacacaatatgaaggttttttttttttttttttttttttttttttttgagacggagtctcgctctgttgcccaggctggagtgcagtgacgcgatctcggctcactgcaagctccgcctcccgggttcacgccattctcctgcctcagcctcccaagtagctgggactacaggcaccggccaccatgcccggccatttttttgtatttttagtagagacagggtttcaccgtgttagccaggatggtctccatctcctgacctcgtgatccacctgcctcggcctcccaaagtgcygggattacaggcgtgagccaccacgcctggccgccattttttttttaatcagctttttattttagaatactttgagacttacggagaagttgcaaagatagcacaaagttcccatatgccctttaccctgcttcccatattgttcacgttacatagcttgtcaaaattaagaaattaacatttctacaatac

SEQ ID NO: 732670 - DNA, 645 bp, Homo sapiens
accaacacaatcagtctacaaagagttccattatccccccgccaaattctcttgtgtccctttggaatgaactcttcctctaacctcagacttgggcaaccactgatctgatatctgtccttataaggttttttccaaaatgtcatacatatggaatcacacaatatgaaggttttttttttttttttttttttttttttttttgagacggagtctcgctctgttgcccaggctggagtgcagtgacgcgatctcggctcactgcaagctccgcctcccgggttcacgccattctcctgcctcagcctcccaagtagctgggactacaggcaccggccaccatgcccggccatttttttgtatttttagtagagacagggtttcaccgtgttagccaggatggtctccatctcctgacctcgtgatccacctgcctcggcctcccaaagtgccgggattacaggcgtgagccaccrcgcctggccgccattttttttttaatcagctttttattttagaatactttgagacttacggagaagttgcaaagatagcacaaagttcccatatgccctttaccctgcttcccatattgttcacgttacatagcttgtcaaaattaagaaattaacatttctacaatac

SEQ ID NO: 732671 - DNA, 550 bp, Homo sapiens
gtcctttttctgttttgggatctaatccagggtcccccaacttagcattaagttgctgtggctctttagtttcctcccatctgtggtttctcagtrttttcttgtttttcatgacctggacacttttgaaagatacgtatcaggtattttgtggaatgcctctcaatttgggtttgtttgatatgttctgacaccaagcttggggttatgaatttggggagagaatagcacagaggctaagtgcccgtcccactgcatcatggcaggggggcacatgatattgctgtggattatcatggtgttgtatcaatattcatatttgccactaaataatattccattgtatgcacataccacatcaattgaaggacatttgcgtgctctcagtttgggagattatgaataaagccgatacacacattcacatacaggtttttgtgtggatatccctttttctttctttcccttcagggtgaattcctacgtgtgggattgctgggttgtatggtaagcatgtgtttcactttctgtgacactgccaaactgtttc

SEQ ID NO: 732672 - DNA, 550 bp, Homo sapiens
gtcctttttctgttttgggatctaatccagggtcccccaacttagcattaagttgctgtggctctttagtttcctcccatctgtggtttctcagtgttttcttgtttttcatgacctggacacttttgaaagatacgtatcaggtattttgtggaatgcctctcaatttgggtttgtttgatatgttctgacaccaagcttggggttatgaatttggggagagaatagcacagaggctaagtgcccgtcccactgcatcatggcaggggggcacatgatattgctgtggattatcatggtgttgtatcaatattcatatttkccactaaataatattccattgtatgcacataccacatcaattgaaggacatttgcgtgctctcagtttgggagattatgaataaagccgatacacacattcacatacaggtttttgtgtggatatccctttttctttctttcccttcagggtgaattcctacgtgtgggattgctgggttgtatggtaagcatgtgtttcactttctgtgacactgccaaactgtttc

SEQ ID NO: 732673 - DNA, 550 bp, Homo sapiens
gtcctttttctgttttgggatctaatccagggtcccccaacttagcattaagttgctgtggctctttagtttcctcccatctgtggtttctcagtgttttcttgtttttcatgacctggacacttttgaaagatacgtatcaggtattttgtggaatgcctctcaatttgggtttgtttgatatgttctgacaccaagcttggggttatgaatttggggagagaatagcacagaggctaagtgcccgtcccactgcatcatggcaggggggcacatgatattgctgtggattatcatggtgttgtatcaatattcatatttgccactaaatartattccattgtatgcacataccacatcaattgaaggacatttgcgtgctctcagtttgggagattatgaataaagccgatacacacattcacatacaggtttttgtgtggatatccctttttctttctttcccttcagggtgaattcctacgtgtgggattgctgggttgtatggtaagcatgtgtttcactttctgtgacactgccaaactgtttc

SEQ ID NO: 732674 - DNA, 541 bp, Homo sapiens
tctataattatcccagaatgtttttaattcagctaaattaaaagaagtaaatatttcaggttatgtatttttgggttttatctgattttgttttaaaaataatgctttttgatggtaaaataatccatcatatatttgatggcaaaataatccataatatagaaggacatgaatagtagccactaactccctaggcctactrcttaaaaaaagtattattaacaggtttttgggggacacatattttgagaaattttctgtacctatagaaatatattgtttagacatatacacacagagatggaatcatactttatatcatattactgacttgctttttccatttgatggatcatgggcatctctccttataacatataaatccctacctcattttttttttctattttttaagttgtggtaaaatatatataacatgctagggaggcatggtagcctgtgcttgtaatctcagctactcaggaggctgaggcaagagaatcgcttgaacccgggaggtggaggttgcagtgagccgaga

SEQ ID NO: 732675 - DNA, 541 bp, Homo sapiens
tctataattatcccagaatgtttttaattcagctaaattaaaagaagtaaatatttcaggttatgtatttttgggttttatctgattttgttttaaaaataatgctttttgatggtaaaataatccatcatatatttgatggcaaaataatccataatatagaaggacatgaatagtagccactaactccctaggcctactacttaaaaaaagtattattaacaggtttttgggggacacatattttgagaaattttctgtacctatagaaatatattgtttagacatatacacacagagatggaatcatactttatatcatattactgacttgctttttccatttgakggatcatgggcatctctccttataacatataaatccctacctcattttttttttctattttttaagttgtggtaaaatatatataacatgctagggaggcatggtagcctgtgcttgtaatctcagctactcaggaggctgaggcaagagaatcgcttgaacccgggaggtggaggttgcagtgagccgaga

SEQ ID NO: 732676 - DNA, 606 bp, Homo sapiens
caagttagaaagcttctgcacagcaaacaatcaacagtgtgaagagacatcccacagaatgggagaaaatatttgcaaactacccacctaacaagggattaacaaacagaatatataaggagctcaaagaactccatattaataaacctaatagtatgatttttaaaatgggcaaaakatttgattagacatttctcaaaagaagacatagacgtggaaaacaggcatacgaaaaggtgctcagcatcattgattattagagaaatgcagatcaaaactgcaatgaggtatcatctcaccccagttaagatgacttttatccaaaagtcaggcaataacagatgctattgagaatgtggagaaatgggaaccctctgtacactgttgatggggatgtaaattagtacaaccactatggagaacagtttggaggtttctttaaaatcttgaaaatagagctaccatatgatccagcaatcctactgctgggtatatacccaaaggaaagaaaatcaggatattgaagagatatctgcactcctatgtttgttgcagcagtgttcacaatagccaagatttggaagcagcctaagtgtccgtcaacag

SEQ ID NO: 732677 - DNA, 607 bp, Homo sapiens
aaacaattttctaaaccatgaaggaccttacctgtttccatttttccatcctgtgctgcaggcccatccggaatcacacttttcacctgcagaaactcatcaggctcgtctccaccaatgatggtaaatccaaagcccatgttgctcttttttagggtggtgctgaggaatgttcccttcaactgggatgcatcccgggtgaagagtggtttttctacattggccaatataagttaaaaaagaaaaaggcatgttcaagtcaagttctcagacaagagaaagccagcccctgagcagcgacaatcccaggggtaaatgtggggggtcttatacagcaaatgcaagcaggtggtgactgcaagaggagcaaaactattagaacttcctacacaygaagagcagtcccaagcatccagggaaagatgaaaaagctgtttggtttggagacagactttttgtcaaatcagtttccactcattaagttagccttcttgtgcttaaaaaaggctgtgtcaacaggctgccagagccttctaagaaagaggacaaggagcccaaatcatccagacaacatctggatctgttcctgttgttattgtgaaagatt

SEQ ID NO: 732678 - DNA, 554 bp, Homo sapiens
ttcatgtctaaaatacctaaagcaatggcaacaaaaaccaaaattgacaaatgggatctaattaaactaaagagcttctgcacagcaaaagaaactaccatcagagtgaacaggcaacctacagaatgggagaaaattttgcaatctacccatctgacaaagggctaatatccagaacctacaaagaacttaaacaattttacaagaaaaaaatcaaacaaccccatcaagttaactcgttaatggtttcttcctttactgaggaactgcaaacaactggggttctttgacttctaaggaactgcttcccaccaacagcattttttcctaaaattttggagaatttcaggcaacaaatttgcatcagttttctagagtggaatatagattcaactttttaatttatgcaawcttagcttccttttaggctaacaagcactacttacatactatttctgtcctcaaatttatgttagatactttctgagaaatctctgaaataatttcattctgaaagaaaattgtttttggttctaacagtcatttcagtgtgg

SEQ ID NO: 732679 - DNA, 637 bp, Homo sapiens
tgcctccatagtaatccatgtcagactagtgctgcatagaaagattccttcacggccgggcgcggtggctcacgcctgtaatcccagcactttgggaggccgaggcgggcggatcacgaggtcaggagatcgagaccmtcctggctaacacggtgaaaccctgtctctactaaaaatacaaaaaattagccgggcgaggtggcgggcgcctgtagtcccagctactccggaggctgaggcaggagaatggcgtgaaccccagggggcggagcctgcagtgagccgagattgcgccactgcactccagcctgggcgacagcgagactccgtctcaaaaaaaaaaaaaaaaaaaaaaaaaaaaagaaagattccttcacttatttaatcaacaagttgaatattttccatatacctggttatgaactaagccttggggatttattaacgatcaagtcagacacaggttttgatctcaatgaacttattatagtcaggttggggaggcaggggctggcaaataagaatttccaattcagctgagggaggatcagataaaaataagcatctttcataaaaagcagattgtttcctgatgaaccaaaggctcagttcagagagacagagtagtacgaactga

SEQ ID NO: 732680 - DNA, 620 bp, Homo sapiens
cactcttccaggacattgcatgcacatttgctattcaaaatcggatctgccctcctttttgtctcaggaatatctactaagtatctatgtagacaaagaagatatgtgtgtttaaacaacacaatctttatatagattcatataaatgttctgtttcagaaatatttaattggattaagattctaacttgcttcattccaagtccctgcattaccaaacccctgattactccatgccaygaagctccaggcacaatggcctgttttccttcccctggacagaaacacagcttgtagggagggggaatagaaacagttatcattaggttgtgccctctgaacatattactctaaaggatatttttcaacaatttttaaggtagtattttgatatgacagtttttaagaaaatgatatgaaaagatgctagaggaagcagtgcgaattttatctttcaaaatacaatggtcagaccatgggtccatagagaatgttttccttgctcactcacctctcaaaaagcatcctcatattagatgccagaagatagtggaggtgcatagttgtattttaaagtagaaattttgcaactcacgaattgtgtgcctttcaagttgtcat

SEQ ID NO: 732681 - DNA, 632 bp, Homo sapiens
gggtccaaaaatcctgacatgcataccctgttaatcccgtgtgtaggacctgacaccacctagaagctcaataaatgtttgttcaatgggagaataggatcagcaaagatttctcaggggctgtatttatatctatgataaaaagtcaacaaagccaaatcctttgctaartatcttcatagtgaagtgacacagaaaagaaaacgagagagagagagaggaaaaaaaaggaaagataactcatgatggttaaaccctagatgtttaaataaaacaaatgccacttaggtaaaactgcaaagatatgtagtccagtaccatagattgcttttgatcagacttgatatggagaaagaatttcgtgcttagagaaattttaaaaaattcttatgtccattagactatttctttcaaatatcaatatcaaatattatatcaactggagttttcatcaggaaaattgaaggggaaaccgaaaatttacatggagatgttgaaaaaaatatatgaaccaaggtatttccagcaaaggaaattgttttctttctggttattttcttttgtgcatattggcaactctttctatgcctttcaatatcttctcaatatacttttttcaagaggtaaatttt

SEQ ID NO: 732682 - DNA, 540 bp, Homo sapiens
catgataaatatgtttcctgaatgaataaagaataaaatataaatgtgaaactaatctggttgtgaagtaaaagaccaagtattttctaagcagaggaaatagtgtacatgtaaagactccaaacacattagagtcttatctcaatgaagaagctgtttaaaagaaaaccacartgagtggaagagagataatgaaaagggtggaaacactgggcaaactttgaagagttttaagcagaaaaatgacataatttatttgtcccattattaggatctctctgactactgtatggaaaatgattggaattgtgttgggtggatgtaagtagaacagataggaggctgtatatggatccagcaagaaaataactggagttaaagtgggatagtgacaatggagatagagaaccaagaatattaaagggtgtttgaatgagaacatataacatttatatttaacaagtagggcagtccaatatttttattataactggctagtgctctcttttagcaaacaatgtcaattttccatttacgtga

SEQ ID NO: 732683 - DNA, 615 bp, Homo sapiens
ttataatttatacatgtgtcttcctccaaatcccagtataggatctccataatgtcaaaatcgggttctgttcataagtttttttttccagaacctactactctgatgtatggtaggtgctcaaaaattttaagtgaacatttaaatgccaatagaccagtacttcctaaaatgtgctccagggtttccaaatatatattaatagatgctcccagaaggagggattctgtggttaaataaggccagggaagtttatactaaatcctgttttagagatgccgattctcatgtgaaggactataagaagttcctaaaataaaaaactgttcaactttatttaatatttaaataaggaagatgtctttctcttttcctcttttaacatacgtattagcattcctcaaacagtctttctttatctcttaacatagtttgaattttaactcatgaggatmagcaaaacgcatattagagaaccagagaggatggcaccttctctttgatcaggatgctccatggtgataagacacaggcgctaatttctttaatgtagctttgaaacttcttagtggagaaaaattttttatcaatatggcattgctatatattgacaaa

SEQ ID NO: 732684 - DNA, 541 bp, Homo sapiens
ccgggcacggtggcacatgcctgtgatcccagcacttttggcggccaaggcgggcgaatcacctgaggtcaggagtttgagacaagcctggccaacatgaggaaaccctgtttctactaaaaatacaaaaattagccgggtgtggtggtgcatgcctgtaatcccagctacttgggaggctgaggcaggagaatctcttgaacccgggaggcggaggttgcagtgagcaactgcactccaacctgggcaacacagtgaagctccatctcaaaaaaaaaaaaaaaaaaaaakctttgtcctattctcacaataaagtttctgaatatgacctgaaggcagaaggcaggtctgtcttgattactaactacctgtaactgagctctaatgacactctcctcattctaactgtttagtttcttggttttgtggatttctatttttgttatagaattgtatttatttttctatagttcttaaaaatatttttgctgggtatgcagttctaaacaggtattttctctgggcagtttgaagcttttat

SEQ ID NO: 732685 - DNA, 565 bp, Homo sapiens
gccgtgatggttctgtcctggggattgagatggctggggaggggcctcctcctgttccgaagcatgttcctcccacccccaccaggccccataatctacctgccttttgggcagttaaaggccgagaagtgaacacagctscaaccccactgccttgtagaccttccggcagacctgtggcaggtattgaaatgcacgcatacaattaggctcaaaaagtctacacagacaggagatgggcacacgaacagaggcaacataagagtgggggaaaagtctcaaaagactcacggatgccaccaagatgaagacagctggccacgggacacccatccccttagaaggcagacagagccactgaccccagcagacaagcccaggcagggctgagcctggagcctgcaatgagaagccttacttaagtcgacagaggtcagcgtgcccagtccagacctggccttctggccttcgaagctgtggggagccctggcccagagccccctctggagcccccagacttaccccaggccctccactgagatcaagttttgggagcagacagaca

SEQ ID NO: 732686 - DNA, 614 bp, Homo sapiens
gcagatgcacttctacagactattccttggggccacacgtaggttcttgaatcccgaatggaaaggggagattgataactggtgtgtttatgttcttacaagtcttctgccttttaaaatccagtcccaggacatcaaagctctgcagaaagaactcgagcaatttgccaagctcctgaagcagaagaggatcaccctgggatatacacaggccgatgtggggctcaccctgggggttctatttggtgggttcccctctgcagattctgaccgcatctcccctctaaggagtatccctgaacctagtggggaggggcaggggcagactctaccctcacccatgaagaggagtagggagagggagaagatgcttgggctttgagctccctctgggaagaggtggtaagcttggatctcagggtcacaagggccctgcgtgctccctcaytttgcttctcttttgactggcctcccccagggaaggtattcagccaaacgaccatctgccgctttgaggctctgcagcttagcttcaagaacatgtgtaagctgcggcccttgctgcagaagtgggtggaggaagctgacaacaatgaaaatcttcaggaggtaag

SEQ ID NO: 732687 - DNA, 599 bp, Homo sapiens
atttatatttgtcataaaatgctttacagcttctttgtttacgtcagctacgttttcttttcatttactccatttgttgtattacaaagccttattctttcttttacttattaattttcccacatttgattttgaactttatattctaggattatagtgtcacctatggccattgtccggaaatcacagtatacacaagctgctgttactttcctagtgctgcacgactcccttccttgtgggcagacaataagagatctcttcttagtatgttagtggaggtgagtcttttccttttaactagaggcaaactcccaggaatatgttcagtgaaaacctttatcaaaacattgtcttttaccaaaaatgtatattatttattttaaatttatatasaaagaagagttttggtcattttatgtttcctaaatagatgccatttattcacatctctggaatctgctataatttaggtaatttgaccttgcaagatgctgcaagttctttaatttgaatatcacagagttactggagtcagtataccatggtgggaaggaaatcactcaaggcattggaagattgggttctaatgcttcagg

SEQ ID NO: 732688 - DNA, 654 bp, Homo sapiens
atttaatttctaataatctttatgttttctttaaggatggtggtgtattgctctttttcagctttatttttaagagtacagtcaggaaaccaacaaggggcctaagagtggctgcccctgcttgggacattacagcaagtgaaacaaagttaatgtgacaagctttgctttgttatcattggtcttcactagaggataccttttacatgtacttctctcttggatcaaatatgtctttaactgtacatctcagtggctggaggccatgccttttaagcatgtgtaaaatttttaaagaaatgaacatacacatagttattttagtaatatttcctgaaagaaaaaccaaattctgctataagtcttgatcttcaatgaacttttaaataatgcatttagctggaaaacaagactttcccagcttgtrttacctagaagcgtgaatgtataggatacctgactactaagactatattctcagccctgccctgtcttttatttgcgggtctaatctaatattagaatatattaaccgcttaaggcattgaagccatatgggatggggaatgcatttcttcagtgtttctccgagagactttccatttccttggagttatggcggcaagtaagtatcatagtattaagaaatttgcc

SEQ ID NO: 732689 - DNA, 553 bp, Homo sapiens
tgtctttatggtagaatgatttatattcctctgggtatatatccaataatgggattgctgggtcaaatggtagttctgcttttagctctttgaggaatcatgatactgctttccacaatggtagaactaacttatggaactaccaagagtgtataagtgttcctttttctctacaacctcaccagcatttgttattttttgattttctaatagccattcggactggtgtgagatggtagctcactgtggttttgaattgcatttcttatgatcagtgatattgagctgtttttcayatgtttgttggccacatgtatgtcttcttttgagaagtgtctgttcatgttctttgcccactttttattgtggttgtttttctcttgtaaatttgttaaagcttcttatagatggtggatattagatctgtgtcagatgcatagtttgcaaaaattattctctcattctgtaggctgtctgtttactctgttaatagtttattttgctgtgcagaagtttttaagtttaattggatcccacttgtcaatttttgctt

SEQ ID NO: 732690 - DNA, 516 bp, Homo sapiens
actgaaagaaggtagaacaattgttcaaactgagatcagaaatacagaccaaaagaaaacttagatctcatgtgatttaaagctgtagtttagaatgtttacaatctcagctttaaagccaagaattctgtggaaatgggcaatataaagtgtctctagtgttgagatggatacagaaaatgtaaacgtttttaagtatgagtttgctgccagtttgccaggatggctaaatctagaaaaacctgaaactagtgtgattggatttgggaaaaggcaagtattgctaaggcaacaaggagtgtactctcttaaatgagaaatcaaggtgtattctcactggaggtttgcctttgatgtatgaatgttacataccakcaaccagtttgctcatagcggttgataatttaaggtgatttgcagaatgcaccttgctgtatcatgcaaatgacacgaccttctctgcctgggctgcaatggagtcaggctggtggaactgaaacaaatgcctgatattca

SEQ ID NO: 732691 - DNA, 621 bp, Homo sapiens
tgtcttccttttattggaaaccaatatgttcattaggcaccactgacagttttatggttaacttattcccaacatatgatgaacgtattattcccaacatatggtgaaccatagtgatggtaccactgtatactaccacctttcaccagatactgtcatataccatggggtactgtcctatcatatcaggcatcattgtcttttctgttggtcagcasccttttgcacccaaattgggtaatttaaaggcaaaatagatagagcacacatctgctgatgtgttatagcagtgttgtgttttgttcatccatccaatcaacatttagagaagcttctagtaggtgataaagagacaatggttaacttaaacagacagtccttgttcttatgaggctttctaataggggagtggcacacaacagagatgagtggcttgacccagcaaggagcatgttgaatttgagtggggttggattgtgcagagctttatcctcaaagcattgggaagtcattaagtattaaggaaataaggatcaaattttcctttgtaaaatgtcctgcttggttgcactggggaaaacaaagtaggtgtggggaaagcagttataaacctcttgcctc

SEQ ID NO: 732692 - DNA, 621 bp, Homo sapiens
tgtcttccttttattggaaaccaatatgttcattaggcaccactgacagttttatggttaacttattcccaacatatgatgaacgtattattcccaacatatggtgaaccatagtgatggtaccactgtatactaccacctttcaccagatactgtcatataccatggggtactgtcctatcatatcaggcatcattgtcttttctgttggtcagcagccttttgcacccaaattgggtaatttaaaggcaaaatagatasagcacacatctgctgatgtgttatagcagtgttgtgttttgttcatccatccaatcaacatttagagaagcttctagtaggtgataaagagacaatggttaacttaaacagacagtccttgttcttatgaggctttctaataggggagtggcacacaacagagatgagtggcttgacccagcaaggagcatgttgaatttgagtggggttggattgtgcagagctttatcctcaaagcattgggaagtcattaagtattaaggaaataaggatcaaattttcctttgtaaaatgtcctgcttggttgcactggggaaaacaaagtaggtgtggggaaagcagttataaacctcttgcctc

SEQ ID NO: 732693 - DNA, 604 bp, Homo sapiens
aagccaaattatgaatgaactcccattcacaattgctacaaagagaataaaatacttaggaatccaacttacaagggatgtgaagaacctcttcaaggagaactacacaccactgctcaaggaaataagagaagacacaaacgaatggaaaaacattccatactcatggatagaaagaatcaacatggtgaaaatggccaaactgcccaaagtaatttatagattcaatgctatccccattaagctaccactgactttcttcacagaactagaaaaaactactttaaatttcatatggaaccaaaaaagagcccatgtagccaagacaatcctaagccaaaagaacaaagctggaggcatcacgctacctgacttyaaactatactacaaggctatagtaactgaaacagcatggtactggtaccaaaacagagatctagaccaatggaacagaacagtggcctcagaaataatgccacacatctacaaccatctgatctttgacaaacctggcaaaaacaagaaatggggaaaggattccctatagttgggaaaactagctagccatatgcagaaaactgaaactggaccccttctttacacc

SEQ ID NO: 732694 - DNA, 522 bp, Homo sapiens
ttgtctttgctatggtttgaatggttggcccctccaaaactcatgttgaaataaaactaacattttaacagtattaagaggtgggacatttaagaggtgattaggccatgaggactccattctcatgaatgaattaatgctgttatctccagagtgggtttattatgaaagggtaatttgggccccttttstctccctctcttgcccttctaccttctagcatagaatgatgcagcaagaaggcccttgcaagacgccagccacttgattttgaaattcccagtcagaactgtaagaaataaatttctgttctttattaattacccagtctcaggtattctgttgtaccagcacaaaatggactaagacagtcataatgatttatcctatttatatgttgctgaattctatttgataatatttggtttgaattttttcatttattgaaataaatgatatttttctatattttttcttgattttattgttttcatccatcagaatcaggattatgttcatctc

SEQ ID NO: 732695 - DNA, 618 bp, Homo sapiens
gctggattgttgccctcaggctgccaggcagcatcctccacgtgggccctctgagaagaacactctaggggtgatgtgcctttctctttttttacttttttttttttttttttttgagatggagtctcgctgtctcccaggctggagttcagcggckcgatctcggctcactgcaggctccgcccccggcgttcacgccattctcctgcctcagcctcccgagtagctgggactagaggtgcccgccacctcgcccggctaattttttgtatttttagtagagacggggtttcaccgtgttagccagaattgtctcgatctcctgacttcgtgatccgccctcctcggcctcccaaagtgctgggattacaggcgtgagccaccgcgcccggccggtgatgtgcctttctataggaactggcaacccagggactctcccactatggctcccccaccagagcccctgcctgaaggatgccgttgcccaccctggggtagacagtgacctagagggaggccacacactggaggatcttccttagcagaggtcagctatgccacacaccactctgagactcagtttcttcatcttcaaaatgaaataaaatcattggatcc

SEQ ID NO: 732696 - DNA, 573 bp, Homo sapiens
gcctatggaggagactggtgtgtgagtcaatggactgagtgaggaagatctgccctcatgtggtcagcaccatccaatctgctgggggctggaatagaacaaaaaaagagggtataggatttctcctttctctcctagagctggggattctctgctccttctgcccttagatatcataattccagactctatggccttgggactccaggacttacactggtggtccctcaggttctcgggcctttagccttgggactccaggatttataccagcggcccctcacgttcttgggcctttggctttggactgagaatcacaccttggttttgaggcctttagacttggactgagcaacactactggcttccctggttctccagcttacagatggtccaacatgggacttctcagcctcygtgatcacatgagccagttctcctaataaatcctctttcctatatctgtatgtatatcctattagctctgtctctctggagaccctaaaacaataagtaataccaagtgctggtgaatatgagaaaaaatagggatcctgaagctatcagttagag

SEQ ID NO: 732697 - DNA, 612 bp, Homo sapiens
ggggggggggtgggggaggcatagatattgggatatagttaacaatccctatcaaaagcatagtaaccctatgaagtaactcctattaccccattttagagattgagagaccaaggctcagactagttaagtaactcacccaacgtcattctaagtgaatggcagacttgaaaaaccctttccactacattatgctcactccctccaggaagtaaagttcatctgcagttccctcggagacactgcgagagagarggtaggctgggagcagagggtggaggtaagggaagccacactgtagctgagcccacagactcaccccttgtggcatttaggatgatagatatgaggggacatggagttgctgagtggctggagtgcagtgccgtaggctcatcactggcccgtgaaagtcacttattaaatgatcagaaacgttgtgaaccagtggttaaacacagccattgtaaaattaaatttcataaacttacaattaaataaattatattaaaaacaaaggtaataaatacccaaactcatcacttcttaattattttactgcgtcttactgtcttctatgctcttaagggtctggtatctattgtgtcttga

SEQ ID NO: 732698 - DNA, 642 bp, Homo sapiens
tttctaaaatattattagtccaatgcaggaatcactagctttgtttttagataccttttgctattctcttttataatgtttttaaagtgttgattcccttctgaatccctgaagccccctatttctttagagcagttcacaattgcaaatgaaactcttgccaactgaccttatcagtagagagctatgaagggtcaggattctaagacttagggtttaatgaccaaggtctagcctgcagagttccatgtcacatcttcagagaataaataccacaagacagacacagacataatacatrcctgataaaaaacaaaggaagttcaactcccacaaatagccctgttgacttgtaccagaaaagcatctacttccttctcctttcaccataaatgcaaataggtgtttgtcactaagagtaggacacaataaaagaaagtaacaccagagggtgcggtggctcatgcctgtaatcccaacactttgggaggccaaggcaggcggatctcctgaggtcaagagtttgagaccagcctggccaacatggtgaaaccctgtctctactaaaaatacaaaaattagccagtgtggtggcgggctcctgtaatcccaactactcgggaggctgaggcaggagaattg

SEQ ID NO: 732699 - DNA, 642 bp, Homo sapiens
tttctaaaatattattagtccaatgcaggaatcactagctttgtttttagataccttttgctattctcttttataatgtttttaaagtgttgattcccttctgaatccctgaagccccctatttctttagagcagttcacaattgcaaatgaaactcttgccaactgaccttatcagtagagagctatgaagggtcaggattctaagacttagggtttaatgaccaaggtctagcctgcagagttccatgtcacatcttcagagaataaataccacaagacagacacagacataatacatgcctgataaaaaacaaaggaagttcaactcccacaaatagccctgttgacttgtaccagaaaagcatctacttccttctcctttcaccataaatgcaaataggtgtttgtcactaagagtaggacacaataaaagaaagtaacaccagmgggtgcggtggctcatgcctgtaatcccaacactttgggaggccaaggcaggcggatctcctgaggtcaagagtttgagaccagcctggccaacatggtgaaaccctgtctctactaaaaatacaaaaattagccagtgtggtggcgggctcctgtaatcccaactactcgggaggctgaggcaggagaattg

SEQ ID NO: 732700 - DNA, 601 bp, Homo sapiens
ggcggccgggcgcggtggctcacgcctatcatctcagcactgtgggaggctgaggcgggcggatcacgaggtcaggagatcgagatcatcctggctaacacagtgaaaccctgtctctactaaaaatacaaaaaattagccaggcgtggtggcgggcgcctgtagtcccagctactagggaggctgaggcaggagaatggcgtgaacccgggaggcagagcttgcagtgagctgagatcacaccgctgcactccagcctgggcgacagagcgagactccgtctcaraaaaaaaaaaaaaaaaaagattagctgagcgtggtggcaggtgcctgtaatcccagctactcaggaggctgaggcaggagaatcgcctgaacccaggaagcggaggttgcagtgagctgagactgcgccactgcactccagcctggtgagagtgagactccgtctaaaaaaaaaaagattagctgggcatgatggcgggtgtggggaaaagagagatcagattgttactgtgtctatgtagaaagaagtagacataggagactccattttgttctgtactaagaaaaattcttctgccttgagatgctgttaatc

SEQ ID NO: 732701 - DNA, 534 bp, Homo sapiens
tagtagagttttgtttgtttgtttttagtagagacggggtttcactgtgttaaccaggatggtctcgatctcctgaccttgtgatccacccgccttggcctcccaaagtgctgggattacaggcgtgagccaccacaccyagccaatttttttgtatttttagtagagatggggttttgccatgttggccaggctggtcttgaactcctgacctcaggtgatccgcccgcctcagccttccaaagtgctgagattacaggtgtgagccaccgcgcctggcctcttttctctcctttttatatggctggcaggataatggcccccacaaaggtgaccacaccttaatccctgccaggtgtgcatgttaccttacttggcaaaaagaactttgcagatgtgattaaggactttgagatggggagagtatcctgaattatccaagtgggctcaatctaatcctatggatccttaaagtcagataatctttcctggctgtggtcagagggaactgggacaaagggttagagagacatg

SEQ ID NO: 732702 - DNA, 534 bp, Homo sapiens
tagtagagttttgtttgtttgtttttagtagagacggggtttcactgtgttaaccaggatggtctcgatctcctgaccttgtgatccacccgccttggcctcccaaagtgctgggattacaggcgtgagccaccacacccagccaatttttttgtatttttagtagagatggggttttgccatgttggccaggctggtcttgaactcctgacctcaggtgatccgcccgcctcrgccttccaaagtgctgagattacaggtgtgagccaccgcgcctggcctcttttctctcctttttatatggctggcaggataatggcccccacaaaggtgaccacaccttaatccctgccaggtgtgcatgttaccttacttggcaaaaagaactttgcagatgtgattaaggactttgagatggggagagtatcctgaattatccaagtgggctcaatctaatcctatggatccttaaagtcagataatctttcctggctgtggtcagagggaactgggacaaagggttagagagacatg

SEQ ID NO: 732703 - DNA, 629 bp, Homo sapiens
aaagaaaatgaactgtagtggcaagcatgatacatacacgattgcactccacgactgtcaaaattcagcagggagaatcattgtcccttggtaattatgcgcatccattagcatggcatccattctttgtcagaagcgtttggtgacagtctctccagagaagcacacagctcgcgtggcctgcagttagatggccaggacgcacctcccccagggaaatgctgctgctaacaccatattaaagacaaagtttgttgggttttgtttttttaatctcagatgccagtgcagggcacaagatgtttattataattttatagacacctctaacaaaagcttcactcaggaaggaaaattaaacgttaaggtttcrgggatggtggggtggggtggtaagctgcagaaggttggaaaagagaggggaagtggggcaagccatagacatagcttcattcccaagctggcaattcttacacttaatatgttttgtcaggcaagtcttcaatacagattaaaatgaaatgccaagtaatttccacctctcggccgctcatgtctgtgaacaatggagagtgttttgatgaatgtcagttaatggcacttacgctcttgtagatttcatcctcgca

SEQ ID NO: 732704 - DNA, 541 bp, Homo sapiens
agaagcagggtgtatatgtgtgtgtgtgtgtaattgactttgtgaccatgaaactgagttaatactcttctgtctttgcctgtttcttcttgtacatcacctagaggaatacccattaatgtttagaggcagagaacaatagaaaatagcactgttcaaggaccaaaaatttaaaaagactgctgacatacagcatagaatgtgaaagtccctgataatcttatccctagggataaccacttgccattttttkacaatttcaattttttatgattataaaagtcatacacatttaaaaatacttcaaaataaatacaaaataaaaataaatgcttcattgcttaggttaccttggtacatgcaaggtctgagaccacatccatcaatgcagtttgctgcgtggattaccagatctctccaacattgacctcaattttttactctgagagcaaacagaatgggcaagggctgacctgaaatccttttgaaacacaagctggatcctagggctttgacctccactgctcactgccacatggga

SEQ ID NO: 732705 - DNA, 541 bp, Homo sapiens
agaagcagggtgtatatgtgtgtgtgtgtgtaattgactttgtgaccatgaaactgagttaatactcttctgtctttgcctgtttcttcttgtacatcacctagaggaatacccattaatgtttagaggcagagaacaatagaaaatagcactgttcaaggaccaaaaatttaaaaagactgctgacatacagcatagaatgtgaaagtccctgataatcttatccctagggataaccacttgccatttttttacaatttcaattttttatgattataaaagtcatacacatttaaaaatacttcaaaataaatacaaaataaaaataaatgcttcattgcttaggttaccttggtacatgcaaggtctgagaccacatccatcaatgcagtttgctgcgtggatkaccagatctctccaacattgacctcaattttttactctgagagcaaacagaatgggcaagggctgacctgaaatccttttgaaacacaagctggatcctagggctttgacctccactgctcactgccacatggga

SEQ ID NO: 732706 - DNA, 638 bp, Homo sapiens
gagtgacagactactccagaagctaagcctcttactatctgttacccaaatcagtaagacatggtggcattaccagtgttatgcaaatgtcttttttttttttttttttttttttgagacagggtccgattctgtcacccaggctggagtgcagtggctcaatctcagctcactgcaacctctgcctcccaggttcaagcgattcttctgcctcagcctctcgagtggctgggattacaggcactcaccaccatgsctgtctaatttttatattttttgtagagacagggatttaccatgttggccaggctggtgtcaaactcctgacctcaagtgatccacccacctcagtctcccaaagtgctgggattacaggcatgagccaccactcctggcccgaatgtcttcttattaaagcaggaggttcacattcctgcagaatctgcagccttattgttgtgtgaccacaggtaatgggagacagcttgcatcctctggccctaagagtcctctttgattctttcaagagggccagttgaataaataagttcagcatagacagatcagtcactctgaactttacattacctgctttagggtttaggttcttcagatcacccactagggttcgaaactga

SEQ ID NO: 732707 - DNA, 657 bp, Homo sapiens
tcagaatggtggttacccctggactaggaggattgcctggaaaggggcatgaaggaacattctcacatgatagaaatgttctgtgtcttggtgtatgcatatgtgagaattcatcaagcttaagatttgtaaattttactgtatgtgacttatacctcaattttaaaaacacaaactagtgtgttcgtatatgtatacacacacacacacacacacacacacaccatatatacacgtatatatacatattaaagtttccaagacgaactcaagaaattattcttttgcctacttttcttttactctctaataaaatttgtttgttttaagaaatggggtcttgctatgctgctcaggctggactcaaactcctggggtcctgagtagctgggaccacaggtgcacccagcacgacaaagttttcttttttgttttcctcaaaatcaatctcctttccttctctctaaattttaawtttattaatatctttctataatttgcaaaaatgaattttaagctgtttgtattttctaaatggcagacacaccagggattgtatatttctactctcaaaacagcagggaatgagcctgttctgcctagacacactgtacaaccctcctctctctcagatcttgctgccttctcaggatccaa

SEQ ID NO: 732708 - DNA, 604 bp, Homo sapiens
ctggacaaacttcctgttgaaagattttgctttgtttgttccccctaaagcagagccagagacaaagctagcaaacagataatttacttgggaaatgatcccaaggagtaggaatgagagacatggggagtgaaacagagaaggtgagaaagccagtataaagatacattattaagtaggcaccactatgggtggtgattgatgctcagtgatgtcaggtgatctaaagagctttgtgaaatgcatctaagaattatccttctgggaacatgaaaggggaacacttatccattagctcctgtttccccatcratgttaactcctgggtacttccaggttgtacatgcataagtgctgagtgggctctcccagcatctcaccatggcattagagtgaccctggagcaggaggagagaaaccaaggaaagatactctcaggttgcacctgtataaaagtgattgagacctgtgtagaactgttgctgcagaagtgattggagtaggaaatacggctgagatttgaagtggaacataaaagttgtcagatatggacctactgtgtctctttgtggcctcgttgtgaagcagtgctcagtgcagtaat

SEQ ID NO: 732709 - DNA, 605 bp, Homo sapiens
attcaatcaagcccttgagttctgagtcatccaagagaagatgttctgtaaaaaagtgacttgtgattcagagttcaggagaaagggctcaattaaaataataactttaagaagggtgtccagaacctgtggaaaaatgaagcccctttgtaggcatttattctgttaaagagtagtattttagagaaaaacatatctgaaagatatcgtgtttgtaggcaggaccctggagagatgatgtaaccagtaagaggtggtgttaggacttatttttccattagtagtaataggttatagagagctagagacatgcttgtccatgcttctttatggctaatatgacagaatttgtcttgtgatcacaatttgggtgtagttggtggctaaaaaagattttctctgcatgaagctaactgacccacctgggcttaagctcagtcttagctttattaggtycactctccaagcacctgagcaatctcctggcctaaggctgcataatatgccagtcattttcaatgagatgaggtatctgaagattaggagcaatgggaaattactttgatttttctgaaagctcatcatgattaggtgattcctaagaa

SEQ ID NO: 732710 - DNA, 609 bp, Homo sapiens
tggggttaatgtaaggattaaatgagttattgcatgtcaaggactcagcccaatgcccagtaaagagttagcatataaaaaacatttgctgatactagtttcatcatcttatctttattattatcaacctcagatcatcatcatcattattattcacataaatatcttgggctgtaagtaagtatctgcccatgcatctttctgaattcttcagcccttagtggaaatttcttcagaccagaaaatctcaggaaataattcagtgccatccactctcatcctccaacactggtaaagacgggttttgaaggcttctagtgcccagttaacagctctgactttgcaggtcccccacactatgatcagataaataaactagtagccaagtaagacacttgcatttgagacataaagagacaaaaggaattttctactgatgagacttaacccagggcttttccaccctrcacaggttactattagctcagccctagttcttttctgaaaccacctcctcctggaagatgcaaaccttcagacctggaagctcaggtctaagccatcccattccagggccaatccactccagagattgtcaaggcggcagaa

SEQ ID NO: 732711 - DNA, 608 bp, Homo sapiens
cctcatcaaagcaactacttgcagcagagaggcagagggaaatctttggacaataataaagaggtgttccggctgggcgtggtggctcacgtctgtaatcccagcactttaagaggccaaggcaggtggatcacgaggttaggagatcgagaccatcctggctaacacgatgaaaccccgtctctactaaaaattaaaaaaaaaaaaattagctgggcgtggtggcgggcgcctgtagtytaagctacttgggaggctgagggaggagaatggcgtgaacccaggaggcagagcttgcagtgagctgagatagcaccatggcactccagcctgggcaacagagcgagactccgtctcaaattaaaaaaaaaaaaaaaaaaaaaaaaaagaggtgttccaggacagtggtgaagcaacaggcctagaccatactggagcagtgggacagagtggccccagaagtcaagatgaaggtgagagagagcctggtgcatttgcatgtaggaggagattgacatttctggtgggaagtttactgaactccactctccatttgggtatcagtgataggtatatagaaaactcaacaaggaaaaagaagatgttca

SEQ ID NO: 732712 - DNA, 608 bp, Homo sapiens
cctcatcaaagcaactacttgcagcagagaggcagagggaaatctttggacaataataaagaggtgttccggctgggcgtggtggctcacgtctgtaatcccagcactttaagaggccaaggcaggtggatcacgaggttaggagatcgagaccatcctggctaacacgatgaaaccccgtctctactaaaaattaaaaaaaaaaaaattagctgggcgtggtggcgggcgcctgtagtctaagctacttgggaggctgagggaggagaatggcgtgaacccrggaggcagagcttgcagtgagctgagatagcaccatggcactccagcctgggcaacagagcgagactccgtctcaaattaaaaaaaaaaaaaaaaaaaaaaaaaagaggtgttccaggacagtggtgaagcaacaggcctagaccatactggagcagtgggacagagtggccccagaagtcaagatgaaggtgagagagagcctggtgcatttgcatgtaggaggagattgacatttctggtgggaagtttactgaactccactctccatttgggtatcagtgataggtatatagaaaactcaacaaggaaaaagaagatgttca

SEQ ID NO: 732713 - DNA, 587 bp, Homo sapiens
agtacaagaaaggaaacacaaatacaacactggacattatgtcgctcgaggaggaatactattgacaccatcataataaagtaggatgaacactgaactaataaatatgtcatttatattacagttggttgagatgggtatgtgtctatattgtggagagtaacggtgggcagtgtaagaaagctaaatccttatcttccatagttggaagtcaattttcctaagacttaaaaaataaaaattaaaaagcartgttagtatgttacaggtctagcatccctaatcccaaaatccaaaatccaaaatgctccaaagtctgaaacttgttgagtgccaacatgaaatagtgacacctttgctttctgggggttcgatgtacacaaactttgtttcatgcacagagttatttaaaaattaccttcaggctatgtgtacaaagtgtatatgaaacataaatgaattttggtttagacttgggtaccaaccccaagataactcattatgtatatgcaaatattccaaaaaaaaaaaaaaaactctaaaattcgaaacatgtctggtccaggtatgtgagataaaggatccgc

SEQ ID NO: 732714 - DNA, 595 bp, Homo sapiens
attaaacctcttttcttataaattatccactctcaggtatttccttatagcaacgtgagaatggcctaacgtaactattgtttcgcttttcaaactgtgtgcatatattactttaataaaaagtaaagaatttttggccaggcgcagtggctcacgcctgtagtcccagcactttgggaggccgaggcaggcagatcacaaggtcaggagatygagaccatcctggctaacacggtgaaaccctgtctctactaaaaatacaaaaaattagccgggcgtggtggcgggtgcctgtagtcccagctacacgggaggctgaggcaggagaatggtgtgaacccgggaggcggagcttgcagtgagccgagatcgcgccactgcactccagcctgggcgacagagtgagactccgtctcaaaaaaaaaaaaagtaaagaatttttaaaaacatgatcactgttttgccctccacccaaatcatatttcattccaatgacaaaatgaagtgactattgaattatctactattttgtattattaatgcctagaagtcatcctcttcctccctttctgtctatcccaccacctccaattga

SEQ ID NO: 732715 - DNA, 633 bp, Homo sapiens
gtctccccaaatgagaaagctatgccatgtggggggttttctacctttattgttggccttactttaaatactgaaacctaagcttgtctgaaatattcagcagcccacttccctctcacacagaatagatttccatagggtgagaattcaagagaaactttttaattgtacagcaaagtgtttactttgccaccaacctgccctatagcttaagcatatggctaccttttctatcaacagctgggcttctgtaggtttggcactcggtataccatcccagcgcagtcaaaaacctgcaggtgaccattaayctttgagacagacaatagagggaacatgataacaatttgatctaattttctaagctccatcactgtatgcacttaaattatcaaaatcacaaaacaaaaacaaacacctatgtacctgaactgctttattttacccaagtagaaatgctttcataattacaatttaatatgcaatcagccttatttgaacatcaatataaaatatagttttgtgagataaagattctacatctgttgtaaaagcactattaaaatatgaaaataaattatattgtcataaaaatcatatattaaattgctctgagagcttggtataagaaaa

SEQ ID NO: 732716 - DNA, 570 bp, Homo sapiens
taggaaaataagatatccatgttctttcttttaatcgagttagccagaatgggtgtaactcgagtttctagggtgattgcctcactgctagttctaggacaggatgggggaaaggggtgggagaagcaggacagattttcagaagaagctgggccagaatgtcaggtaacaggcagccacatgctaagtgcagaatgaagattccccacctcagggtcctttgaaaggctgtgagtacctctccaccggtgggcagctgccgagctccagaggcctgtgttcygtggctctctttcagccaggaacagggtccccaccattctctgggctgggtaacgggggggcagcagaagttagatgttcaacctgtgaagtgactgccaggtgggaagatcataggggcatcaggaaatatctgaaaggggtagaccaggagggaaggcctaggaaaggttattatgaactgagtgttcccacatccacaacaatgcctgaaaagactggaccgtcagagagatttgcaaagtgctgttaccgacagagaaaaaaataaggaaaggtgccaggagc

SEQ ID NO: 732717 - DNA, 628 bp, Homo sapiens
gtaagggtctgaagatatttattaattcaacaaatatttgcccagccccagctatgggccagatggtgcccttgcactggaatggagacatataaggtcccaggtctcatggagctcatattctggtgggagatacagacaataaacatatacgtcatacattatagtgttagataaagaaaattaagaatcaggcacagcaagtgacaaatataggtttgcagataagaagggcctctctgcagaagtaacatttgaacaaaaaacatcaagaagagagagcaaggaacaggaagatgaaaggatgggtgtaagagcaaaggtcccaaggcaaggacagactcagcatattcaggaaacaagagagccagtatggccagaaagaagtcactgagaaagaatgtcatcaaaggtaggtcagaaaggcaggcagagcccagatcatgcagggcctctaaggctatggtaagaatagttcatttcattctgagtacaatgggaacctactggaggatatgcatcartatagcaatatgatttgcatttcttggagattattctggctactagaaacaagacacaaggttggaggttactaagtagcataagcaatgttggcttagatgag

SEQ ID NO: 732718 - DNA, 628 bp, Homo sapiens
gtaagggtctgaagatatttattaattcaacaaatatttgcccagccccagctatgggccagatggtgcccttgcactggaatggagacatataaggtcccaggtctcatggagctcatattctggtgggagatacagacaataaacatatacgtcatacattatagtgttagataaagaaaattaagaatcaggcacagcaagtgacaaatataggtttgcagataagaagggcctctctgcagaagtaacatttgaacaaaaaacatcaagaagagagagcaaggaacaggaagatgaaaggatgggtgtaagagcaaaggtcccaaggcaaggacagactcagcatattcaggaaacaagagagccagtatggccagaaagaagtcactgagaaagaatgtcatcaaaggtaggtcagaaaggcaggcagagcccagatcatgcagggcctctaaggctatggtaagaatagttcatttcattctgagtacaatgggaacctactggaggatatgcatcaatatagcaatatgatttgcatttcttgragattattctggctactagaaacaagacacaaggttggaggttactaagtagcataagcaatgttggcttagatgag

SEQ ID NO: 732719 - DNA, 601 bp, Homo sapiens
tgacaaatataggtttgcagataagaagggcctctctgcagaagtaacatttgaacaaaaaacatcaagaagagagagcaaggaacaggaagatgaaaggatgggtgtaagagcaaaggtcccaaggcaaggacagactcagcatattcaggaaacaagagagccagtatggccagaaagaagtcactgagaaagaatgtcatcaaaggtaggtcagaaaggcaggcagagcccagatcatgcagggcctctaaggctatggtaagaatagttcatttcattctgagtacaatgggaacctactggaggatatgcatcaatatagcaatatgatttgcatttcttggagattattctggctactagaaacaagacacaaggttggagrttactaagtagcataagcaatgttggcttagatgagggagactgtggtgagcttgtaaggagtttttggaagagaattacattttgaaatagagatggcagaatttgggatgtgaggaaagaaaagttttaggactgtctcctaggcttgtggccttaataaccagataaatggtaatatcatttactgcaggagtgtcccaaacagtttcgc

SEQ ID NO: 732720 - DNA, 690 bp, Homo sapiens
gtctgagaacacaaagtagcagcatgtaggatggacaagtatagaggtctaattacacgaggaccgtaggtaataaaattgtgctgtatgagggatttctgctacatgagtagattttagctgctcttgacacaaaaaacgggttggagtaactcagtgagatgacagatatgctaatttgcttcactatagtaaccattttactatctatatgtaactcataacgtcatgctgtacaccttaaatatacacgataacagtatttgaaggagtatttctgtcatctcccactttttgaggttccatctatccagtcttattcccccttctgctgagccgcctccaagcactccatcattcaggtgggtcccctgactctcccactctcacaccgtcttcaccttcactgccctcctttgcccctgtgctcagaaagggacaggcactggccaaggacttccttgatccatccttcctctgcacctctccacctcctacacagacccctgttgttctcgttacagctgttggattgycttgtctagttcttagttattattcttatcagtgcctgggaagcactagtctgcagaagaatgaggtaaatactgaccacttcttgtcttctcttttcccatccccactcccatccaacaaccactattaaatgtttgaattctttattttaat

SEQ ID NO: 732721 - DNA, 513 bp, Homo sapiens
agctatgacttatccacacagtgcttatttcagcctgtgtctgtgagggaaatcatagaggaccttacaacccattcccctaatacgaatatgcattgtgctcccagaaaactcaggacatgtgggccagagacactgctgtgagttcaccaaacccagggtccttttcctcctgggcacttcatttctaacctttcttgcagtagatggggccatataactgattctggtcagtggaatatagtcatgaatagtttrtgtcacttctagagctagtgcctaaaaatcttctgagaaatcctactctcttcctccctccctcccctacctcccagccacaagcagtggagaaccatggcgctggggaatggtagggcctggatccctgaatgactactagaacatagcctcccccatgccctccttcttttaccaactcacatgcagttgtgatgtgagtgagaagtacaatttatcaagtgaagccattgagattttgggatcatttggtgc

SEQ ID NO: 732722 - DNA, 624 bp, Homo sapiens
attatgaccatcagtgcaggcgatgcctatgcctccaacaaagcaagtaaagctgcttccatcctcctgtattctctgtaggcacacacggaactccatcatgcctacaagaaggctcagtttaagaagacagattttgtcaacagctggactgtcaaagcctaccactcccttaaagactgaggaaaatgacgaagtattctcagctgcaaaaaaatcccacaggaaaacacctatttttctactacccagcccaagaaacctcaaaagcatgcctcgtttctatcattttctatttccatggtcccccgaatccagaaaacaagtayaacataatcttatgagtcttccagaagacttttgcaagcttgccaccagtagatactggtcacaggctctacaaatagtggtctttgttattagggcttatggtgcatggcctcctggaaccaaaatgtgaattcatgtggaatggactttgatccaataaataaggaaagaagttgttgcattactgggattttaaaagcttgatttacatttatattccttttctagttcccatgttttgtcactcatgtgcacattgcttcaccattgggccatgagtatattgttctgtag

SEQ ID NO: 732723 - DNA, 631 bp, Homo sapiens
agttagagaacagactggaaaacctagcaagaccctgtttctacaaaaaataaattagctgggcatggtagtttgtactcatagtcccagctacttgggaggctgagacaggaggattgcttgagcctagaaatttgaggctgcagtgagctgtgatggtaccactgcattccagcctgagtgacagagmaagaccccatttcttaagacaagcaaaaaaaccccaaaactgaagtactactaacatatgcaacaacatggataaaccttgaaaacattatgctaaatgaaagaagccagtcacaaaagactggaatattgttccatctatatgaaatgtccaaatagacaaattcagagatgcatgcctgtaatcccaacactgtgagaggcagaggtgggcggatcacttgaggtcaggagttcgagaccagcctggccaacatggcaaaacccagtctctactaaaaatacaaaaattaactgggcatggtggctcgtgcctgtaatactagctacttgggaggctgaggcaggaggcaggagaattgcttgaacccaggagacagaagttgcagtgagccaagattgcacctttgcattctagctgggcgacggagtgagactcagt

SEQ ID NO: 732724 - DNA, 589 bp, Homo sapiens
taataaatattttatgagagtagtacagaagtatgactccatttttctcttatatttcatttcagtgtggaaggctctttagaaacactattaacataacagcattatgtcaaaaagcgccaataacattctcaccaacttttctttttaaaggaattaggtatagctagactgtaaaaggcaagtggtgtgaagcccaaacctaaratcctaagatctaggatgagtcaagacttcatagtctacatgagtagaggcagcatctagaggaaaacaaaagtatgtggctatcaaattccaaagaagccccattttattacagagaaaatacaaagccgtttcctcacagggaaaagtacagtttcccttctccagggtgacagatgagccttttccgaagttctcagctttctcttctatcgaaacttcccatgtcggttaaagtgtttgtagagatagcggatgcgtttattaaggttgtgcaggtcatcagcgaacattctacttccaaccattttcctctttcggatacaacgttgcaattcattccctttccaacctcgaagccatatgggccccctgatcagtt

SEQ ID NO: 732725 - DNA, 589 bp, Homo sapiens
taataaatattttatgagagtagtacagaagtatgactccatttttctcttatatttcatttcagtgtggaaggctctttagaaacactattaacataacagcattatgtcaaaaagcgccaataacattctcaccaacttttctttttaaaggaattaggtatagctagactgtaaaaggcaagtggtgtgaagcccaaacctaagatcctaaratctaggatgagtcaagacttcatagtctacatgagtagaggcagcatctagaggaaaacaaaagtatgtggctatcaaattccaaagaagccccattttattacagagaaaatacaaagccgtttcctcacagggaaaagtacagtttcccttctccagggtgacagatgagccttttccgaagttctcagctttctcttctatcgaaacttcccatgtcggttaaagtgtttgtagagatagcggatgcgtttattaaggttgtgcaggtcatcagcgaacattctacttccaaccattttcctctttcggatacaacgttgcaattcattccctttccaacctcgaagccatatgggccccctgatcagtt

SEQ ID NO: 732726 - DNA, 589 bp, Homo sapiens
taataaatattttatgagagtagtacagaagtatgactccatttttctcttatatttcatttcagtgtggaaggctctttagaaacactattaacataacagcattatgtcaaaaagcgccaataacattctcaccaacttttctttttaaaggaattaggtatagctagactgtaaaaggcaagtggtgtgaagcccaaacctaagatcctaagatctaggatgagtcaagacttcatagtctacatgagtagaggcagcatctaraggaaaacaaaagtatgtggctatcaaattccaaagaagccccattttattacagagaaaatacaaagccgtttcctcacagggaaaagtacagtttcccttctccagggtgacagatgagccttttccgaagttctcagctttctcttctatcgaaacttcccatgtcggttaaagtgtttgtagagatagcggatgcgtttattaaggttgtgcaggtcatcagcgaacattctacttccaaccattttcctctttcggatacaacgttgcaattcattccctttccaacctcgaagccatatgggccccctgatcagtt

SEQ ID NO: 732727 - DNA, 602 bp, Homo sapiens
tagtgagccgagatcgtgccactgcacttcagcctgggtgacagagcgagactccatctattttttttttttttttaaaaaagatggtgaaaccccgtctctactaaaaaatagaaaaattagctaggtgtggtggcaggcacctgtaatcccagctactcgggaggctgaggcactgaattgcttgaacccaggaggcrgaggttgcagtgagctaacatcatgccactgcactccagcctgggcgacagagcgagactccgtctcaaaaatatgtatatatatttgtgagggtggagccctcataacctaaacacctcccattagactccaccttccaacactgtcatgttggggattatatttccaacacatgaattatgaggggcacattcaaaccatacagcgtgctaagtgttgttctgactggtttgcatggactatctcattcagttttgacatatatatatacatatatatatatatatatatatatatatatatatagatatagatatatatatatatatataccattggtccttgaacaacgtgggggttagggatgacaacccctgtgcagtcaaaaatctgcatatgta

SEQ ID NO: 732728 - DNA, 491 bp, Homo sapiens
tttgttttatcccagtattttgcagggaaaagtttcagttttgaacagggagtatagtattagctataggtttgatgaagatgttctttaatcaggttggagaaattctgttctattcttcatttgctgagaatttttatcrtgatgaatcttgactgtcgtcacatcattctgtttgcatctattgaaattaccatgttttgttttcctgtttttaatatggtaaaatatacatatctatattgtatttcttaatgttaaattgttacattcctgcaataaaccttacttgataagaacatactataatttttatgtacttctattttcaatttgcttatattttattaattatttttggacctatgcttatgagatacactgacctgtagaatcctttccttgtaatgttccactggctgtttggtttggtttgggtgtctcacaaaattaactgtcatgtgttgagcctttttaaattcttttctgga

SEQ ID NO: 732729 - DNA, 495 bp, Homo sapiens
atccttcaatatgcacttatcttgttttatatctttctttgttgatggaagtgcaaatctttttaatctttctgaaaatagctttgtagtgtgtatgagctgccttgcttaaatttgagtatcattctctactgaaggatttcagagtgtattaatggcaaacaacattcaatgtaattgtgcattctctttcatgtatcattcagttcttgaaaaatgaaaattattatatcataaataattgttgtatgcttctcagtaatgtgaagtgctgtagactgaccatataaatacatatttgcataaaattggcaatcaaagatgatgcacggaagaacttayttgtcagaacaaatggtttgcaatattcattattttcttgtaaagaaaccattattggggatgacttaactagtgcagagttatttggtgagcaatgtattgatcagacatctggaaagataaaaatgccaatactcagactgacaatttgtc

SEQ ID NO: 732730 - DNA, 644 bp, Homo sapiens
cttgggttgggaatatctctgactaataggcaacactgcttcagaaagggagagatgagggtccatggcaaggtaacagctaggaacccggctctcctgggatcaaggggagtggaggtcacagagtggtgagagaggaggatggagagagatggggatggggagcagtgagatgaggcagctggaaccctttcctgagcccgtggatgtcctcagtaaagtgaataaatggggtttgtgaacctggacatgctgatgtttggagctgacaatcatttgtcatgggaggcctcaatttaaatttatataaatattttagggaaggagaggtcttactgaaaayggttgggtgttgttaaccctgcttccaacttgagcatgggctctgtgggaggtgagccttgggtcactttctcattatgcatttatgtagagatactctactacttttgtaattataaaaagaaaaaaatgcagcaaaccttaaaagtacaattataattgaaaacacacaaaaaagtctaagtgtttcaggatgagggcctgttgggggcctgaagtggcatcactgtcttagaagcaggatcaccctgcaggtgcagatgctgcaggacattttaaaacacgtttagaccctgccacag

SEQ ID NO: 732731 - DNA, 590 bp, Homo sapiens
gcaggacattttaaaacacgtttagaccctgccacagatttgctatcacttgtctctgcatagctgaatggaagctgctgggccaggcatggagtagaatcccagcactttgcgtggccgaggcaggaggatttcttgagctcaggagttcaagaccagcctgggcacaatagtaagaccttgtttctgaagaaagttaaaaaggaaactgctcaatataatgaggtgcatgaggcctctggtccacatgcaccaagaaggtgttaccttttctcatcaccttgaagcatccagstgttgaatggggcaaggttgaatcccattagtttgcaagtttatttaggggtgggcaatagactaaatgaagctgcatttaataaggaagatgacccatttctcatatccacagaagctatgcacactccttttattaggctacatatgtcaaatacaggctcagcttacgttagcttctatccagccaaattataggggtttcctgcctgtatgtgattgccaaatattgcagttttctccccagacccataaaaaactgtctctgagaccaaaaggatgaaaacaaattgttt

SEQ ID NO: 732732 - DNA, 622 bp, Homo sapiens
atattacaagaacctgcctctccaaattggcattttcttacttctgctttggatctttaaaaaattaattgaaatgaaacattatgcttgtaaagttgaagtcccctcttcagtcttatttcccttttttcatctcagatataacttctatcataattttattgtatattctcccagtcactgttaatttatataaaaatataaacatcttatatttataaagtatttaaacaagacctagtatgaaggattgcagatttaagaatttatgtatgtgatgtaaaattatgcaatttactttttaaatttcattattgcttttaagaactatgcattttgatacatggacctgtttcattatattagttacctattgttgcataacaattatctcaaaacttagtggctgaaacaacaaagtttattatctcactgtttctgtgggttagaaaactagatgtggcttagctagatacctayagcttggggtcttttatgagatggttggtgaggtgttggctggggctgcggtcatctcatggctcaactagagaaggattcacttccaagctcatttatgtggacactggaaggccactggttcacaccaactgttagccag

SEQ ID NO: 732733 - DNA, 465 bp, Homo sapiens
atagctgaggacaatgcccttaagtttcctagaagcctctttgacttatccgagagtgtctgtgaggttctcacttaatatttttttttttttttttttttttggagacagagcctcactctgtcacccaggctggagtgcagtggcggygaccttggctcactgcaacctccgcctccctgtttcaagcgattctcctgcctcagcctcccaagtagctgggactacaggcgcccacaaccatgcccggctaatttttgtattttttagtagataggggatttcaccatattggccaggctggtctcgatctcctgaccttgtgatcacccgcctcggcctctcaaagtgctgggattacaggcttgagccattgcgcccggcctcgcttaatatctttagaggggcttttgtatgtagctgttccccatttttcatttttgaaatgaaaataattttctaatt

SEQ ID NO: 732734 - DNA, 588 bp, Homo sapiens
ctgctgtggatcctcttgttgaacctcatattggactatcaaccatgagccagtcaccatcccatgatatgaaagtgtcatttatatcaacttgtccatgtgttaaatggccatcagctttattatcctgttattccactaagtaactggtgaaagggcatccatctacatttaataccactcatttttcccatggatctcttcccagcagcattcagacctcagatgcatgatgcagttagactaagcctctaagtytctgactgttatgcttgatttgaccttcaaaattacatattaactgttcttcaataaatattatcttaatatcagtaattcttttctcttttttcaatttttttgagaattagttgtcagtttattttttagcattacttctctcaagataaagacaaatttgggttaccacgaccaggaaagaaaactgattttgtaaatataatgtaatgcttatattatagaaaggacttcataaatttttcaaaataagataactcgctgtatttaactaacaaaagtttcttattcagtcaatgaaattattgatcatctgtcatgttcattgca

SEQ ID NO: 732735 - DNA, 588 bp, Homo sapiens
ctgctgtggatcctcttgttgaacctcatattggactatcaaccatgagccagtcaccatcccatgatatgaaagtgtcatttatatcaacttgtccatgtgttaaatggccatcagctttattatcctgttattccactaagtaactggtgaaagggcatccatctacatttaataccactcatttttcccatggatctcttcccagcagcattcagacctcagatgcatgatgcagttagactaagcctctaagtttctgactgttatgcttgatttgaccttcaaaattacatattaactgttcttcaataaatattatcttaatatcagtaattcttttctcttttttcaatttttttgagaattagttgtcagtttattttttagcattacttctctcaagataaagacaaatttgggttmccacgaccaggaaagaaaactgattttgtaaatataatgtaatgcttatattatagaaaggacttcataaatttttcaaaataagataactcgctgtatttaactaacaaaagtttcttattcagtcaatgaaattattgatcatctgtcatgttcattgca

SEQ ID NO: 732736 - DNA, 569 bp, Homo sapiens
acatggaatggtagcacgttctctggtagacgggtgcacagcagctaggttggcagcaggatgtgttgcagcaactgggggggtggcaacaagactggcagcagctggacacacagcaggtggtcctgcagcacgtcgtaggctggcagcaargggagcagcagtgggtcatggcgtcaggggtggagggtgcactcctgttcagaggtgagtttcctagagtttgataacgttattcaatctgaaccttttatacatggtaccccaaagttttgattaatgagcagaacttgtctttgatacttctctagtcttttgggaaatgtcccaaggaggaagttgtctattcagtgctgtgaattttctttgagtaattgatttatttgctttcttaattgacaaataaccagtcaggactattttcctgaactgagaaatgaatcattctccctaccaattaagcactgatcctcatttttaaagctgagtacagtatttggtcatctaacaggtcctatgtagcttagtgagatgtcaggacaattgttagtcaccatctgtttttcctt

SEQ ID NO: 732737 - DNA, 569 bp, Homo sapiens
acatggaatggtagcacgttctctggtagacgggtgcacagcagctaggttggcagcaggatgtgttgcagcaactgggggggtggcaacaagactggcagcagctggacacacagcaggtggtcctgcagcacgtcgtaggctggcagcaaggggagcagcagtgggtcatggcgtcaggggtggagggtgcactcctgttcagaggtgagtttcctagagtttgataacgttattcaatctgaaccttttatacatggtaccccaaagtttkgattaatgagcagaacttgtctttgatacttctctagtcttttgggaaatgtcccaaggaggaagttgtctattcagtgctgtgaattttctttgagtaattgatttatttgctttcttaattgacaaataaccagtcaggactattttcctgaactgagaaatgaatcattctccctaccaattaagcactgatcctcatttttaaagctgagtacagtatttggtcatctaacaggtcctatgtagcttagtgagatgtcaggacaattgttagtcaccatctgtttttcctt

SEQ ID NO: 732738 - DNA, 563 bp, Homo sapiens
acaggtttgattatgattcctttgattatggaacattttcagctttattgctggatatgttctcattttcatccagaatattatttatttgtgtcttctttacatttcttgatcaatcttttcaatggcttatcatttattggtattttttttgaaaaagaaattttggctttgttcatcttctctgtgatrtcgtttttaactagttcattgatttacattttatgctattttggttgttttcctttttcttattcacttaggtgaacacttagttcatttatttttaggttttattcttgtttaatatttaaatattaaaggctatttaaagtgtgtacattttatcaaagatcattttataacaccccacaagtcttgatatgtaatattttcattataattgagttacacattttttccttaacattagagattcttccattttggtcttccaagtcagtatatcttctgcagcttatctcacttattgtgtactttaatgactatatgctctattattaatttagtatcagatattatgcctgcttgtgtctcctacc

SEQ ID NO: 732739 - DNA, 552 bp, Homo sapiens
tgtttttaaaatgaggtataattgaccaacagaaaatgcatacatttaaagtttgatagaaatttggtagattgttggtaaaatgtgatacattttgacttatgtacacactgttaaaccatcttctcaatcaaggtagtgaatacatccatcactcctcaaaggttcccccagcccctttgcaaatacctctcatcccccacatcccccatctgctttcagtcactatagattagttaacattttctagaaatgtaaataaattgaatcatattgtagatattcttttttatctggtttatttcattcattataattaatttaagactcatctatattcttcatttgtccttagtttgtttctttttcattttctttagagacagggtcttgytctgtcacccaggctggagtgcagtggcatgatcatagctcactacaaccttcaactcctgggctcaagcactcctcctgcctcaacctcccaaaatgctgtgctgagatcacaagtgtgagccactgcgcctgttcctttttttttttttttttttt

SEQ ID NO: 732740 - DNA, 649 bp, Homo sapiens
gcatgaaccacagtgcacggccaccacagcaactctttaaacactgaggacacacaatagagccaatgattaactaaaataggcaactgatgcctttctctgaagcttacgtgtagaatacggtaagccccaggataacttcccctgtagctagaataactgatcccaggaagagcccctggaagcccgattcgatccactgaaagtcagttttgggtaaagtcgttagtgcgtcttctgttgttctcagcaaatcttcaracaattttttcaccaggctcagcagagggagaactaagtctaatgtatttagccgggggaatgacaggtttccttttcacagtaagggttcctaggataggagactatccactcgtagcagaagaaaatcctaatgagcaggatccaggttttagggggcccttaattctaacacacagttcaccctgggctgctcaaacgtcttgacttgccccgctatgtgtgtgtgtggctttaggaagccctgcgattttccttctttagctcgaatgtcaagcgctgcaggctttctgagaaatcagtgtcctgacactggggctgagcccttggtaatgacactgtagacacgaggtaattacagctctgttaactcccaagtcaggctaag

SEQ ID NO: 732741 - DNA, 492 bp, Homo sapiens
tgtcaaccggaacgagaaagacctggttgctaatagaaaccatggcctcagacgtcgatcgtcacccaccagatcagctaatttggtcagggtggctgggtgatttgttttttttctgattcaggacctggcctatggcccctgagaaggatttatctgaaaactccatcaaggagatgatttgagccattgcctgttcctgactaatgatcttttgtggaactcaagccatattggggatttatacctttctcccatagtgcactgggaaggaaacaccatcaaacactttaattaayatcctttttactttgggcagccccattcgtatcaaaaccacaaaccttacccttcagttgcacgagaacactcttaccaaggataaaatgtgattttcgattcctatggagatgtttctaatgtttctaacacccgtcaattctaggatcgcgtggtacaggagatttcatgtactaccaccttttttttaaa

SEQ ID NO: 732742 - DNA, 635 bp, Homo sapiens
tattagttagggacccacttcattatgaatgacatagtcactatgaagacctgacctctctggcttctggaagaatgttgaacatgcagaccaaggaaaagccaccatcccagagctcacattccagggatccgaagaaacacatcagagtaatggctagcccagatggtgataggagagaaacagagaagagggtggacaggaaggactttctgaagaggcgacatttaagccgatgactaagtatgaggaggatccagtctggtaaacagtggaaggcagaggttccagagagaagagctggcatatgccaaggccttgaggtgggaaacaccctcgaaatatttacagagtggaagtagctcccaatgcctatgacttcactagcccccaatttggaacaaccattatggctgctgaatgctgtaggactgtgaataagcaaagaagtgtttgaaatgagkttataaaggtaggtagggccatgcaaaccaggtgaggagtttaggtgtaattctaggtgcaagaggaagccactagaaagttttgaagcatgaagagtacctgtattacggttctctaaagggacagaactaataggatagatgtatatataagggggagtttataaagga

SEQ ID NO: 732743 - DNA, 614 bp, Homo sapiens
ttcattaatagagttcaatgtaataatgtaaaaaagtgcagcgtatttctatatatgtctgtagatgtagacttctgtatatatctacttttcacaaacttgaaatcatttcacatgtgttgtcttattcaaacctctctaaaccgaaaactttgagagttgcccagaagagatccgttgctcctattttatacattacaaaaccgaagtacagacagatgaactattttaagaccttgaggctaattagggatgcacgtggcgtgaaaattttgggcgtctgaacttcctacaatagggcactactgattctgtattcctttgttgcctgaggcattcctttctctgggagaaascaaagctgtacatatttatcttcaagagaaacttccactttgcctatgaagaaatagttagaattgttttctgtggttgcctcaagttagaggtgctaatatacatggaagttaaacaagaccacacatgtgcaaaactcttgatgaatcacgttattatactaaaccaacgttatactaaaccaacattagctagggttattagttcagattatagttatgcaggtcttccgtgttaagtctcatgtaaatatcttc

SEQ ID NO: 732744 - DNA, 614 bp, Homo sapiens
ttcattaatagagttcaatgtaataatgtaaaaaagtgcagcgtatttctatatatgtctgtagatgtagacttctgtatatatctacttttcacaaacttgaaatcatttcacatgtgttgtcttattcaaacctctctaaaccgaaaactttgagagttgcccagaagagatccgttgctcctattttatacattacaaaaccgaagtacagacagatgaactattttaagaccttgaggctaattagggatgcacgtggcgtgaaaattttgggcgtctgaacttcctacaatagggcactactgattctgtattcctttgttgcctgaggcattcctttctctgggagaaaccaaagctgtacatatttatcttcaagagaawcttccactttgcctatgaagaaatagttagaattgttttctgtggttgcctcaagttagaggtgctaatatacatggaagttaaacaagaccacacatgtgcaaaactcttgatgaatcacgttattatactaaaccaacgttatactaaaccaacattagctagggttattagttcagattatagttatgcaggtcttccgtgttaagtctcatgtaaatatcttc

SEQ ID NO: 732745 - DNA, 649 bp, Homo sapiens
tttatttcaaaatgcgattcagggtgtgttaggaaggaaaatgcaaatgaaaccttccagtacataccagggctgatgagaaacttgctaattatgcccatgttatctgagtgtttgttttgtatttcactttgtaagattgtcttctctcggtcgttattattttacacctggctgcctacattgatagttttgtcccaattatgyacttctagattgcttataaacaggtcaggatgattcctcactcataaatttgataggcttctgtgtaagctttctatcatagtttcaaagttggtatctgatgtggatggcatttactgccagctggaggcaatagttgctaattgcagagaagtatcaaatgctaaatgtctgaaatgttaaaactctagaaccgagagtatggcagtggctataatgatacctaatgtgactgtgacttttcccctcgttcctgccaaatatgtgggtgtcaatgtaacgtcatgttatacagccttatttggaagacaggggaggtgaaacaatcagttatgctgatgatgttacatggtctaggcaaacagagcacaacagcactttctgcagagatggaaacgttctgtatttgcattattcagtatggaagcaataactacatgtg

SEQ ID NO: 732746 - DNA, 598 bp, Homo sapiens
ggttcttgagcgcttgaaatgcagctaatgcaaacaaagttaaatatcttgttttaattcagttaaatgtaaattgtcacatgtggtcaactgtagtggacagcaaaagtttgtacaattagaacctcaaaagaataagtcaatcagctggttatttgaactccagaatgccaactagtcttttcacattttttacatttaattatgttttatctgcacaattacctgaacaattatgtaggcatatcttcagattctgaacagcgtcggttaagaaatacacactgtcctgcctttaaagattattacccccttcttgatgaggttctcgcyccccacctcccaaccccagcagctcccagtccccttcctttgctttttctagcctatagtgcttttctctgtctgccaacactctatctatggatttattgtctgtgttgccctcatgagaatgatgctccctgagggcagggatttttgtctgcttttcccactgcctaatcccagattcataatgagcacccagtggacgctcagaaaacacttgctgaatgaatgcatgcatgcatgcgtcagcattttcttcccttctcag

SEQ ID NO: 732747 - DNA, 592 bp, Homo sapiens
ctttgatgctctgttccttcttcttcaagctgtatttgattgtgaatgttccttgtgaagtgttttaaatcacaggtatcaaatcccctttgcttggtttgagggatttgcctctgttgccctcatattttcagcctaagagggccctccccattcctcccagggacatctaaaaacgtttatcttcttgtgtgcagtctggaagrttcttcttacgagcatctagcctcacaccaagcagccaaagttgtcttaaaaaaaaaatagcatctttgatatgatccacttggccacagcagcttcatcaccccctccccaatactctaatgtccagttaacgtatattctcagtccctccaacaagcatgatctttgtgccccaggacatttgcacatgctgtttcctgaaaggctacattccacagttcctaccctggtgcctgcttggttggtatattcagccttgctcagcttggacatctcctctttaaggacatacttcctgattcaccttccaaatcagaacaaagcttcctgttctttgccgtattccagtaagttgccaactcactggacattttctcatggtgtg

SEQ ID NO: 732748 - DNA, 592 bp, Homo sapiens
ctttgatgctctgttccttcttcttcaagctgtatttgattgtgaatgttccttgtgaagtgttttaaatcacaggtatcaaatcccctttgcttggtttgagggatttgcctctgttgccctcatattttcagcctaagagggccctccccattcctcccagggacatctaaaaacgtttatcttcttgtgtgcagtctggaaggttcttcttaygagcatctagcctcacaccaagcagccaaagttgtcttaaaaaaaaaatagcatctttgatatgatccacttggccacagcagcttcatcaccccctccccaatactctaatgtccagttaacgtatattctcagtccctccaacaagcatgatctttgtgccccaggacatttgcacatgctgtttcctgaaaggctacattccacagttcctaccctggtgcctgcttggttggtatattcagccttgctcagcttggacatctcctctttaaggacatacttcctgattcaccttccaaatcagaacaaagcttcctgttctttgccgtattccagtaagttgccaactcactggacattttctcatggtgtg

SEQ ID NO: 732749 - DNA, 588 bp, Homo sapiens
cacgtttcttcctgccacatgctttgtttttgtggccccactgcctggaatgatttcccatctcctctcctcctgtcccatccttcggatcttcctcacttcttggggaggtccactctgatgcttgcccacctgcctcaaatcgaagtcagtttctcttgtgcatacactctcttaggatcacattctgcacttacctcattcattcaarccttttttaaaaaaaaccagtctttccaatgagactgaaacgataacacagggggaaccctcataactgtatgttcagtatgagttttctcataacccatacgaaatgcttcctaaagttccatttcctccccttgcttctcaaacttcatgtttacctttctcagaaaaaaataaatctgtactcaaatctccactgtgagcctttatatcaagctttctagatacaccaccccatatccacccagactggtcatatgccaaaagtcatggcctgttccccagcagcacttgtcttcaaatctaagttactcaagctacaaaaggctccaggggatggaagcaaacatttcaaagccttgacacttccagtcctgc

SEQ ID NO: 732750 - DNA, 588 bp, Homo sapiens
cacgtttcttcctgccacatgctttgtttttgtggccccactgcctggaatgatttcccatctcctctcctcctgtcccatccttcggatcttcctcacttcttggggaggtccactctgatgcttgcccacctgcctcaaatcgaagtcagtttctcttgtgcatacactctcttaggatcacattctgcacttacctcattcattcaaacyttttttaaaaaaaaccagtctttccaatgagactgaaacgataacacagggggaaccctcataactgtatgttcagtatgagttttctcataacccatacgaaatgcttcctaaagttccatttcctccccttgcttctcaaacttcatgtttacctttctcagaaaaaaataaatctgtactcaaatctccactgtgagcctttatatcaagctttctagatacaccaccccatatccacccagactggtcatatgccaaaagtcatggcctgttccccagcagcacttgtcttcaaatctaagttactcaagctacaaaaggctccaggggatggaagcaaacatttcaaagccttgacacttccagtcctgc

SEQ ID NO: 732751 - DNA, 588 bp, Homo sapiens
cacgtttcttcctgccacatgctttgtttttgtggccccactgcctggaatgatttcccatctcctctcctcctgtcccatccttcggatcttcctcacttcttggggaggtccactctgatgcttgcccacctgcctcaaatcgaagtcagtttctcttgtgcatacactctcttaggatcacattctgcacttacctcattcattcaaaccttttttaaaaaaaaccagtctttccaatgagactgaaacgataacacagggggaaccctcataactgtatgttcagtatgagttttctcataacccawacgaaatgcttcctaaagttccatttcctccccttgcttctcaaacttcatgtttacctttctcagaaaaaaataaatctgtactcaaatctccactgtgagcctttatatcaagctttctagatacaccaccccatatccacccagactggtcatatgccaaaagtcatggcctgttccccagcagcacttgtcttcaaatctaagttactcaagctacaaaaggctccaggggatggaagcaaacatttcaaagccttgacacttccagtcctgc

SEQ ID NO: 732752 - DNA, 579 bp, Homo sapiens
agtgcccttacaagaagagatattagacagctctccttctttctctgaaatgtgaaggcaaagtaagcaggctgctatctgcaagccaggaagagagccctcaccagaacctaaccctgctggcaccctgatcgcaaacttacagcctccagaatggtgagacaataaatttctgttgcttatgccatccagtctacagtattttgttatggcaacccaagcttacaaagacacctaaagtgaatgaagtctgtgtctcatctccaaaatatctcttaaatttcttagatcctttatccactttcattgtttccactggaatccaatcttccatcatctctcctggacagctatatacatgttaaccytcctcttaattggattctcacatggcagccagagagctataaatctgatattgtttaaccacatgcttaaatcatttcaaaaaacttctcatcactcttaggaaaaaaaaaaattcctgataaagttatcaaatatgtggaccaaattctggaataaaaatcaagacttaagaagtcttgatttttatttaagtcaagacttaaaaatggt

SEQ ID NO: 732753 - DNA, 498 bp, Homo sapiens
tggccctagttccttgggattcagtcagagcctccaacacatcttttattaatattaattctaaaaagaattttttcagtgctatttaccatctgttttctcccttggctgaaaataattggagatgaaacgcctgctgcttggtcccccgcacagtctcagaagaaacaatggaggcagacagtgactgcatttctttttccccawgcaaaacatgctggaataaactttccatgctgggttgcagaagttgcactcaatcaagcgggtctccagtccccgagttccttatcttctgcacattcacagccctttgcattttgggaccagaaagccttctctgggggggggggggggggtgggaggggaagctctttgatttcgattagccaagttcactaattttcctctatcctaatgacatctggcacatttgatgttccactcaagtttgcaccatctgtaaatataaatagcctggtcttgattccattagag

SEQ ID NO: 732754 - DNA, 594 bp, Homo sapiens
ccatgttagccaggatcttgatctcctgacctcttgatccgcctgcctcggcctcccaaagtgctggatgattcctaatcttatttgaccactgttttggactgggccctctagaaagcaaagcctgaaaaaaaaaaagagatgaaagcctggcactttatttgcaagatacaagcccagagcagcgaggtgaagaaagggaaaagagagcaaactgaaatgggaagcagtatcacagtgccgtctttacaacgaggctgctcagcaggtatgctggctgagcctacaggatttctcccgaatgtctacgaggaggcaaagcactccagagtttccccactaaagaaagagggaaaatatatgtgtccrgctccttcccaggtcccattggtcaaatttccctccacaagaaactgactccatctggttgtgtcatctggttcctttgtagccactccaaattctatatctgaaggtatgagcttccattgaagtctaaaagagaaagagtgtcccagcaaggtgggacaccagcctagagggaggaagaaaaggatagtgaagggaatctgagcagacacacgggttcatgtt

SEQ ID NO: 732755 - DNA, 521 bp, Homo sapiens
catgaatggcttcagccaattcatggtgatatgtgagctcttgctctgagttcatatgagatctggttgtaaaaagtgtgtgacgtggccagatgcagtggcttacacctgtaatcccagcactttgggaggcagaggcaggcggatcactttaagtcaggagtttgagaccgggtcaatgtggcaaaaccccatctctactaaaaatacaaagactatccgggcatggtggtgggcayctgtaattccagctacttgagaggctgaggcaggagaatcacttgaaccctggaggcggaggttgcagtgagccaagatcacgccattacactccaggctggacaacagagcaagactccatctcaaaaaaagaaaaggaagaaagaaaagaaaaatgaaaaaagagtgtgtggcttctctctctctctctgtctctttctctttcttgcttgatctcattctcactatctcgctatgtgatgtgcctgctcccactttgccttctgccctgattgggagct

SEQ ID NO: 732756 - DNA, 623 bp, Homo sapiens
gatttttcaacagtggcacatttgacattaagacagaataattctttgttgttggagcctgttctgtgcctaggaggatgttgagcagtatccctggcttctatgcaagagattccaatactacacacacaccctatcctcccagtcatgacaatcaaaattgtctccagacatcaccaaaactgcccctagttgagaactactactctataatttcaggggcagtcaaattttaaaaattctattacatgaattccatgtatactcctagtcataagaccatttgtcttcatttttggttyggaaattaaggtcacatttataacgaatttattaacagcctgggactgaatgccaccaactttttggtcttcactattttttccctattgcttatcttgtaaaggcctgatttggtaaacggaatgacccctgacacttttctattttcctagcacccactctaagctaccttaggtgaataggatccaaacgtccagacctatacacaactcccttgggaactctacaggtggccatgaacaggttggaaatctagtggttatacctaaaggacaccaatggctcacacccctattccacacactctcttcctttgattt

SEQ ID NO: 732757 - DNA, 520 bp, Homo sapiens
ttgtggtacatttatacaatataatccttaagatcaaataaataaactatacctacatatatgaacatgaatatatttcaaaatataattaaaaaagcagtttgcaaaggacacatatagtatgtgcaataattatgaacacatgtatgtaccaagagtaaaaggtgatgtactaacgtcagtgtagtgatcccttctagtgaccaagaaaacacagaacacaaaaaacaaacaacaaactggaatgaagaagtatatagacgtataatgacactttttctaagaacaaaacctctgagacaatacttgattattttttgttgctgccatttgtctttggaactgacatcatgcyggggttgggtcatgaagctgatgacttgatgtaagttgcatggatgttgttagtttcctcttcaattgccttttagctccttaaaagcaaatggaatttgtccccaatagtatattttcaatgactgatacaatttataaaatgtgagttgtcaacaaggagcat

SEQ ID NO: 732758 - DNA, 652 bp, Homo sapiens
ctagtgtaaatttgattgttttcttaatctcttttttgcatattttgttgctaatgtacagaaacaaaattttttgcacattgattttatatactgcaactttactaaatttattagttctaacagtttcttggtggagttytagcatttctataaataagattatgtcatctgcagagagagaccatttagcttcttcctttccaatttgaatcttttatttctttttcctaattgctctggctagaacttccagtactatattgaataaaagttgtgacagtgggcattcctctcttatttctgatcttagagaaagagctttcagcttttcactgttgtgtataatgttagcagtgggcttgtcatacatggcctttattatgttgaggtacatttcttctatacctaatttgttgagaatttttattatgaaaggatgttgattttgtcaaatgctttttccccatctattgagataatcatatatttttcataatccattctgttatgtggtacatcatgtttactgacttctgtatgttaaaccatccttactttccagtgataaatcctacttgatcagggtgtatgattctattaatgtgctgttgaattcaatttgctagtattttgctgaggatttttgcat

SEQ ID NO: 732759 - DNA, 608 bp, Homo sapiens
tgatgcctttctaccaaacatttaatcttctagaaaatagaagatgatggaacactttacagctcctttcagaaaccagacacagaatcaccttgacactaaaaccagacaaaaacattatatagaaaaaaaacttttagaccaatatacctctttaacataagttcaaaaatctttaacaaagtattagcaaatggaatacaacaatatattaaagaataatatatcatagtcaagtgcagttcatcccagaaataaaaggttggtccaacattcaaaaacaaatcattaattcaccattttaacacactaaaaataaaagaccacacagccatttccatagatgcagcaattcctctcctaggtatttaatcaagagaaatgaaaacatatgttcatacacggactttgcagatgaatgttcataagttttatttcagataaacaaaatctagaarcaactcaaactgttcatcaatatgtgattgtgatgtatgtatagaataaatcactattcagcaatataaaggaatgaactgctaatacagtcaacaatataacatggatgaactttaaaagcaccatgctaagggaaagaaatgctacaa

SEQ ID NO: 732760 - DNA, 591 bp, Homo sapiens
atgtccctcacctggcatgcctactcattcaaatcttactcattttccaaggctggactcaagtattgcttcctttgaggattttcctcaatgctccttacattaagtgatactttcttcttcctctaaaattctgttttatccaatgtctctgccatttgtaacatgtcttataacaatagcagaaagcatgtttttgcgtyttaataatccttgtagcttatagtatgataatgaaatatacgttgtttgatgaatgaatgaggagtgaatttttaaggtatcctgggcataaattctgagtgaatgctaccacaccacacagctggacctttctcttattcttgtttacttgctctggctctcatatattcgcacatttctgtcagcacaattagggtatctaaattgaaaaataaaatattgataagcagagagaaaaacagtaaaaacaaaaatatgatgaatgcttccattgtctcagaaatgacagacctttttctacttggcctttataatgtaattatttaagtatttctgtatgtagaatccaccttgctctttagaggccctcaggcactttttacaatg

SEQ ID NO: 732761 - DNA, 622 bp, Homo sapiens
agatagaaattttagcttctcatttgttttttaatgtagagtaagagaaacatacaacagtgcacattgcagcactgcttgtattagcaaaaacaggaagtggatctggattgatccattaactatgaatcttacccatccttaaacatcatttaagcccttagggtagaaaagaaattatggggaaatcaaaatgatacatttggcagtggtgagaggcttcctgttccttttggttcagcaaaaaactttttattctttagacctacaaaaaagcagaggctttttttttkacccacacccaaagcagagggaaatcagtcagcatttttaagggaactacacatgctacaggggccctttagcgtctgccaagctcttcccagtctcaagaatggaggtaggagatgctgttcatgctattatacagaatggcagaattaagtccaaatggcacctggagtcttacctctttatatcctagttttctgtattcagtactggcccagattgcttttattttctgttgaaataataaactcttttacaaaaaatatgattgtttttcctcagttttaaaatatgcctataaatattctacaggaatagagggtaatagatg

SEQ ID NO: 732762 - DNA, 622 bp, Homo sapiens
agatagaaattttagcttctcatttgttttttaatgtagagtaagagaaacatacaacagtgcacattgcagcactgcttgtattagcaaaaacaggaagtggatctggattgatccattaactatgaatcttacccatccttaaacatcatttaagcccttagggtagaaaagaaattatggggaaatcaaaatgatacatttggcagtggtgagaggcttcctgttccttttggttcagcaaaaaactttttattctttagacctacaaaaaagcagaggctttttttttgacccacacccaaagcagagggaaatcagtcagcatttttaagggaactacacatgctacaggggccctttagcgtctgccaagctcttcccagtctcaagaatggaggtaggagatgctgttcatgctattatacagaatggyagaattaagtccaaatggcacctggagtcttacctctttatatcctagttttctgtattcagtactggcccagattgcttttattttctgttgaaataataaactcttttacaaaaaatatgattgtttttcctcagttttaaaatatgcctataaatattctacaggaatagagggtaatagatg

SEQ ID NO: 732763 - DNA, 626 bp, Homo sapiens
gcaatgttctgtaaaggaaaccagttttggagtcagacaacctaagattgaaactcagctctgtttcttgtcatctctgtaactctgggtaaattatttaacaactgcacatttcagtttcctggtttgtaaaactggccatctgaggtcatttggggaactaaatgagataaaatatgtatgtataaatggcagtagtaagtactcaatatatttagttcctttccyttttttcatctatatgtaattccaggatctggggtattttagaattcatctatttattatttcattcaataaacatgtattgactgctttctgtatattacatactttgctgctaaccagacgctgacacagccataaaaattagtgggccaaaaggaacccagactgtagattgaaaggggtcatctttatgcacatcttatgcctcatatctgttgatgtctcaagcatcctacagggatgttacaccatccacgtaggaaataccagatctcacggtaatcggcaaggacaatttgttcgtcaaaacagattttgttgctcccacttgaatgcctcctttagaagtctctgttattaattcacctctgaaaggtgatcaacaaactcttacattc

SEQ ID NO: 732764 - DNA, 665 bp, Homo sapiens
aaattatctgtagctcacagcatgtacttttctctacttggtaagaatttcttcctgactccatcttcttcataaaaatgcttattcagttgatcagaaatcatgcccacttggcctttttgacacccaccttgtaaagggctaacagatggctacacccaaccacagcagggtaccccaaatgagagcaaaaacttaccttgtaaataacagctgaggaccccactccagccaaacacaaaacaatcacaggtgataaaaacgtcaccaagagaacttctgtaatatgcacaacaatttcccccagatctaaagatgttaataaatttctgaaaatatctaactttctcacagccaacagatgtaggctaggggttcagagcttctaggtgacagakattagattgtaccttaagcttcatgactttcaatccctctgtctggttggtacctgctcagcctttaagttttggcttatgttcaatgtcctcaagagatctttctagatgttcaatccagattgatccccgctatcatctttctcatagaatctggttcttttccttcatagtacttacgctaatttaccattgtagatctattatttgttggctatatttttctgcacttgttcataagctttgtaatgagtcattcatccatcc

SEQ ID NO: 732765 - DNA, 665 bp, Homo sapiens
aaattatctgtagctcacagcatgtacttttctctacttggtaagaatttcttcctgactccatcttcttcataaaaatgcttattcagttgatcagaaatcatgcccacttggcctttttgacacccaccttgtaaagggctaacagatggctacacccaaccacagcagggtaccccaaatgagagcaaaaacttaccttgtaaataacagctgaggaccccactccagccaaacacaaaacaatcacaggtgataaaaacgtcaccaagagaacttctgtaatatgcacaacaatttcccccagatctaaagatgttaataaatttctgaaaatatctaactttctcacagccaacagatgtaggctaggggttcagagcttctaggtgacagataytagattgtaccttaagcttcatgactttcaatccctctgtctggttggtacctgctcagcctttaagttttggcttatgttcaatgtcctcaagagatctttctagatgttcaatccagattgatccccgctatcatctttctcatagaatctggttcttttccttcatagtacttacgctaatttaccattgtagatctattatttgttggctatatttttctgcacttgttcataagctttgtaatgagtcattcatccatcc

SEQ ID NO: 732766 - DNA, 626 bp, Homo sapiens
gcaatgttctgtaaaggaaaccagttttggagtcagacaacctaagattgaaactcagctctgtttcttgtcatctctgtaactctgggtaaattatttaacaactgcacatttcagtttcctggtttgtaaaactggccatctgaggtcatttggggaactaaatgagataaaatatgtatgtataaatggcagtagtaagtactcaatatatttagttcctttcctttttttcatctatatgtaattccaggatctggggtattttagaattcatctatttattatttcattcaataaacatktattgactgctttctgtatattacatactttgctgctaaccagacgctgacacagccataaaaattagtgggccaaaaggaacccagactgtagattgaaaggggtcatctttatgcacatcttatgcctcatatctgttgatgtctcaagcatcctacagggatgttacaccatccacgtaggaaataccagatctcacggtaatcggcaaggacaatttgttcgtcaaaacagattttgttgctcccacttgaatgcctcctttagaagtctctgttattaattcacctctgaaaggtgatcaacaaactcttacattc

SEQ ID NO: 732767 - DNA, 626 bp, Homo sapiens
gcaatgttctgtaaaggaaaccagttttggagtcagacaacctaagattgaaactcagctctgtttcttgtcatctctgtaactctgggtaaattatttaacaactgcacatttcagtttcctggtttgtaaaactggccatctgaggtcatttggggaactaaatgagataaaatatgtatgtataaatggcagtagtaagtactcaatatatttagttcctttcctttttttcatctatatgtaattccaggatctggggtattttagaattcatctatttattatttcattcaataaacatgtattgactgctttctgtatattacatactttgctgctaaccagaygctgacacagccataaaaattagtgggccaaaaggaacccagactgtagattgaaaggggtcatctttatgcacatcttatgcctcatatctgttgatgtctcaagcatcctacagggatgttacaccatccacgtaggaaataccagatctcacggtaatcggcaaggacaatttgttcgtcaaaacagattttgttgctcccacttgaatgcctcctttagaagtctctgttattaattcacctctgaaaggtgatcaacaaactcttacattc

SEQ ID NO: 732768 - DNA, 623 bp, Homo sapiens
tagattacagtcatcccacattatccacaggggactggtttcagaaccccactctgataccaaaatctgtagttgctcaagtcctttatataaaataacgtagtatagttgaccctccatagccatagtttccccattcatggagcgcttactgtgctacactgatccaattttgattctgttaattcgtgtaagcatagtacaagtttaactatttattaagtgaatataaatagaactctaggaaactagaggaagcaaagataaatcatgacaaacaaaaatatgatagaaagtggtggaagtwtgaccaaatataccagtaatcaggatgaaaattggaattaaacttccatattaaaaataatatcaggtaccatttaaaaataaccttataatgaaaaattataaattcatatgaatttatgaatgaaaaattataaattcttatgaaagaggaaagcaccaagacaagtgtagaaatataaggaatgatgactaatcatgccagctgacatcaggacccatacaagtataagttatagacaactagaccagtggcagaagggaaagcctagaatcacatgcattatgtgcaaagttggaatacgaagaacgtggca

SEQ ID NO: 732769 - DNA, 603 bp, Homo sapiens
aagtggtagatgattgcttggatgagaagtgatatgcagataagatgttgcaatacacaaagtctgtgtgggtcagtcggtcacgtgggtgccaaggacaggtgggagagaagaagcaagctacagaagcagctcaagaatgggaactgcggaagctgattgtmttggaggaaggagtgtgatgctctcagagcagccagggaggagcagaaggagcttagggacgtaagtcaggctctcaaagtctatgtctggttcctgcccccacaaaccaccacccaggaaacatcattcctgagctgtgtggcagcagcagcagctgctccttttatatggcagacagggtgattgcttgttgggcaagagccctcctacactatcttagagtgaataccctctatctgcagtccagggtctgcacagccacatggtcctctaataggtccaccagaccatttgcctgcaaacagcctcatcctcagtgcccactgtctcctagctgtggagcttggattcctatggaattgggttctgctgaacatacctctttttagcatcagacctacctgtctgtcatcaccatggggctgccagtcagtactt

SEQ ID NO: 732770 - DNA, 480 bp, Homo sapiens
gcaagagcacataggtgaagaggaagcggtggctgatctgggcggaagctggaggtcactgggagtcaggaatgcagcactcatcagtacgaaacccggaaacagctcctagaaggccctctgagctttgaaatctgctgctttacaaactttcttcaggaytctcctttgccttccagcaataatcagcatgtcaacgatggtggccttcatctttctttttccttgtcctgtcaccccaaatgagttttgcggggttttttttaatagagatggggtctcttcacgttgcctaggctggtctcagactcctggactcacacaatcctcctaccttggcctcctaaagtgccgggattacaggtgtgggtcaccgcacctggccccaaatgcgttttaatttcctcagtaactcctccctgctccatacacacaggactggggaaccttcttcctccggcagccaaagccgccaagacc

SEQ ID NO: 732771 - DNA, 648 bp, Homo sapiens
gctcaaggtttccctacgggtggaaaagatgaagaggacactggaggttaagaacccagcaggccgagcagtggcagcaatctccaccggaggcccggcctgtgcttcccctcctgggatggggtgaatgggggctggtcaggggtgccagatggtggtcttatttttacttgaattattctgcattttataactcaaggttcaaagctctgtgctaaaactagatcggacctttccaayttcttagaaaggttcctcgaattcagattcccaaaccaagtattcagctatttaaaacctatctgtgaatgtaagggcccaaacggaagctatttggggcgtgatttctaaaattaccatcacccccacctagaccagcctttgttgggggactagggataaagtgggttctctgggtgctgggggtggtagacttaggggatgaacttcagctcccctgcccatggtcctcctctcagttttacggtttttgtgaacttgtctcacccactcagtaagggagcctggaactggactccaagggaggcaggaccatgtggctaagtgcaagtatcccccgaagtgggggacctttctcactgtaacagggaccggagctggtgctccaaggtgtctgtccctcagcat

SEQ ID NO: 732772 - DNA, 528 bp, Homo sapiens
ggacacacttgagtcaatgcatgaacatagggctcgatgcctccacagtccttcggtgtcctctccagatgcacttgagggtccaataattagaaatatattgggctcatcagaagtgtctctgatgtcaggcacsgtggctcatggctacaaccccagcattttgggaggtcaagacaggaggatcccatgagcccaggagtttgagatcagcatagtgagaccacatctctacagataattaaaaaattaggcaactgtagtggcactcgcctgtagtcccagctactggggaggttcaggagggaggcccacctgagctccggtggtccaggctgcaatgagtggtggtcacaccactgcactcctgcctggatgatgggagtagaatcctctatttaaaaaaaaagtctctgataagattagagggagattatcaaaagcaagccaccccttattgcttgggttcttaacacctgagtggcaggtctggtttagacagctggagtaaactgacctagtgcttct

SEQ ID NO: 732773 - DNA, 698 bp, Homo sapiens
atcaggtactatcaatgctgattttgtgtgtatgtttgagacagagtcttgctctttcactggaatgcagtggcacaatctcagctcactgcaacctctgcctcctgggttcacgtgattctcccacctcagcctcctgagtagctgggactacaagcgcccaccaagcctggttaacttctgaattttttgtagagacagggtttcaccgtgttggccagatttgaagtgatttcacttgaaatcactcttgatttcaagtaacttgcccgcctcagcctcccacagtgctgggattacaggcatgagctacaaggcccagcctgatttctgtttttatatttactattcccatccttttactatattgggtataattttctttttttctagttttaaaggagaaacttggattattcactttaaatctctctaacatttcaaccagtaaatttacagcatckatagctatacattcactctgttttttagccggatcccataagccttgagatatcatcattcagtccaaaatactttctaatttctcttgtgatatctgcattaatgtgagagtcatttagaagtattctatttaatttccaaaattttggtacttttataggtacgttataattactgactcctaattttattccattgttgccagaaaacatagttaacaatatttcaaaaat

SEQ ID NO: 732774 - DNA, 600 bp, Homo sapiens
ttctccttcctctttctgggactccaagtacctatagctgtatacatttgatattatcccataaatcactagtcttctgttaataatcaaatcatttgctttttttcaaattgaatgatatacattaatctatattaaattcactgatctgttgtgctgtccccattctcctgtttagcccatatagtaaaactgtcatttcaaatattttatttgtaattctaaaattttcatttttatataactagttatttctttaattactattcacatttataccagctgtttcaaagtccttatctgttaattccaacattttttttatgtsagggttaactgcttcttctcatgactatgagtaatgtttctctgtttcttcacacatctagtaagttttatttaaaaggacatcatggataatatattaatgaggctgaattttgttaacttactcagaagagtgctgatttttgttatagcaggcagttaacttgctggattcacactcccattctgcatcctctacctgtttagcaactcgagtatccactcggttctttcagtcgtccagctatggcttcccacgggctcccctagagc

SEQ ID NO: 732775 - DNA, 640 bp, Homo sapiens
gatacttaattggttcaaactttcagtggctttccatggatcctagaataaactcaaacttcttgcaggcaaggccaatttcagtggtttttcaaccaagggagattttgtcacatttggaggggacatttggcaaatgtctggagacatttttattgtcacaactggaggagtgcgaggtactatcgtctagtgggtagaggccagagaggctgctgaacatcttactatacacaggacagccctcaccaaagagcattctccagcttcgaatgtcagtagtgctgaggttgagaaacccggccccacaagcccgtctccacttcattccatgctgccttccctatcatccactaaaatgcaaccctggcccggctctttcttggttcccaaaccactccagcctccttcctgccccaggacctttgcactaattgatccacctgctcaaaactaaccccctgccccratatttataggtgctccctacttataatacagatttcaacttaagggtagtctctttgtaaaagtcatcatttataacctaagcttagagactcacctagccatatactgtcgcatcaactaattttaattcatagtttattttatttaatttaaatcataactatctgat

SEQ ID NO: 732776 - DNA, 567 bp, Homo sapiens
aaaggcaatttcagcataaagcatggttaaccttgaatacttagattaatgatccagcacctttcaaccaagcgccaatgaataaacaaaactttacaagcaaatttagcaacatcttagaagaaaaaaaaaaaaaaaaaagcaaaaccaatcaagagagatgaatggtggtgaaacagaaacatttcagggtagaaagagagtgatagcagcagtaaatgtactgcagagaaggagaaattgttctcttttttttccccttaaaattcccataccacagaggatccattatgcttcaaaaaacaaaacaaaaaccagatcccaccwtctgcttagtggtggcttgtactttgacaattggtttaaaatttgattgtaaccactgaactcttcttgtttgttgtgctgtttttcttttctttttttttttccaagataaattctcgcactgtcgcccaggctggagtgcagtggtgcgatgttggctcactgcaacctctgtctcccgggttcatgcaattctcctgcctcagcctcccgagtaggtaggattataggcacacacca

SEQ ID NO: 732777 - DNA, 631 bp, Homo sapiens
cctgcctcagcctcccaagtagctgggattacaggcacctgccaccacatctggctgatttttgtatttttagtaaagatggggtttcaccaggttgaccaggctgctctagaactcctaacctcagatgatctgccsgcctcagcctcccaaagttctgggattacaggcatgagccactgcacccagtcttaaaagcattttcacatcccttaatgaagctaggcttctcctcatcacacagataggacagctgaggcccaaagagctgcacaaactggctccaggtcacactatgcattaggagcaggatgaagacctaccgataccaaatctttgcattttactagtcctcagtaccattcctttacccactctgcaggagaaagcaagcacaaaaacacaacttacacaccttctttcttttcttccacaatatgaaatgagtgtttactgccattacaggccctgtgctaaactttaggacgggaccaacaaactatgctttcagaccgcaggcccactgcctgtctttgtatggctcacaggctaaaatggctcttgcaattttaaatggttggggaaaaaggatcacaagaatactattcttcaacacatgaaaatgatggga

SEQ ID NO: 732778 - DNA, 582 bp, Homo sapiens
gagggaggtgagggttgaaaaattaccttttgggtacaatgtttactattccagtgatgggtacactaaatgcttagacctcatcactacgcaatatatgcacatgagaaatttgtacttacacatcttaaatctataaaaataaaatgcaacaaaaatgaaaatgtctctaggatctattccttcttctccagctctcagacaaattcttttgtctcccatttgatttcctccaaaaacttcccaaatccccttgccccaaactgacaggcatctcctctctgacctgccccctaaaatacttccacagtcatcattgcataccacaagtcccccagcaagattattttaaaaagaagatgctcgccaasacaagcaatcaccagaatgcacagaaaaatatgaggacctttggtttgttcctccacttggtaaaactcagaaagataatggcctatgttggcaacggtatgtgaagggaaggaggcgctttgggcactgctgaaggcagcacaaactggtgaggaatgtgcaacagacaatttggcaatatttatccaaattgattatgtgttctccttt

SEQ ID NO: 732779 - DNA, 566 bp, Homo sapiens
tggagcccctccttataccatatacaaaaatcaactcaagatgaattaaagacttaaatgtaaaaacccaaactataaaaaccctagaagaaaatctaggcaataccattcaggacatgggcacaggcaaatatttcatgacaaagatgccaaaagcagtagcaacaaaagcaaaaattgacaaatggaatctaattaaactaaagagcttctgtacagcaaagaaattatcatcagagtgaacagacagcttacagcatgggagaaaatttttgcagtatatccatctgacaaaggtctaatatycagcatctacaaggaacttaaacaaatttacaagaaaaaaaaacaacgccattaaaaaatgggcaaaggacgtggacagacacttctcaaaagaagaaatttatgtgggcaatgaacattttttttaaaaaagctcaacaccactgatcattagagaaatgcacatgaaaaccacaatgagataccatctcacaccagtcagaatggctattacttaaaggtcaaaaaacaacagatgatagcaaggttgtgaagaaaaa

SEQ ID NO: 732780 - DNA, 566 bp, Homo sapiens
tggagcccctccttataccatatacaaaaatcaactcaagatgaattaaagacttaaatgtaaaaacccaaactataaaaaccctagaagaaaatctaggcaataccattcaggacatgggcacaggcaaatatttcatgacaaagatgccaaaagcagtagcaacaaaagcaaaaattgacaaatggaatctaattaaactaaagagcttctgtacagcaaagaaattatcatcagagtgaacagacagcttacagcatgggagaaaatttttgcagtatatccatctgacaaaggtctaatattcagcatctacaaggaacttaaacaaatttacaagaaaaaaaaacaacgccattaaaaaatgggcaaaggacrtggacagacacttctcaaaagaagaaatttatgtgggcaatgaacattttttttaaaaaagctcaacaccactgatcattagagaaatgcacatgaaaaccacaatgagataccatctcacaccagtcagaatggctattacttaaaggtcaaaaaacaacagatgatagcaaggttgtgaagaaaaa

SEQ ID NO: 732781 - DNA, 577 bp, Homo sapiens
ttgttctattggtctctatgtctggttttatgccagtatcatgctgtttttattactgtagctttatactcaattttgaaatcaggtagtgtgatgcctttccagctttgttctttttgctgaaagtttggttatttggggtattctgtggtttcttatgagttttaggagtatttttctatttctgtgaaaaatgacactggaatttttttatggaaattgcgctgaatctacacatcactttgggtagtatggagattttaacaatagtttctaatccatgaacaccagatatttttctatttgtgtcttcaacttctttcatcaaagtcttatagttttcagtgaacaggttaattttattttattatattatatatattataaattctggttaaatttattcytaaataatttgatggtactgtaataatttgatggtactgtaaatggaattgttttcttgatttctttttcagatggtagtagtacctggaaacaatattggtttttactgcaactttactgaatttgtttattagtttaacaagtttttggtggcatctttagggtcttc

SEQ ID NO: 732782 - DNA, 651 bp, Homo sapiens
gagacatggagccaaagaagatcattttggaactttaagatttgattgcccagctggattttggacttgcatgggccctgtagcccctttgttttggccatttctcccatttggaacagctatatttacccaatacctgtacccccattgtgtctaggaagtaactrgcttgcttttgattttacaggctcataggcagaagggacttgccttgtctcatatgagactttggactgtggacttctgagttaatcctgatatgagtgaagactttaggggactgtttggatggcatgattggttttaaaatgtgaaaacatgagatttgggaggggccaggggaggaatgatgtggtttggctctgtgtccccatccaaatttcatcctgtggctcccataattcccacgtgctgtgggagggactcagtgggagatagctgaatcatgggggtgggtctttcctgtgctgttctcatgatggtgtataagtctcatgagatctgatggttttgaaaatggtagtttccttgcacaagctctctttctttggtgccatccatgtaagacttgacttgctcctccttgccttctgccatgactgtgaggccccccagccatgtggaacagtaagtccgttaaacctctttttc

SEQ ID NO: 732783 - DNA, 624 bp, Homo sapiens
aagcataataaagtcaaactcaggcagaagaatgtgattctaggagacagagagaggcaaattatttggcatgaggcctctgtgtttcccttaaatgagccgccccaggccctttgcacgtgttgctcctgccatcactgggtcttcatgtggtgccttcctgtctccattcaggactctgaccagaggtcacctctcagggatgccttctttgattcctgtccccagaagcttgtcatgcacctctaccttccaaccaccatggggttgattttttttatttcttccatatgtataaaaaaacaggatacaygtgcagaatgtgccagtttgttacataggtatccatgtgccatggtggtttgctgcacctattgacctgtcctctaaactccctcccctcaccgcctacccaccaacaggctctggtgtgtgttgttcccctctctgtgtccatgtgtgctcattgctgaactcccacttatgagtgagaatatgtggtgtttggttttctgttcctgtgttagtttgctgaggatgatggcttccagcttcatccatgtccctgcaaaggacatgatttcattcctttttttggctgcacagtagtccatgatgtatatg

SEQ ID NO: 732784 - DNA, 505 bp, Homo sapiens
gcatggcgaaaccccatctctactaaaaatagaaaaattagctgagcttcgtggctggagcctgtagtcccagatacttgggaggctgagccaggagaattgcttgaactcagaaggcagaggttgcagtgagccgagatcatgccgctgcactctagcctgggagacagagcgagactccatctcagaaaaaaaaaaaaaaaagaaaattgaattgggccagcccctccacacctgtgggtatttctcatcrggtgggacgagagactgagaaaagaaatgacacagagacgaagtatagagaaagaacagtgggcccaggggaccagcgctcagcatacagaggacccgcactggcgccagcccctgagttccctcagtatttattgatcattatttttactatcttaacaaggggagcgtagaaggacaacaggtggggagaaggtcagcagggaaacgtgcgcaaaggaatctgtatcatgaataagttcaaggaaaggta

SEQ ID NO: 732785 - DNA, 638 bp, Homo sapiens
ataaacatttatccttagatgctgagcgtgaatgtgagactgttagatgtaaaagaaaaaatattctgacacttgggtaaatggtgaggaagaatattcaagacaattgcaacaggggagagagacccaactctgaatatagcaatgatagttggttttttgtagacaattatcaaagtaaggcggtcagtgggtgggaaattacaaagaacaacttgattaggtatcaggagcagaatccttgctaaaggcaggccaaagatttagacattaagagtggaacatgggaaatctgatcaggtatcaaggatggggggattctcattacccttgttgaaactgggtgcaacacagtttcaacacagatgtccaaagtccaggcctagtcaggaagaggrctcagggaagcccaagtcaagtctggtcgaggagaaggtctttgccagatggcagtgtttcgatctattacactacagacattgtgggccacataatacattttcagggggaagagggctgtcctgtgcattgtaggatgtttagctgcatccctggcccctgcccactggagtcagtagcatactcaagtgtgataactcaaaatgtctgcagtcactgttaattttcccttgaggtgg

SEQ ID NO: 732786 - DNA, 638 bp, Homo sapiens
ataaacatttatccttagatgctgagcgtgaatgtgagactgttagatgtaaaagaaaaaatattctgacacttgggtaaatggtgaggaagaatattcaagacaattgcaacaggggagagagacccaactctgaatatagcaatgatagttggttttttgtagacaattatcaaagtaaggcggtcagtgggtgggaaattacaaagaacaacttgattaggtatcaggagcagaatccttgctaaaggcaggccaaagatttagacattaagagtggaacatgggaaatctgatcaggtatcaaggatggggggattctcattacccttgttgaaactgggtgcaacacagtttcaacacagatgtccaaagtccaggcctagtcaggaagaggactcagggaagccyaagtcaagtctggtcgaggagaaggtctttgccagatggcagtgtttcgatctattacactacagacattgtgggccacataatacattttcagggggaagagggctgtcctgtgcattgtaggatgtttagctgcatccctggcccctgcccactggagtcagtagcatactcaagtgtgataactcaaaatgtctgcagtcactgttaattttcccttgaggtgg

SEQ ID NO: 732787 - DNA, 513 bp, Homo sapiens
aactgcagaaatgtccctctgtagattttactaaaagagtgtttccaaccagcttaatgcaaacaaaaatttaacactgtaatataaatcctcaaattaccgagcatcttctctgatagctcgtttctagtatttatcgtggaatatttggttttttactatagggcttaattggctcggaaaagttccttcatagattctraaagaagtgtatttctaactgttgaatcaaaaccaaggtttaactctatgagatgaatcaacacatcacaaagcattttcacatagtttgcttctagtttttatcaagggatattcatttttttgctataagcctagatagcatcagaaatgttcctttgtagattctacaaaaagcctgtttcaaactgttgaatcaaaataaaagtttaactctgtgagatgtatccacaggttgcaaagcatgttaacagatgcttctttctattttttatcacaggatattcagtttattactataggcctcaatgg

SEQ ID NO: 732788 - DNA, 456 bp, Homo sapiens
cagtgaactagaccacttggctccctggcttcagccccctttccaggggagtgaacggttctgtctcgctggcattccaggtgccactggggtatgaaaaaaaaaaaacctcctacagctatctcgatgtctgcccaaacagccacccagttttgtgcttgaaacccagggccctggtggtgtaggcacctaagggaatctcctggtctgtgggttgtgaagaccatgggaaaagtctagtaactgggtcagaatgcactgtccctcacggcacagtccctcatggcttctgttggctaggggagggagttccctgaccccttgtacttcctgtgtgaggcatcaccccaccctgcttcggctcgccctctgtgggctgcacccactgtctaaccagtcccrgtgagattagccgggtacctcagttggaaatgcagaaatcacctgccttctgca

SEQ ID NO: 732789 - DNA, 597 bp, Homo sapiens
ttttaacatactctaatcactaactcccctattaagtgagggctccttgagggcaaggacagttctcctacagatgtttccccaggactgttacacatatacattcaaaaaatattggcactgtaacttaaatggcatacttactcatttcaaaacaatataatacaaaatagctatggtacataaagtttcataaaatttcaatgtcaaaataagggctttcaaaataaaattctcaaaatcgtgataaaacaatttgtatagatcttattctagtaattttatttcctgttttaaaacgtttaactgtaaatggkcaaatgaacaataggccactttataaggtactagatactacccaatccattttctagatcaactctacctactccatttcaaccaacttcccactctccaacaaactaataattacttcaaaacgccacattcatcactaagtttatcaaagatgttttaaagctacccatatcactaccaaataataaactatgttatttcaaaaagttctcaggattaacagagttataaatcaatcaaaacacctcccaatttcagtttactttaaaatgttactat

SEQ ID NO: 732790 - DNA, 585 bp, Homo sapiens
acttgggaacctgcccttatgcctgatccaccgctgccattgctagaatgcaagcaagccacttagaagcccaagaaatggcctgtctggactcattaacaccagtgccactctggcgctcaagatagacacactcacaccactgctgccaccactggggcccaaagattggcccacctggcatcctagtccccaacaaaacttcaccacagcttcctctaccaactgcaccctaagccactgaagaaatgacaggcaccattgatgctgcttacagcaaaaaaaattatacagaaactgcactactgcgtgtacccagaatcaaagccaaagtgcgctacccaaccaccaccatagattcctcttcaggaaaatgtccttccccamaaaagcaaattcaaaaaattagaagaagctactgttacattagatgagcagacgtaagacacagaaaacatgaaaaagcaaggaaatatgacacctccaagggaacgcaataattgtgcacaacagatatcaatcaaaaagaaattcatgaaatcctggaaaaagaatttaaaatattgatactaaagaatcacagtg

SEQ ID NO: 732791 - DNA, 607 bp, Homo sapiens
tggttgatggggtccttggcgacgtaggccacgtaatccgtcatgtcctgggggcggggaggggccagctggacctgcctgggccccccaccgggattcccagctgcccaccccagcaatgcagagagatggggcagtggatgtgggcacagggtacgttaggcgggctctggggaaggatgagagggtctcgcggccggaggggggcggcagggctgcaggtccacccccatccctggcctcaccgtgtctccgcctgacgcgaaggagatggacggcatgtggtggttggcgatgacctgtggyggcaggaggcacacgcggtcatgggggccccgcttcgagggcagggggcccggcagatggaccaggaccacagcgaagagtggggcaggggcagggatgtggggatggagacgtctcctggacaggcacccactgcagccgggtcctgggtcagcctggacgaccgaggctgggatgtggagtccccagcaaggaagggactagggccctaagggatgtgtggggtccgcaggaggtcacacgggaatgtgtgtgagaggacaaacctcccccactgtaacacttcacacatgtacctgcc

SEQ ID NO: 732792 - DNA, 618 bp, Homo sapiens
cggcctcccctcgccctgggtctctcttctggtctctcagaccccctggccactggagggctacgggtctggctctggagggcggcgttcgggtctcttttctgtgacatcaatagacacgttaaggccgrgctcggtggctcatgcctgtaatcccagcactttgggaggccaaggcaggaggatcacaaggtcagaagatcgagaccatcctggctaacatggtgaaaccccatctctactaaaaatacaaaaaattagccaggcgtggtggcgggcgcctgtagtcccagctactcgggaggctgaggcaggagaatggcgtgaacccgggaggcggagcttgcagtgagccgagatcgcgccactgcacttcagtctgggcgggagtgcgagactccgtctcaaaaaaaaaaaaaaaaaaaagacacattaaatgagtaagcacatgtgatgctgacagctctccagcccaggaaaggtttattggctaagcaactgtagaaggtggagtgggaaaggcacaggcctcggggctgcctccagcctgagtttgggctgggaccggggctaacccaagctgtgatggggatccaggccctagtggagctggacgcc

SEQ ID NO: 732793 - DNA, 618 bp, Homo sapiens
cggcctcccctcgccctgggtctctcttctggtctctcagaccccctggccactggagggctacgggtctggctctggagggcggcgttcgggtctcttttctgtgacatcaatagacacgttaaggccgggctcggtggctcatgcctgtaatcccagcactttgggaggccaaggcaggaggatcacaaggtcagaagatcgagaccatcctggctaacatggtgaaaccccatctctactaaaaatacaaaaaattagccaggcgtggtggcgggcgcctgtagtcccagctactcgggaggctgaggcaggagaatggcgtgaacccgggaggcggagcttgcagtgagccgagatcgcgccactgcacttcagtctgggcgggagtgcgagactccgtctcaaaaaaaaaaaaaaaaaaaagacacrttaaatgagtaagcacatgtgatgctgacagctctccagcccaggaaaggtttattggctaagcaactgtagaaggtggagtgggaaaggcacaggcctcggggctgcctccagcctgagtttgggctgggaccggggctaacccaagctgtgatggggatccaggccctagtggagctggacgcc

SEQ ID NO: 732794 - DNA, 505 bp, Homo sapiens
ttggtaatgcaaggagttttaactctgagccaggcactgtccaaagcacttaacaggaattaaccaatctgatcctcaaaacaatggatagggaccattattcgccttatttaacagccgaggaaagcgcccagaggcgagttctcagagcaagaaagccaggttttaagtgcaaagggtgtcggtcaaagttactggttgctattgacccgaagttgggtgagagtttctgtcctgagctctgcccctctccccctggcttttgggacctgagattctcggaagccaagccttgtcctggtttctgaaacacccycaaccgcgtcccgacactgaccagccgccggaacagcctctgcagttgcgccgcgtcctcccggagcctgccggccacgcggctgcgggtccgcgccgagctgcagcgcaggcgcccacggagcaggggccgcacgtactcgaccagcgcccgccggtgtagctcggctaccagcgcctggaggcggag

SEQ ID NO: 732795 - DNA, 634 bp, Homo sapiens
acagttaaggttcttcagatcatggtctctttctttttcttctcccctcccccatcctacttataattattcagacagaatgaaagtttgctgcaggcacaggtgaaaattttccacccgtgtccctatttcatagcaggatcttaagataagaccaaggagaatgatctttggaaaagtactttcttaagagcagcgaatggctgaacgtagtggctcatgcctataatcccagcactttgagaggtcaaggcgtgtgaatcacctgaggtcaggagtttgagattagcccgaccaacaaggtgaatccccatctctactaaaaacacaaaaattagccaggcgtggtggcaggcatctgtagtcccagctactcgggaggctgggacaggcctgggaggcagaggttgcagtgaactgagattgcgccactacactcgcctgggcaatggagcaagactccatctaaaaaacaaaacaaamcaaacaaacaaacaaacaaaaaagcagcgagaagagagagaagagaagtaaggccctcttcctggtaacatcttgctctactcctattcccgatgtgggccaccattagcgctgctatgtggagcagaatttgtgcatgcaccagagatta

SEQ ID NO: 732796 - DNA, 621 bp, Homo sapiens
gtgatttatgttagtgttttagagttgcttaatattcactcatgattgatatgcaattagcttggatcctgttgctttttttaatgattctttttttagaattttatgtggagaaggggcttttgaaatcatttagccccagacagctggttaatgacagacttggagcgaggaggcgcattctctgatttgagagggctggggcagccctgcagctgaggggcagaagtgagtgtgggtgtgggcacaggggaagaggcttctttgttgctcagcactacattgtaaagagtacaggaattttgggtaagctcgatacggccacctatgtgtctgcttattacaccaagtgtgtacctgctttggagagcatgttaggggtgagttaatggttgtaaagccccaaaatagcttgatttaaaaagttttactaacagtggcatttgtgtggtacttagattcatgatwtcagggattctaacagcaaaactctgatgtggacttatctacattttgtagaccaggaaaatgagactcagagtggtttaatgacttgtctcaggtcatgcagctactcagcagtccagctggaattgaatcctagttaaatctggctccaaa

SEQ ID NO: 732797 - DNA, 652 bp, Homo sapiens
aagttgaaacaaagaaatataaataactttcccaaggcagtatagttagtaagcaccagagctgatgtttgaacccaaatctgctaactgtagagggtttgcaccaaccaaagcccaccaaatctctgcagggaggatgaagccaaggtcagaactttgccattgagttctttgccatcgagttctttgccatmgagttctttgccattgagttctttgccaacaattttccccctcagtctaggcagaggtgtgcctctgttttagtggcattggaggtagaaatgttgacatggtatggtggtagagggatcccacggagggaaagagctcattaattctgctgagactctagggtccatagcccacagacaattcattagccacaaattatggtaaaaggggcaggggaatatctataggaaatatgccaacaatagtcatcactgtggtaggtaaaagaggtcactcattgcttctttctgtcaacaggaagaaaaaggacagtgtctctactcccacctccagtgagtcccgggcatcctgatagtcctctcaggcttatgattcatctattcaggacctcagtttttaaagttctcagcttcctccttttctatttagttattctgagatggagcacactgtagta

SEQ ID NO: 732798 - DNA, 646 bp, Homo sapiens
cttgcagtgagctgagatcgcgccaccgcactccagcctgggcgacaggagactccgtctcaaaaaaaaaaaaaagaatttctaggccaggcgtggtggctcatgcctgtaatcccagcactttgggaggccgaggcaggtggatcatttgaggtcaggagtttgagaccagcttggcctacgtggtgaaaccccctctttactaaaaatacaaaaagtagctgggcgtggtggcatgtgcctgcaatcccagctactcgggaggctgagrcaggagaattgcttgaaccggggaggtggaggttgcagtgagccaagatcgcaccactgcactccagcctgggcgacagagtgagactgtctcaaaaaaagaaaaaaaaaaaagaaagaaaaagaatttcagacagcagttcaagggctaaaaaatctttaacatagctgctaaagtgagagaggatttggcaccatgaacaatatagttgattacatacgtcataatatacaaacaatttaatggggaaattatcagaagcttatacaaggctcttttgtcaaatcatggctaacataggcatatatcacttaaccaataattaccacctaagaaatgcaaaaaatgtttaaaaatcaataaataatttggaaa

SEQ ID NO: 732799 - DNA, 546 bp, Homo sapiens
cttcttcactttgaaggataattttagagagtatagaattctagattggtggttttctttctctcaacactttaaacgtttcacttcactctcttgtttgtatggtttctgagaagtcaaacataatccttatgttttctcctctataggtaagattttttttccctttagmttctttcaggattttttttaaatctttggttttctgaagtttgaatatcatatgcttacatacaatttgtttttatttttgttttcatttgtcctgcttggtgttttctaaccttcctggatttgtggtttggtgtcttacatcaatttggagaaattcctcatcattattatttcaaatatttcttcccttcctttctctctctgttctccttctggtgttcccattacatgcatttacaccttttgtagttgtcccatagtccttggatgtactgttctgttttgtttgtttgtttgttttcttagtcttttttctctttttcagtgtagggggtttctactgagatatccttaagcttagaagttctctcc

SEQ ID NO: 732800 - DNA, 593 bp, Homo sapiens
tagaatctacatgttgaaaattacaaaatgttggtgaaagacaagaagacctaaatatcatgtttatgggttagaagatttagtaaagataccagtcctccctaaactgttctacagtgttatcgtatttcctatcagaagcttagtaaggtatttcatagaagtatgtacttttactctaaaatgtataccaaaagaaaaagaccttaaacagccaaamcgattttgaaaaaagaagaagaaagttcatcttccttttattaaagtttactatatagctacagtaatatatagctacagtaatcaagacagtgtggtattgatagcaagatagacaaagctaagtggtataaaacagagaaagcggaagtatgaccacatgagtatgatcaattaattttggcagaagtacaaataaatcattaaccttttcaataaatgctattagagcaattgaacaaccataggcaaaaacatgaaccttaacctaagcttcacatcttatacaaaaaaaattaactaaaaatgaatcacagacttaaatgtaaaacataaaactataaaatttctagaaaaaaaactgcagaagatct

SEQ ID NO: 732801 - DNA, 612 bp, Homo sapiens
atagtcatcagggcctctaaagtcaatatgaaggaaaaacttctaaaatcatcaagaaaaaagcatctaatcacctataaaggaaatcccttcagattaacagtaaacttctcagcagaacctttacaagccactatagattggggtcctattttcagactycctaaagacaaaaactgtcaaccacaaattttgtatcctcctaaatttaagctttataaaagaaagagaaataaaatatttcccagacaagcaaatgctaaactaattcatcaccactagaccagtcctacaagaaatgttttaaggagttcaaaacttggaaacaaaaggtcaatgctcactattgtaaaaacaaatgaatgtacaaaataattcacaggtcttataaaacaattacacaattgacactacaaagccactaggtaacaattaacattatgacagggacaaaacctcacatatcaacattaaccttgaatgtgaacggatgaaatcaggagtgtcaatcttttggtttccctgggcaacattgaaagaaaaataattgtcttgggccacacataaaatacactaacactaatgatagctgatgagctaaaagaaaatgca

SEQ ID NO: 732802 - DNA, 640 bp, Homo sapiens
caacattaaccttgaatgtgaacggatgaaatcaggagtgtcaatcttttggtttccctgggcaacattgaaagaaaaataattgtcttgggccacacataaaatacactaacactaatgatagctgatgagctaaaagaaaatgcaaaaaagactctaacagttaaaaaaaaaagacaaagaaggtgatatggtcttgctctgtgtcccatccaaatctcatgctgagttataattcccagtgttgggagagggtcctgatgggaggtgattggaccatgggggttggttttccccttgctactctcatgatgatgaatgagttctcacaatatctggttgtttgaaagtgcgtagcacttcccccttccctatctctctcctgctccaccatggtaagacatgcttgcttcccattcaccttccaccatrattgtaagtttcctgaggcctgccagccatgcttcctgtaaagcctgtgggactttgagtcaattaaacccattttcttcataaattacccagtctcaggtagttctttctagctgtgtgaaaatggagtaataaagaaggccattatataaagatatagggatcaattccatgagaaaatgtaacagttctaaatatatatgcaccc

SEQ ID NO: 732803 - DNA, 601 bp, Homo sapiens
gtgcctgttacccagttccaaagtcgcttccacatttttgggtatcttttcaacagtgccctactctactggtaccaacttacggtattagtccgtttttacactgctgataaatacatacccaagactgggaaatttacacaggtaaaagggtttaatggacttacagttccacatggctagggaggcttcacaatcatggcagaaggtgaggaggagaaagtcggagcaagtcacatcttgcatggatgtcagcaggcaaaaaaaaagcacttgagcrcttgtgcagggaaacgcccccttataaaaccgtcagatctcatgagacttatccactatcatgagactatcacaggaaatacctgcccccgtgactcaattaccttccaccaggtccctcccgcaacacatgggaattcaagatgagattttggtgggaactcagctaaaccatatcataatgttattccttttctctatcagtattactagtaatttattatttttattcaattttaaatgaaaatgcgtgactgttgatattatgtgtcatttattcaatttctatttcattgactttagttatcattaatttatcttt

SEQ ID NO: 732804 - DNA, 601 bp, Homo sapiens
gtgcctgttacccagttccaaagtcgcttccacatttttgggtatcttttcaacagtgccctactctactggtaccaacttacggtattagtccgtttttacactgctgataaatacatacccaagactgggaaatttacacaggtaaaagggtttaatggacttacagttccacatggctagggaggcttcacaatcatggcagaaggtgaggaggagaaagtcggagcaagtcacatcttgcatggatgtcagcaggcaaaaaaaaagcacttgagcacttgtgyagggaaacgcccccttataaaaccgtcagatctcatgagacttatccactatcatgagactatcacaggaaatacctgcccccgtgactcaattaccttccaccaggtccctcccgcaacacatgggaattcaagatgagattttggtgggaactcagctaaaccatatcataatgttattccttttctctatcagtattactagtaatttattatttttattcaattttaaatgaaaatgcgtgactgttgatattatgtgtcatttattcaatttctatttcattgactttagttatcattaatttatcttt

SEQ ID NO: 732805 - DNA, 586 bp, Homo sapiens
attggataaatacagccattccaaataggagttattggccaaaatgaaagggctacaggccccatgcaactcctaaatccagtgcagcaatcaaatgttaaagctccaaaataatctgctttgattctatgtctcacatcctggtcacactgatgcaagaggtgggctcccacagccttsagcagctccacccccatggctctacagggtatagccccctctcccagctgctttcatgggctggcattgagtctgcagcttttctaggtgtacagtgcaaatgggtacaagctgttagtggatccaccattctggggttttgcagctccactaggtggtacccccacggggactctgtttgaggctctgaccccacatttcccttctgcactgccctagcagaggttctccatgagggctccactcttgaagcaaacttcttcctggccatctaggcttttccatacatcctctaaaatttaggtggaggttcccaaacctcaattcttgacttctgtgcaccaatgggcccaatatcattttaataaagaaccaagctgatctgaaagaggtgaaaaactgaaaa

SEQ ID NO: 732806 - DNA, 621 bp, Homo sapiens
aacagcaaaatcgagcaagctgaggaaagactctccaagttcaaagatcagttctctgaaatagtcagacaaaagcaaagaacaaatattaaagaagaataaacaacacctctgagaaatacgagattatgtaaagagatcaaatctatgactcactggcatccctgaaagagaaagtaagcaatttgcaaaacatatcttaggatattgtagatgaaaatttttccaatcttgctagaaaggcaaacattcaaatttaggaaatgcagagaaaccttgtgagatatcwcacacacacacacacacacacacacacacacacacacacacaaaatcccaagacacatagtcatcagattctccatggtctcaataaaagaaaaaatgttaaagacagctagagagaatgacaagtcctctacaaaaggaaacccttcatgctaacagcagacttttttttagcagaaaccctgcaagccagaagagattgggggcctatgttcagcatgcttaaagaaaagaaattccaaccaagaatttcatatccggccaaactaagcttctataagcaaaggagaaataataatcttttcagataagcaaatgctgagggaatttgct

SEQ ID NO: 732807 - DNA, 604 bp, Homo sapiens
gccagaagagattgggggcctatgttcagcatgcttaaagaaaagaaattccaaccaagaatttcatatccggccaaactaagcttctataagcaaaggagaaataataatcttttcagataagcaaatgctgagggaatttgctgcctaccagacatgccttacaagaggtcctgaagggagtgctaaatatggaaaagaaagatcattactgaccrctacaaaacacacataagtacatagaccattgacattataaagcaaccatgcaaacaagtctgcataataaccagctaacaatataatgacaggatcaaatttgcacatgtcaatattaaccttgaatataaacaaactaaatgtccccatcaaaaggcacagagtggcaagttggataaagaagcaagactcaacaagatgctgtctgcaagagacccatgtcatgagcaatgacactaatagaaaagcataaatctttttttttttttttagacggagtcttgctttgttgcccaggctggagtgcagtggcatgatcttggctcactgcaacctctgcctcccaggttcaagtaattctcctgcctcagcctcccaagtagct

SEQ ID NO: 732808 - DNA, 604 bp, Homo sapiens
gccagaagagattgggggcctatgttcagcatgcttaaagaaaagaaattccaaccaagaatttcatatccggccaaactaagcttctataagcaaaggagaaataataatcttttcagataagcaaatgctgagggaatttgctgcctaccagacatgccttacaagaggtcctgaagggagtgctaaatatggaaaagaaagatcattactgaccgctacaaaacacacataagtacatagaccattgacattataaagcaaccatgcaaacaagtctgcataataaccagctaacaatataatgacaggatcaaatttgcacatgtcaatattaaccttgaatataaacaaactaaatgtccccatcaaaaggcacagagtggcaagttggataaagaagcaagactcaacargatgctgtctgcaagagacccatgtcatgagcaatgacactaatagaaaagcataaatctttttttttttttttagacggagtcttgctttgttgcccaggctggagtgcagtggcatgatcttggctcactgcaacctctgcctcccaggttcaagtaattctcctgcctcagcctcccaagtagct

SEQ ID NO: 732809 - DNA, 540 bp, Homo sapiens
gttgtatgaaacaatagctcattccttcttattgttgagtattattgcattatttgtttctccattcttttgtcagaggacatcttggtcacttctagttttagtgattatgaataaaactgctataaaagtttttatatgtgaacataagttttcaagttacctggaggaatacttacaagtataattgctgggccatatggcaagtccatatttaacaacaacaaaataaaaaaaacacaaaaatggccaaactgccacccaaagtgcatgaatcactttgaattcctgtaagcgataaatgttctatatccttgyctgcatttggtattgtctgttatttagattttagttattttaatggatgtttagtggcatctcattatcgtgtttgtgtttttgtttttgagacagagtctccctctgttgcccaggctggagggcagtggcgcaatctctgcttactgcaacctctatctcctggcttcaagcaactgccctgtctcagcctcccaagtagctggggttacaggcatgcac

SEQ ID NO: 732810 - DNA, 622 bp, Homo sapiens
attttctttagctgtttgttagctgtttaatctttttattctttgtgacattttgttggatattaaaagactcctaatattgcatattaattttctacccacgactttactgtataacttagtgtttataatattctcttcatttacctgatatagtatcaaaaacaagtaataaacttaccttctttccaatttctgtaattcacttctttcttttctcaytgaagttgctatttaaatagcaacactcaaagtcactcttgagctaaggtgtcttgataaattcattaggtcattttggaatttttttttttttttgtgaaagcagtatactttagaatgctttgaagtactaatgaacagaatgaatgaaagcatgcctaggaggggaatgcctgtgagagagttctgaaacagagcaattgacttatgtggccctgagtgttccaagaaatgatgtgttaacctcattttaccaatgaagtaatcaaggcagaagcagcatcagccttttgttctttcctttgttttatctaacattgtttggtttgctgtctttctcttaaccggtttctgatgttgcttgaggtatttaagctgctctggcatcaagtttcccttt

SEQ ID NO: 732811 - DNA, 583 bp, Homo sapiens
ggaaagaaatccccacattgaggaatttttaagttgggatttcggagggagcgggatgcatatgtatgtatgtgtgtgtagtccaaaagggaaaagagaattaatggaaaaaagaaggtaaaactaaaaccaagcaaaaaaaaaaaaaaaaaaaaaaaaaaaagaaagtgcatttaggaactgaaagacgttagtatggatgaaatttaragtacgggtagggaaactttccctgacagggccatgtagcaagtgatttaggcttttgtggcccataaattctatgacacgactactcaaccctgtctttgtagaaaaagcagccaaagacattccagaaacaaataagcatcactgtgctccaacaaaaatttatgtttaaaattgatagctgatctacaggatgtagtttgatggtccatagtttagagtgtgggggaccacactggtacaccaggacttggtggaagagcatttgaaagctataatataaagcacagataatcataaagacaatatacaatcactggctcgtatttagcagatgagaaatatgatttttttcacattttagaaactctct

SEQ ID NO: 732812 - DNA, 583 bp, Homo sapiens
ggaaagaaatccccacattgaggaatttttaagttgggatttcggagggagcgggatgcatatgtatgtatgtgtgtgtagtccaaaagggaaaagagaattaatggaaaaaagaaggtaaaactaaaaccaagcaaaaaaaaaaaaaaaaaaaaaaaaaaaagaaagtgcatttaggaactgaaagacgttagtatggatgaaatttagagtacgggtagggaaactttccctgacagggccatgtagcaagtgatttaggcttttgtggcccataaattctatgacacgactactcaaccctgtctttgtagaaaaagcagccaaagacattccaraaacaaataagcatcactgtgctccaacaaaaatttatgtttaaaattgatagctgatctacaggatgtagtttgatggtccatagtttagagtgtgggggaccacactggtacaccaggacttggtggaagagcatttgaaagctataatataaagcacagataatcataaagacaatatacaatcactggctcgtatttagcagatgagaaatatgatttttttcacattttagaaactctct

SEQ ID NO: 732813 - DNA, 636 bp, Homo sapiens
ataggcctctggcaataaccttatttctgtgattgtatttgtacctctctcttttctggcttcattttgcaagggaaagcaataggttctttctcccctaggttagatgcattctctcccgggactctcatcttctatatggattcagttgtatagaaatgactgttctctctagctcattcatcctgataagccacactctcttaagtgccatatattctgcttgccatatgattttgtgcttatagcacaaatcacttttgcactgttataaacaagcaaaggtttattgatgatatgtgatgagatgtccaataaaaaatgtttaaactcacaagaaataatcagatagtatttcttacattccaaagatctgccatgggatcctttaactatggaatttctatgacaattattaatttctatcatttagtcgtaaacatgttacctgattccttcattaggaaatyacttattatcaactttataggtagaattatagataagattctaggaaactgtaaaaatttaagataaataataatttaatttgtcaatttagaagtaccctcctacatctcaatattaacaaccatattttcttctatacagtgcacagaattaatatagtataca

SEQ ID NO: 732814 - DNA, 667 bp, Homo sapiens
gtatgagaaagggatcctggtgctaacttctgcaggggcttagctcttgtcattttaaggaagccgaggggtaaaaaggagcaatatgcaggcatgaagaggcagggaacttttagcacctgtgcagttcgacaacatgcctcttcatgcatttcatgtctcatgttaaatttccacctctgggtgtaatgacattatagtgaggaaaaactcagtgaaagctcagcactagaggccatcttgtctttagctggctggrtctgattagatttttatcaggaatgctggagtcccgctttgacaatctttggagaagtaactcaaggaaataaatgggtaggttctttctttcatggttgggaattcagcttggtcagctaagttaggaggaggcatctttctgctacataacttgggtcagcttattaagggaggcaagaaggtaagggagggaatatgcctggacatgtgacgcccatgtggtcttgaaaacgggaaaggtttccttgtccccttagcagggcatgtagtgggggctgtggcttgcttcagtgccccaacactcaaaccttgtgggagcatacagatgggcaggctgtggggctgtgacccgacagcaatgtctagaggtcaatgatcacagctcctgaagccccagtgggcgtgt

SEQ ID NO: 732815 - DNA, 622 bp, Homo sapiens
aggggtggcgtctctgacactcagatttctcaaggatgcttactggtttatgggtcactcacgtccatggatcttacttctcttaactgagtttctgaaaagaactaggctggagtagctttgatatcatatcttttaattaacaaatgtattgagtatagctscttggtgttgccggccaaggaaaaaccataaacttacataatcgggattgtcctcctatggcataaactttaccagaaagctgaatcacttctgcttgggcataaactgagagttaatttttccacagcactacagtattcctcaagacatcattgtggatgttttctaataagacatttttaaaggcgtggtcagagtcttgagtttttactgctagagattgactgtattttattatatatgtaatttgatggacatctaaactatgactttctgttttggaaaacattcatagagtatctagtgctgaaccatgtaatttatcctctagtctcaagataaacaggttataatgtacagattttagcttccgctactaaatatgatttaatacttggtaatcatacagcaaatagttaaagataaaagtctctaaagtacctcaaaaaaattttct

SEQ ID NO: 732816 - DNA, 622 bp, Homo sapiens
aggggtggcgtctctgacactcagatttctcaaggatgcttactggtttatgggtcactcacgtccatggatcttacttctcttaactgagtttctgaaaagaactaggctggagtagctttgatatcatatcttttaattaacaaatgtattgagtatagctccttgktgttgccggccaaggaaaaaccataaacttacataatcgggattgtcctcctatggcataaactttaccagaaagctgaatcacttctgcttgggcataaactgagagttaatttttccacagcactacagtattcctcaagacatcattgtggatgttttctaataagacatttttaaaggcgtggtcagagtcttgagtttttactgctagagattgactgtattttattatatatgtaatttgatggacatctaaactatgactttctgttttggaaaacattcatagagtatctagtgctgaaccatgtaatttatcctctagtctcaagataaacaggttataatgtacagattttagcttccgctactaaatatgatttaatacttggtaatcatacagcaaatagttaaagataaaagtctctaaagtacctcaaaaaaattttct

SEQ ID NO: 732817 - DNA, 617 bp, Homo sapiens
tttttgttttgttttgtttttattttttatttttttcataaagaaagtttaagccatcttgtaagggaaagctttgttttaaggttcatgaagttgcatctgtgctaaggtggccttgtgtctagagtagccagggtttttgtcatagagaccattgtcatagagacctggtaatctcctggccagggctggaaatccccaggccaggttgcatcatcttrctcggcaacacatagtgtaggacttgtaagatgtttgagtgagcctgtggctattcttaatcttctagccacttattagccacttgagccaatcttaatcttataaagagacatagagatatgtcttttatagttataccataactttaaatgtcatctatttgtttcgctaaaattttcagtgtttaaagaatggtgttttggttacccagaggcaatgttttaaatttagaacttttaatgttgaggtactgccatattccttttgttttaaagacagtgtatactctctctaagtatgctgtttcactccggcaacttccctaatgaagtaaatttaaagaaacagttcttatttaaaaagtttaatgacttaaatttgtaagcaaatgatat

SEQ ID NO: 732818 - DNA, 568 bp, Homo sapiens
gtctatttttaagcctttcttttataaggctaggaaataaggttatacaaagtttagctcgctttttgtaagataatctaaaagcaccttttccaccttctgttctcagaattggcagtgaaaaattgttctgatcacagtttcttgaagtataattactttgtcaaaagaaaatawaattagaactattttaaaaagtgctttaattgtatttaaagatttgataatttgttcatgtataaaacgttctgttaatttagcaacaagcagcagtagtgaagtcaggaaatgatctgacagtttttctctttcctgttttaaaaataccatctattctacccttttgtctattcaaagcgacatagtcaatttcagcagtggattgaattaaatgcttgacacagctttatgagcatcaggtccatttatttcctctgtcccactgcatttttttcacacatctcataccataactgaggcagaataacaacaatatgtccaatacaccccttcagatctcttcattcataaactcaattagcataaatctgtttcttctttctcatcc

SEQ ID NO: 732819 - DNA, 612 bp, Homo sapiens
ccccatgcatatgcacacattttgtcagatgctgattcagcattttgccttcctaggttataggtgagtaagttctttaaggaaagtctcagttattgctttacttaccaaaaattcttttgatcataatgtttttggaaagcccagattcttttcatatttaatttcttgtcctcattttcattcctaaatattaacaccttatttgatgtggattagataggacttttgatataatttcaattctatttctgtaaagagcaactcatatatatctttgaaaaatatttatcctgattaacttatcataaataatagaaacataaaactttaacatgaagtatgtaggacacactatattaaaatattgctacttttctagtaatactagtagtatttagtgacaatatgctaatttagataatgtgtatatatatatatatacacacacacacacacamataattaacatactcctaaacctctacagtgcacttgaattttgaagcacatatgcctatcaagtttaatgacagataaaatcagatctaaaagtcagatataagtctaatggcattaagaatactttttataaggaacccataagtgaat

SEQ ID NO: 732820 - DNA, 547 bp, Homo sapiens
acccatgaggaggtatgttaaactcaaacaaactacttgagtttttaatttatacagacagaaatctggagaacatgtacgaaattgataactaaggatgtgggataatggtggaaggaacttaatgttggatcaggctgaatttggcatggactcattaagcaaaggttctgcattaaatgttgcagcttgtggagtttgattctaacaggttggttggttaactgctgagatatggaccaaaaggtagtccggcatgagaaagttgaaaatacttggcatgccttatkgcaatgtagaagaaatacaaaggcttagggatatattgtaatgttagggtagatttgtcatttaaggcctacttacccatagtgggagagtccagaaggcatacctttcaccaatactgtgaataataaatttgtcagtggagccctgtcatccttaaagatctctgtgatcactgtctgtaggccagacctcagagtgggaactgtagtcactgcattgagaagcctaaaggcaattggagtaattggatcctgga

SEQ ID NO: 732821 - DNA, 651 bp, Homo sapiens
aagctgttgttatatgacaggctattctacagtgtatttagaggttgatagaatcatagagaaaataagaattgtaggtgtgggtctacagaatagaggaaatccttgaaatcaatcaactttagagctagtgagttgatagaaggttaaatattaactacgaaataacagatcaaagtgttagtttcttccacaattgttctaacaaacacaaaattgcaaattaaagacttgaacttctgattatgacaatctatttctacttaccttgttctttcatctcagaaatcagagatgtcttcaaatatatttttctacataatatcttaattataattggataattcaatccattttcagctgaatttaccaagcatttaacccaatttacctattctattgtaaatagtacttttwaaaaaaatttaagaattacatatatgtctaattatctcatctcatacaattacaaagagtctcagatatctttgtatgttaaaagaaaattaagttaaaaaaactattcaaaatttgtaaagaaacagtgagatttctatataaaataaattaggtagggtatacaattaggcaaattaatggatacagtattgaaatatgtagataagctacaatatataattattaattgat

SEQ ID NO: 732822 - DNA, 513 bp, Homo sapiens
aactggatggtcccattggggatgatgggagacagtgacagatatcggatattatattttcataaggagcacacaacctagtcccttgcatgtgcagtttacaatagggtttgtgctcccgtgacatctaataccaccctactctgacaggaggcraggctcaggtggtaatgcaagcgatggcgagtggctgtaaatacagaggaaatttcactggctcacctgcctctcagcttttgctgtgcagcctggttcctaacaggccatggtaccagtacaggtcagtggcaggggtattgaggacccctgttttagatcaactaagctctccataaatacgttagaaaaagttcacaatttaagcaaatgatccaggcaatttttcccttccttaaaattaactctctatgcaaaacaaaactacaagtgagctcttacctctgtattatatcaacaaatgataaactattaggaggaggattgaaggaacacaaacacggaggtcccttgggc

SEQ ID NO: 732823 - DNA, 500 bp, Homo sapiens
agttccctttgaccacttatgggattataacttcagcatttctccttactgctgctgcctgaggcagcctatttgattttgcctacatcgctctggggcttgcacgaagtagcagtgttaaacttgcagtgaaagtgagccaagcctttaagtgcctactcaaacaacttggctgacctcatcatccttcttcttactaacacctggaaatggattcggcctgggagaaatagatccttttcttcgtggaagcttctgcctataacttctaattattccrtgggactctcgatgctttcaaaatgagtccatattccccgtcaatcagaactatcttaaacctctcttaaaggaaacactttcaaaattatcctttcttggaccagttgattccaggaattaccatactttatattttgtcttagtcatatcaaacattttcacctttcatgaataatttgaacttaaagcagaatggggcttcctggtccctatattca

SEQ ID NO: 732824 - DNA, 620 bp, Homo sapiens
tcatttaatagccgagtcctgaaaatgtagacattcttgaatgactacattagagtaaatgaaaacaaatcatttactccaagggattgcctcttaagtgtcataaagcctatttagtccatatttggggaaacaagtttccagaaaagtcagagatgaaatcaggaaaaggccatgctctgaaatggaggctagtaaatctcgccacagtcaatgagttgccatgttaccaatgtctctttatagaatattgtaagatgtaggatctgtatctaagtccaccagtatcattctgatgttataattgtactttacgtgttggacatgaaattacagtggctgttgtcattaaaagcatcaaacaatttaagaataagaagaagctagtacatatccaagattgcccaaaggagacaatattacggttttagayaactcatacattttagcaagaaatatttctacagtggcgaagacaattgatatagctactctagtgtgattaaaaatgtccatttagagcacctgaaaatgtgttgtaattctgtgcacccaactgaactactgttctaaaacttaatttacaaaacagattttcagggagagtggttgaagcaaca

SEQ ID NO: 732825 - DNA, 626 bp, Homo sapiens
aaattgataagtatcaattgctgctttgaagagcaaattgatttgagatttaggatgaggaaaatgaatatcaataaagtcattcacagtaatattttattaaatttttataaatgtgttaacttcaacagtttagaccttggaggcactttgtttctttgggacctctttacaatttaaaaattattttgttgttactgttatggtcaggaaraaatgaaacccacaaggcttaaacctaagagattacacacatatattctaaaatctcacaattgtattattttctgttgaattcattagaggtaagatcttacagaattttatttggctcttagtacatggctataaggcatgcaaacccaagtaaaatgttaacagtgttgctttgttgaacagggattataaactatatactctcagtgtattttagcaatgcaaacataatgtttaaaccgctacaaaataaaaatgtaggtactgtaatttatatttactgacaaatagcttagctcagctctacaactaatttctgatgataatcgtaatttgtttggtgtgtggagaaatatcattggccatcataaagaggtttggaagtagattagcatttaatcaaatataag

SEQ ID NO: 732826 - DNA, 566 bp, Homo sapiens
catgtcaacatcagttattttttgatttttttattatggccattcttgcaggagtaaggtggtatttcgttgtggttttgatttgcatttccctgataattagtgatgttgagcattttttcatatgtctgttggccatttgtatatcttcttttgagaatcatctattcatattcttagcacactatttgatgggattgtttgtttttttcttgataattttgtgagttccttgtagattctagatattagtcctttgtcagatgaatagattgtgaagattttctcctactctgtgggttggaaagatgacacaaatttctaataagagaaatgacagaaagacagcattaaaatcccacaggcatttaagtgataataaagggatgctatgagcaaaattatgcacacawatttgatagactgggtgaaatgaatcaattccttgaaagacataattatctgccaaagttcacataagaagatatagatattaattggtctatatcttttaaaacatttaatcaataattaacaacttttaaagagaggaaacaccaggccca

SEQ ID NO: 732827 - DNA, 637 bp, Homo sapiens
ataaaagaaagaagtgataagctgtactttaccatagactgaaagaaaatatttgcataaggtacatctgataaaggaagttatctaaagtacacaaagaactcttaaaattcaacaataagaaaacaaaccaatggataaaagaaacgtgcaaaatacctgaacagatacatcatcaaaaaatgtacagatggcaagcatttgaaaagatgttcaacattgtatgcaattaggaatttcaaattaaaacagtactggtatcccactacacatattttagaatggccaaaatccaaaacactgacaacaccaaatggtggtgaggatgtggaacaacagaaactctcattcattggggatgagaatgaaagatggtgcagctcccttggaattgtggtttcttacaaaataaatataagatccagtcattgcattctttagygtttacccaaatgaactgaaaacttacgctcacacaaaagctattacatggatgtttattattggagcgttatcctcaattgtcaaaagttggatgcaaccaagaaggccttcaataggatgaatagataaaaaattggggtacatcaggcaatagaatatttttcagcaatgaaaagaaattagctatcaagcc

SEQ ID NO: 732828 - DNA, 642 bp, Homo sapiens
agaaggaaatttaaatgccttttactaaatgaaataaaccatcttaaaagtctacatacggcatgatttcaactatatgacattctggaaaaagcaaaattatgatgacaatattagtggttgccacaggttagcagacaggaaggtatgagtatgcagatcacagaaaatttgtaaggcagagaaactgttctgtatgatactacagcrgtggataggagtcattataacattgatctaaatccatagaatgtacgccacctcaagtaaatcctaatgtaaactatgggctttgacaacaatttgtagatgtacttccattgattgtaacaaatttatcactatggtttgggatgttgatagtgaggaaggttgtggtgtttagaaacagaggtatatgggaattctaactgtatgttctgctgaacactgctgtgaacctaaaactgctctaaaaaagtttattaatttaaaaaagaattattcaatcccttaattatgagtgcatgaatactgttgaaatctgaataattccaatgaatttcaccaatgtcaatttcttggtttgattttttagtatattattacaaaaagttattgaagaaactgggtaaaaaaatacaacaaatctctgtactattt

SEQ ID NO: 732829 - DNA, 519 bp, Homo sapiens
tccatttgtattatcacatagccaaaagagtccatggaacataaatgattaagaatcttgctttagagtctgacattcaactatagccatcagtaaagggtgcttataatttatgcgagaagggttaatattaggaaagggaaggtaaaaaacacataccacaaagaagaagcaacaaaatgtaaaaacacattccttaaaccagtggctaaagaaccttcctgacctttccagctctttgttctggcccccgaaagctatcacagtcctgatggcccccagagcctcttctgccacggcgcctgcttttgcataagcagctagttctttgtcactaaatgccgagagwatctggacagaaaagaaacagtgatcacttttgtatagggagaaaagtttaaaggcactctggtcaaccctttaacctactttttcttcccaaaccctctcctttaacaaatattaaagtcatgtagcaaatgccagtgttctggatccaatggctgcgtccacatccct

SEQ ID NO: 732830 - DNA, 616 bp, Homo sapiens
gtgtgacatttttggagtctacatacaagtgagatcatacaatatttgtccttctgtgtctggcttactttacttagcatcatgtcctcaaggttcatctatatttttgaaaatgacaagatttccttcttttttaaggttgaataatattccataggggtgtgcgtgtgtgcatgcatgtgcatgcaggtatatcacatttatttacccattcwtccatagtagacattaggttgtttccatatcttgactattatgaataatgcagaaatgagcatgagagtgcacatatctttaagatcttgatttctttttcctttttaaaatatatacccagaagtgggattactggatcataaagtatttctatttttaattctttgaggaaccttcatactgctttccaagaagatataatagggaaaagatagtctcttcaataacagtgttgggaaaactggatatttacctacaaaggaataaaattgaaccgtatttcacactatctacaaaaataaactcaaaattaattaaaaacctgaatgtaatatctgaagctataaaactacaagaagaaatcagaggaaatacttcttgatattggtctgggcagtga

SEQ ID NO: 732831 - DNA, 616 bp, Homo sapiens
gtgtgacatttttggagtctacatacaagtgagatcatacaatatttgtccttctgtgtctggcttactttacttagcatcatgtcctcaaggttcatctatatttttgaaaatgacaagatttccttcttttttaaggttgaataatattccataggggtgtgcgtgtgtgcatgcatgtgcatgcaggtatatcacatttatttacccattcatccatagtagacattaggttgtttccatatcttgactaytatgaataatgcagaaatgagcatgagagtgcacatatctttaagatcttgatttctttttcctttttaaaatatatacccagaagtgggattactggatcataaagtatttctatttttaattctttgaggaaccttcatactgctttccaagaagatataatagggaaaagatagtctcttcaataacagtgttgggaaaactggatatttacctacaaaggaataaaattgaaccgtatttcacactatctacaaaaataaactcaaaattaattaaaaacctgaatgtaatatctgaagctataaaactacaagaagaaatcagaggaaatacttcttgatattggtctgggcagtga

SEQ ID NO: 732832 - DNA, 616 bp, Homo sapiens
gtgtgacatttttggagtctacatacaagtgagatcatacaatatttgtccttctgtgtctggcttactttacttagcatcatgtcctcaaggttcatctatatttttgaaaatgacaagatttccttcttttttaaggttgaataatattccataggggtgtgcgtgtgtgcatgcatgtgcatgcaggtatatcacatttatttacccattcatccatagtagacattaggttgtttccatatcttgactattatgaataatgcagaaatragcatgagagtgcacatatctttaagatcttgatttctttttcctttttaaaatatatacccagaagtgggattactggatcataaagtatttctatttttaattctttgaggaaccttcatactgctttccaagaagatataatagggaaaagatagtctcttcaataacagtgttgggaaaactggatatttacctacaaaggaataaaattgaaccgtatttcacactatctacaaaaataaactcaaaattaattaaaaacctgaatgtaatatctgaagctataaaactacaagaagaaatcagaggaaatacttcttgatattggtctgggcagtga

SEQ ID NO: 732833 - DNA, 616 bp, Homo sapiens
gtgtgacatttttggagtctacatacaagtgagatcatacaatatttgtccttctgtgtctggcttactttacttagcatcatgtcctcaaggttcatctatatttttgaaaatgacaagatttccttcttttttaaggttgaataatattccataggggtgtgcgtgtgtgcatgcatgtgcatgcaggtatatcacatttatttacccattcatccatagtagacattaggttgtttccatatcttgactattatgaataatgcagaaatgagcatgagagtgcacatatctttaagatcttgatttctttttcctttttaaaatatatacccagaagtgggattactggatcataaagtatttctatttttaattctttgaggaaccttcatactgytttccaagaagatataatagggaaaagatagtctcttcaataacagtgttgggaaaactggatatttacctacaaaggaataaaattgaaccgtatttcacactatctacaaaaataaactcaaaattaattaaaaacctgaatgtaatatctgaagctataaaactacaagaagaaatcagaggaaatacttcttgatattggtctgggcagtga

SEQ ID NO: 732834 - DNA, 545 bp, Homo sapiens
atttcaattccatgccggcacaaaacctctcaggttcccttatgctcttttaaataagaatcatagaacattaatagaagtgctctcctaggtctctattcaaatgttctttgatttatagatttcattaacaaagatcaagcaaatttccttttgctagtattccagagtgagacaaagctgstaacacttgttttgtgaaaacttgcattatggcattttaaaactactttgttttagggctttgtcaaactcagacatgatctcttttcagggttaggcctattttgatcacttttaataagtaatagatggatgttttaacataccaggagacagaaacagtcaaagaaatattctactctttcctgtatttcttccctgagggcaatgctttaaaaaaaatcaattgtgatatatgtcacattgcatttcagccctctgctgaagagggaaaattctgaggagctgggacccctccagtcctaactctgagctggcatggcccacactggtcatagggtgcagacacagagaggactgcc

SEQ ID NO: 732835 - DNA, 497 bp, Homo sapiens
acggtgattaatgaggtagaccacctgccctagggaaacagtgtacctagtaggaaggagtgatacccatacatcagattactatgagtgttattccagacatatgtgcaagtaggtatggtaacacataacacaagtgggagcatctagcacttatctactaggcttaaaggaggataaatgttgatactaattcttgaaaatagtaatcaatatacagtatactttaaaacttcttatttttacaactgtggaattatacaatttaaaacctgaatgagatcttagaataaactatctcaagtttctyttttatccataggtagaaactaaaactcaaacaaaacatctttttacataataatttcatgatagagttaagatgaaaatttgatttctagtatacagtaatgagggcattttattaattgtattgcatcatagtaacaacattcagaatattagagcattttctctccatgctttcaagaccctaa

SEQ ID NO: 732836 - DNA, 626 bp, Homo sapiens
gcatgccacccctccaagctatgtattaattaactaaatacttactttttgaatgtgggtccatgttgccccaggctcatctggaactcctgagtgcaggcaatcctcccacctcagcttatcaaagtgctgggatgacaggtgtgaccatggccctgccatggctttgtgttttttgcttttttcttcctcctcctcacgtcttgttttgaaacatgcactgaaggtttcaattcatggactatagyctctgtgcctggaatttctatctttcaactcatcatcagcattcattgggattttcatatatatatacacctatataagaatacctatgtacacacatatatacgtatatacatgtatatacgtatatatgcacatttatatacgtatatacatgtatatacgtatatatatacatgtacacatatgtatttatttctcaagttacgaaacggcttgcattctttcctgtgtcatgaaaaagactttgctagaaaagaaaagcactgctttataataaaatattttatttgcatttattttgttaaggcattttaaaaattgtatgtttgtttaaaaaatgtcatatgaaatgatacatatttacaacttaaggcgtg

SEQ ID NO: 732837 - DNA, 627 bp, Homo sapiens
cacgccttaagttgtaaatatgtatcatttcatatgacattttttaaacaaacatacaatttttaaaatgccttaacaaaataaatgcaaataaaatattttattataaagcagtgcttttcttttctagcaaagtctttttcatgacacaggaaagaatgcaagccgtttcgtaacttgagaaataaatacatatgtgtacatgtatatatatacgtatatacatgtatatacgtatataaatgtgcatatatacgtatatacatgtatatacgtatatatgtgtgtacataggtattcttatataggtatgtatatatatatatatatatatatatatatgaaaatcccaatgaatgctgatgatgagttgaaagatagaaattccaggcacagagrctatagtccatgaattgaaaccttcagtgcatgtttcaaaacaagacgtgaggaggaggaagaaaaaagcaaaaaacacaaagccatggcagggccatgggtcacacctgtcatcccagcactttgataagctgaggtgggaggattgcctgcactcaggagttccagatgagcctggggcaacatggacccacattcaaaaagtaagtatttagttaattaatacat

SEQ ID NO: 732838 - DNA, 616 bp, Homo sapiens
cacgccttaagttgtaaatatgtatcatttcatatgacattttttaaacaaacatacaatttttaaaatgccttaacaaaataaatgcaaataaaatattttattataaagcagtgcttttcttttctagcaaagtctttttcatgacacaggaaagaatgcaagccgtttcgtaacttgagaaataaatacatatgtgtacatgtatatatatacgtatatacatgtatatacgtatataaatgtgcatatatacgtatatacatgtatatacgtatatatgtgtgtacataggtattcttatataggtatatatatatatatatatatatatatgaaaatcccaatgaatgctgatgatgagttgaaagatagaaattccaggcacagagrctatagtccatgaattgaaaccttcagtgcatgtttcaaaacaagacgtgaggaggaggaagaaaaaagcaaaaaacacaaagccatggcagggccatgggtcacacctgtcatcccagcactttgataagctgaggtgggaggattgcctgcactcaggagttccagatgagcctggggcaacatggacccacattcaaaaagtaagtatttagttaattaa

SEQ ID NO: 732839 - DNA, 570 bp, Homo sapiens
aattctagaaccaatccctcaagggtaccgaggaatgactctatttcattttaagattttctgtcaaaatcactgctatgccccataatcactgccatctttctcttttgcctggctatttgccacagcctcctaactgacctcacttcctgccttcaatatgatcaccaatccatttttctcttaaaaaaaacgtgattataccaagactaccctgtcatttccytgcttaaaactatcaattgtatgtgattgccctgagaataatattccaagttcttgagcagcatatgcaaggccttcgccatcaacccgttgtcatcgttagcaactcttctgtagctttactgaacaacccgtgctactcctgtgtacccatgccagcattgtttttcttctcatgcctgcctcactcttatctgtttccaaaactcttccacattaagtgcctcttctgtgtctacatctaaaatgttgtacaaattcctattatcacctgtcacgttgtaaaagtaaccctgttaactaataccattagactgctagttaggtatttgagaaccaaaaaca

SEQ ID NO: 732840 - DNA, 605 bp, Homo sapiens
tccgaagtttcactaatgatcttttctggttgcccctggaactttcccctaccccatctacccttgtggaagaatttttatagcataaaagcagagataaggctttccttaattccaaaatcctggtcctgggggattcatggcatgaaaatattggtgggcgatgtaagaacaaggcttcctgctcaagggagaagaaattgagaaaagatgcaaagtagtttttgacaggggtgtttctarggtgggccctgataaattaagaggatcggaaagcaaagatgtctgtgccttctgtttcaagatagggcacatggaggcagtgacaccctggagcttctctgcaccatgacagagcacaggactcattctgttctctacatcgcactcaacataggaggttccactatgctgtatcagacctacccatccagattcatcagatttgcttgcagagagccccaagaaaggaacagaaatagcaagaaagtgtctctggcccaaagaggcacattcaatgagcttgaaggacagtgcagcacttgttctcctgaatggatcaataaccaaggacggacagagtgacatactcatcagcagatgcc

SEQ ID NO: 732841 - DNA, 605 bp, Homo sapiens
tccgaagtttcactaatgatcttttctggttgcccctggaactttcccctaccccatctacccttgtggaagaatttttatagcataaaagcagagataaggctttccttaattccaaaatcctggtcctgggggattcatggcatgaaaatattggtgggcgatgtaagaacaaggcttcctgctcaagggagaagaaattgagaaaagatgcaaagtagtttttgacaggggtgtttctagggtgggccctgataaattaagaggatcggaaagcaaagatgtctgtgccttctgtttcaagatagggcacatggaggcagtgacaccctggagcttctctgcaccatgacagagcayaggactcattctgttctctacatcgcactcaacataggaggttccactatgctgtatcagacctacccatccagattcatcagatttgcttgcagagagccccaagaaaggaacagaaatagcaagaaagtgtctctggcccaaagaggcacattcaatgagcttgaaggacagtgcagcacttgttctcctgaatggatcaataaccaaggacggacagagtgacatactcatcagcagatgcc

SEQ ID NO: 732842 - DNA, 575 bp, Homo sapiens
tgggatcctttcaaggctgagctggggaaagatccatgtctaagctcactcacatggccgatggcgggattcagttcctcttaggctgtcagactgagggcctccgtgtctcagtggttttagccagagccctctctcagttcctttccacatgggcctctccacagggcaactcacaacatggcagctggtttccagtagagcaagcgagtgagagaacaagaaaggcaagsaaggtgaatgtcccagtcttttgtaacctcatctcagaagtgttaacccatcacttttgccatgttttattatttagaagcaaatcactaagtccagcccacaattagagggatggcattacacaagggaatgaacaccagcagacagggtcattgaaagccatcttagatgctgtctatcgcatctaagtgtgatttttccagatgaaaagaatatattaatttgtttcagtcttagtcgatgtgccatcccatttgtgctttgctaaaacttgtatcaatgtaaagcaaacattttctgatacaatttaggtagtgtattgtggtaatagagaccagtag

SEQ ID NO: 732843 - DNA, 605 bp, Homo sapiens
acaagtccagttacactcacagggttgtgttcaaaaaccagtgtttctccttaactaaccctcaagcaattacctcagatcaagtgaatagacctgacttaagcaaatttggctgttcacgagttttaagttactctggcagatattgatcaccaccagcagctaggaacaggtgagaactataatcctcctccccaacaatctcattactgggtgatgagttatattgaaagcacatttgaccaaagatgccacatgttcaaatactcaaatcaactagctaacctgacacaataagagcagtgaaatcccaggcaacagcatgcrcgaaacggccactcaaagcagatgtatcagtattctggtgaaagtttcagctaaacttctgatcagaagttgagccacaggattctctgttgagctattgaatgaagccctggtccgagaagagccctatgaagagggtaggctgtggagctctctccagattcttactccctgttgtttacagaaggaaggaattgcttacataatatttccagcatattcacatatcttaatcaccactcgtttcatccatggaaacttattttagcatcccctat

SEQ ID NO: 732844 - DNA, 449 bp, Homo sapiens
ctgtccgattgatgggcattcagttggcagcccatcatcccatgtggcaaaaccagttttatctccatttgcacattcatttcaatattcctgatctataaatatatccttttttttttcttttttgagacagggtcttgctctttgcccaggctggagtacagtggcatgatctcagctcactgcatccttgacctccccagctcaagcagtcttctcacctcagyctcctgagtagctgggactacaggcgcatgctgccacgcccagctaatttctgtatttttttgtagaaatggggttccaccatgttataggagttattaagaaattattttctgcagatagagaggaaaaggggtccttgggaagtttttggttcttttaaagcagctccagaaatatttcttttctagcaggaaagccctggctcttagagccagctggca

SEQ ID NO: 732845 - DNA, 643 bp, Homo sapiens
tccttcacctggatctgctttgcactgaggctcatgggctgtggtgagggaccatggagcaataggccctgggaatcccatcatttattttattttatttatgtatttgtttttaaaatagagacaccatctcactatgttgctcgggctggtctcgaacccccggactcaagcaatccacttgcctcagcctcctaaagtgctgggattacaggcgtgagccaccatacccggcyaaccacaccattttgactcatgtatggatgctgttgagaagaaattttgtactgcttttcctatttccctgcatccgaaaatgtagttggcttttttacttatgtgacactgacaagtttgttagtaatgaatgtgacactgagaattttgttagtaatgagcatttttttatttgacactagaaaacttaaagacaacaatttgccccgccccacccctatatatatcaggctttgtgttgtgacgttaacacgtgttttcttttgaccttctcgtgtatgtctaatttatgtttatttgcagtgttgtatgacactcataagcttctttgatctctgggaataaggcagggtgtgaaaacattaagtgtcctgttttcgtgccttgtatggttaactcttccaat

SEQ ID NO: 732846 - DNA, 629 bp, Homo sapiens
tatgattattaaaacatatacggtgtgatagtattatatagtatccatggtaaaactattagctaatgcatttaacaatcacagcaacaatacctaaggcagtcaaagctcattacttctctagtttctttctgattcacttatgaaacaatttatccctgatttataatattcctcctaagtcttaaagaaaatgcacatagttgtgtagttataaataagctctgttcagagcagaccacattataagccagtatgattaagattccagaaatggcaaattgccaccaaataattatagcctttggtaacaaacagaacaaaacaaaaaagaaaacaatgacacttttaactaccagatccaggatttgataaaatgatcatgcccagaacgagctttgtcattttgtggcaaattgttcttaaagcctcaactgaactcarcaaagctttaaaatcatcttttgattttaaaagtggcgtcccagaaaagcttatatataattatatatatatatatatttttttttttttaatgctgccttattcagttttcaggaaatttttacatgtatggtattattatcatttgccccttcaactactctccttggtagacaggaaaggta

SEQ ID NO: 732847 - DNA, 587 bp, Homo sapiens
taaaaatgttctcttttcacgacatccatgtcaacatgtgttcttttttattttgtgactatggccattcctgcagagtaaggtggtatcacagggtggttttgatttgcatttccgtgatcattagtgatgttgagcattttttcatatgtttgtttaccatttgtatatcttcttttgagaattgtctattcatgtccttagcccactttttgatgggattgttttatcttgctgatgtgagttatttatagattctggatattagtcctttctcagatatrtagattgcaaatattttatcccactctgtaggttgtctgtttactctgctgattgtttcttttgctgtgcagagctttttagtttaatgaagtccaatctatttatctttgtttttgttgcatttgcttttgttttcttggtcatgaactctttgcctaagccaatgtctagaagagttttcccaatgttatcttctagaatttttatggttttgggtcttagatttaagtctttgaaccatcttgagttgatttttgtataaggtgagagattaggatccagtttcattcttctacgtgtgg

SEQ ID NO: 732848 - DNA, 625 bp, Homo sapiens
ccaggggaaagcaaaactgatggattctctgacagatttggccatgtggaaaattgcactgtgtgttttacaaagcatttagaagttgtaggaagactttgccagatagccaaaggaaactaaacaaataaaaaatgcagcatttactaatgcaaggaaaaacaaaaagctgcatgaggcagaagttcaatcataataattcatttagctcaatagtgaataatatttacatattctcaataaggaaaatatgaagtatacttcaatatattaaawatatatattgtatactatgtaaaaggaatggaagagagtgagtgagacctaaaatgctgatctactgtagtaggaagacaattcatagtctcaaaaataatcaagatacagtagactggaaacattgtctttttaatgctggtaaatacaacaagaaacaaggagttgacaatggctgcctccgaggacaggagacagagagggaggaggaaaggactaggaggctgcttattttcctttcttttaatactatttggctctttatactatctgcacatattcccctgataagaatataagagaagctttaaaaaaaagaaagtcgagcattgtggctcacgcctgtaat

SEQ ID NO: 732849 - DNA, 657 bp, Homo sapiens
ggctccatccactgccagttctggagaggagctcttcactcctccagtggttaagccagcaggggcaggcggggaggacacagcagtagaatcagccaacagctcatgtttagaccttgggcagccagggaagcctactcctggggcctcccggaagccatggagagaacaaagccattgcatttttataataaaatttgcaaacatatttaaaagccaacaaactgttaatgaatctctacattctcatcgcccagcttcaacaaggatcccagcttcaacaaggatcaagtcctggccatttgacagcagcatttaaaggccctcctctactgttacttggaaatagccactttctcccaaggtttcttatactctrtggcacatctgaccaccagtagcaggcagaatgatgtcttcaaccccaacaccatcaaagatgtccacatcctaatccctggaacgtaggaattaggttacatggcaaagggaaattaaggttccagatgggattaaggttgctattcggctgacttcacagagattatcatggattattcaggtgggtccagtgtagtcaccaggtcccttaatgtggacatgggaggcagaagaggaagtctgagtgatacagtgtaagaaatggctgattttggc

SEQ ID NO: 732850 - DNA, 559 bp, Homo sapiens
gaacccattaatttttcaccatgtatcagttttctctaatcgtcaccgatttccttaccatctcagatttggtagtccattatgataatcagtctcattaaaaacattttatctgtaattctgttttaaaatctgagccctgtttttagttgcttagatgctgataaacaaatcacttccagggaaaatcacctaaaaaggatggctggtttcaattcaaaatgtaggatctcaaactctagatggaaattccacaatgcctatttccctcatgagtttgctttcttattttctcactattttttttcagatttatacattatcaaagctcctttatctctccactaacaaatctacaaagtctccctaggtgtacayacgatccctcctgttacagagaagttacaaaggcctattcctcaaaccctcccgcaagcttctgcatcccatcccctctctcttcttcacggacttatgatccacttctctttcctgatcatcaacctctcccactgaactcaatcatttaaattaatgttcaaacatgttctaatattgc

SEQ ID NO: 732851 - DNA, 604 bp, Homo sapiens
ggtagtccattatgataatcagtctcattaaaaacattttatctgtaattctgttttaaaatctgagccctgtttttagttgcttagatgctgataaacaaatcacttccagggaaaatcacctaaaaaggatggctggtttcaattcaaaatgtaggatctcaaactctagatggaaattccacaatgcctatttccctcatgagtttgctttcttattttctcactattttttttcagatttatacattatcaaagctcctttatctctccactaacaaatctacaaagtctccctaggtgtacatacgmtccctcctgttacagagaagttacaaaggcctattcctcaaaccctcccgcaagcttctgcatcccatcccctctctcttcttcacggacttatgatccacttctctttcctgatcatcaacctctcccactgaactcaatcatttaaattaatgttcaaacatgttctaatattgctcatttaaaaacaaaatacacacctccttcatcctacatctcaattctgagttactgaaattggttgctcaatccttattgaaaacactagatactgaaaacttgcaaaactaga

SEQ ID NO: 732852 - DNA, 598 bp, Homo sapiens
cctatttgggagaacaaactatattgactgttttgcagacatgtcaagagtatctaaatgaaggttcacaaacagttagaaaataaaatatctggctctaatgagttatgttctgatttatgtgaaataaaaagaaaaacaaacaaaaaacctggcacyacctctcaagtaaaaaaaaaaattacaaacaaattgctaacaaatattcctgattgttttgactagagcaaagctcttgataagaacacctttcattctgaaataaaattacacttaatgtgcttttttgtatttatctagatgaatatttgaaatgcctacttttttcagttagttttaactctactgcaccttacatcagccactaacagaagtattctataagaaatgtaagaattaccatggccatgccaattccacaatcagaaaactagagtggctcccaattgcttcccaaatgaataataaaattacatatattggcatgttcctaaaacccctagcttttcctttagcttagaggtttataacctgggcccaagaatgggccccaggtgttggtaaaccccttgaaactgaaactaacattttgcatgtt

SEQ ID NO: 732853 - DNA, 468 bp, Homo sapiens
aagaaatcagtgctacatatttttctggaaaatgatcctccttatgaattttgctttgctattatccactataatatcaaaaaacaaataaaatcctccatgatcaaggtctaggcctttatccaagattctcatttgctcctcatctacttcttttccctcagaacttaataaacttacctggacatcttcacagtgctttagatatgcctattgcctctgaagaaataaaaatatcatttctctgcaagagtcactatttatccttgagcaatcactcctacacmctctggcttacttcgctagttctcagtcagagcctacagaaagattagatgaataaatgttcctctagaagtttctctgtcagtcaaaaggtcctaagaggaaagtggggttttttttgccctaagaaatgactaggagaacaatccctagtgagtaattttaggcacttgtggtcagagg

SEQ ID NO: 732854 - DNA, 569 bp, Homo sapiens
agccatctcatcttgttacctgagtatgtgtcacttgtcaccttcagggagtactgacatattgcctttaaaccaatttacttatatctaattttgtaaaaagagtctgtatatttatgttcatcatatctatatagatgtatatttacatatatatatatatatatatatatatatatatatatatatatrgcccgtaactccaaaaggacaagaatcatgaatatattattgttaccattatgtcaaacatgattcttaataatacagtttaccttctttttaaaaaataataaaaaagtctataaatttaccataatttaggaagaaaatcaatttagtcagaatatcctattcatcaggatttctggccaaacaagattttattatttctaaagccaaggaatttgagagtgctgtatctgataattattttttcatcttaaacttggtcacacctctgtgactcgcctgtgatgaattttcagtctctcctcagggttaagcccatgtctgttcagggaggcgtgactagtttcaggtagaaaaagtgacaaccaaatgtgtta

SEQ ID NO: 732855 - DNA, 634 bp, Homo sapiens
ataaaatatacaatattctttattataacttatatgtatcctatttattctcacagaatgatttatttgatttttactgaactcctttaattatagcctaactgtagttataattgacaagtgagtgtacttccaacagtcatattggttgatattttcttttacatgaataataagataaaagtgagatgatgaggatgcctgtcagaactctacctcttttttaatgatttcagcaatttcttgtctgaatctgataataattcttgaaatatggaagaatatatcctcatattttgaaaaattcataatgtagcagcaataaacatgacacatttttaagtttgaactgaaatatcgtatttttcaaatcttactttgtctaggtgattagtaaaacaaatcttactttgtctaggcaattagtaaaacaataaatcaaaccctgatttacagtgtttgyttatttctatggaaatatacttccatcgtggccaggttttggctaccaatatgatggcattgaatactgagatggaagatgtgtgccattatatatcatttagcattttcactatcaagatataaaagatctaatagtgttaagaccataaaaaatagcaaaatgtagcaa

SEQ ID NO: 732856 - DNA, 574 bp, Homo sapiens
ttatgacctctatccatatttctgatttttagtgacttatacaagctctgtatacatcctacacaataatcagtcatccattaaataggctacaaagagttttctcagcacattactcatcttttaactttatcatgctttttattgtgcaaagatgatttttaatttttatggggttttatttgtcgatcatttcttttatggcttctggtacttatgtcttgtttaagaaggcctttttcacctccaatcttataaaaatgtgctccaatataatcaccaaatacttttaaatttcttttatgttcagctgcttaactcacctgaagtttatttttgtgggtgatataaagtaatrgtctactttcccttttttatctacccgtaactaattttcctaacactattaattgcataggttatacttacctccatggatttgaaatatcacctttattataacctaaatttctactgatgatgcatggatctctcttggtctctctattgcattgatttccactccagtttaccacactattttgatcacatctctagcatacattttaatgta

SEQ ID NO: 732857 - DNA, 574 bp, Homo sapiens
ttatgacctctatccatatttctgatttttagtgacttatacaagctctgtatacatcctacacaataatcagtcatccattaaataggctacaaagagttttctcagcacattactcatcttttaactttatcatgctttttattgtgcaaagatgatttttaatttttatggggttttatttgtcgatcatttcttttatggcttctggtacttatgtcttgtttaagaaggcctttttcacctccaatcttataaaaatgtgctccaatataatcaccaaatacttttaaatttcttttatgttcagctgcttaactcacctgaagtttatttttgtgggtgatataaagtaatagtctactttcccttttttatctacccrtaactaattttcctaacactattaattgcataggttatacttacctccatggatttgaaatatcacctttattataacctaaatttctactgatgatgcatggatctctcttggtctctctattgcattgatttccactccagtttaccacactattttgatcacatctctagcatacattttaatgta

SEQ ID NO: 732858 - DNA, 612 bp, Homo sapiens
ctcctttccgattcatctctagcagataataatttcggaacaagtgtcaaggttcctgtccatccctctcccatcccccatcccaaaaagaggaagctcttttatgatcggttaagttctttgacactgatttgttgagtgaccttgaacaagtcaatcactctatacctcagtttcctcatatgcagaagattaataatagtacttacctcacagaagtaaaagactaatcaaataagatttaaaagaaaaaaagttaagtcaatcaaggattaaaagaattaatacagaaagcaccgagaacagggcttaactcatggcaagctcttaacaaacgctggctgctactcctcttcttctcagtaaacctctctcctctctctcccctctctctcctctctctcttctctctcctctcctatgcggtctaggcttatgttggtttcaggcctcygacgccagctccttgaaggcagaaggcattccccatgggatccagccttgccttatcaagctgctgtaccacaagttctacctgaggtttagagccaaaaccaccagaggttaaaaaatgttctaccttatttaattcctctttccttatatccttgt

SEQ ID NO: 732859 - DNA, 554 bp, Homo sapiens
tggaaatggtaattatttactctgggagccctgtcaaggtttctgtaaaaatcattgctatgctgctaaattggactaggagttgcctccttttctactattgatcttatgagtgaattatccccaaaaaactttccagtgtgctattggctaattcattgacagtgcaatatatattaggttgaatgtgaatagcacacatcttattcgtaatatgttttggatgcacaaatttgaaatttatgtcaatgttcctaagcaacgtaatacagatgaaaaaatacaattcccaatgtaacattcagtgttcgtaaatatgccatcttggaaattacagcaagcaatgtagaaagtaagaaaatcaattgactctggrcaccaatactatttctcagggcaaaagtctatctcatgtggcaataaatgcacctctgtccttataaggaatgttgtactatgatgaaatagtgactacactatttatatcatttatgttttaatcccctggttgctaggtggggataagtcttcatagatgctaatccacatgttgt

SEQ ID NO: 732860 - DNA, 528 bp, Homo sapiens
cctttccactgtgatgaagattgaaaatattgatgcaagagtactttttccccagattcaagagaggaagagtcacttgcttcctggattgtgttcatcaggaaagttgaaagaggagagactatattcataggaaaaraggcaaagaatgaaagaatgggtctgggggtggggaggagtggaatagagcctgagggaaagagaaagataggagctagcacgagttgagactttaaagaattttgagacagagaagagaagatattaggggtagctgccacagtgtgatatgcaaggtgctgggagagaatggagaaagaggattttagacaattttgctacatataaaggcatttccatcaggagccttgttgaaagacatcagtgaaagctaaatggcttttctagggatttttttggatattagcctaatacttctttaatgcaacactgtgttgagactattcagaacatgctaagattaatatgttatccattccatctaatgctgaagagaatgaaatcctt

SEQ ID NO: 732861 - DNA, 622 bp, Homo sapiens
tctttcattatattttggggggttctgcgtttctttttttttaagagatggggtctcactctatcacccaggctggagtgcaatggcatgatcatagctcactgcagcctcaaactcctgggttcaagtaatcctcccacctcagcctcctaagtagctgggactataggcacaagccattacacctgtatattttttaatgaataaatgaatggatagataaatataattcaagtataaaattcaaacatttcagaaatatacaatataaaaaataaaaatcatccataatcctaccaccaccccrcccagggaaaacaattttcagcagttttctaactgttccttacaaagcaaaccttcaccaggcagtgtcatgaagtacattcggtatgtgactgattccatgaacgttggggacctcatgaggataagaaatattccactcaggacaatgcattacattggtacgttcttcactcacctctgctgccaccacacaaatgcttatgtgtggcttaatatgaacagatgatgaataaacagatgtttatcaccaaagcagtaaataacatcatacacaatatctgtggtgaaaaaaaggaactatagtctcaataag

SEQ ID NO: 732862 - DNA, 622 bp, Homo sapiens
tctttcattatattttggggggttctgcgtttctttttttttaagagatggggtctcactctatcacccaggctggagtgcaatggcatgatcatagctcactgcagcctcaaactcctgggttcaagtaatcctcccacctcagcctcctaagtagctgggactataggcacaagccattacacctgtatattttttaatgaataaatgaatggatagataaatataattcaagtataaaattcaaacatttcagaaatatacaatataaaaaataaaaatcatccataatcctaccaccaccccgcccagggaaaacaattttcagcagttttctaactgttccttacaaagcaaaccttcaccaggcagtgtcatgaagtacattcggtatgtgactgattccatgaacgttggggacctcatgaggataagaaatattccactcaggacawtgcattacattggtacgttcttcactcacctctgctgccaccacacaaatgcttatgtgtggcttaatatgaacagatgatgaataaacagatgtttatcaccaaagcagtaaataacatcatacacaatatctgtggtgaaaaaaaggaactatagtctcaataag

SEQ ID NO: 732863 - DNA, 594 bp, Homo sapiens
gatcaacaggttcccaaggcagaagaatttttcttagtacagaacaaaatgaaaagtctcccatgtctacctctttctacacagacacagcaaccatccgatttctcaatcttttcccctcctttcccccctttctattccacaaaaccgccattgtcatcatggcctgttctcaatgagctgttgagtacacctcccagacggggtggtggccgggcagaggggctcctcgcttcccagtaggggcggccgggcagaggcgcccctcacctcccggacggggtggctcagccaactgattttcaacaaaggcatyaagaacatacattggggaaaggacatcctctttaatatatggtgttgggaaaactgaatatccctatgcagaggaataaaactagacctttatctcttatacaaaaattaactcaaaatgaattaaagatatagatataaaacctgaaactataaaaactactagaagaaaacataggggaaatgcttcaggacattggtctaggcaaagactttgtggctcagacttcataggcacaggcaaaaaacaaaaaaataggcaaatgggaccatattaaa

SEQ ID NO: 732864 - DNA, 594 bp, Homo sapiens
gatcaacaggttcccaaggcagaagaatttttcttagtacagaacaaaatgaaaagtctcccatgtctacctctttctacacagacacagcaaccatccgatttctcaatcttttcccctcctttcccccctttctattccacaaaaccgccattgtcatcatggcctgttctcaatgagctgttgagtacacctcccagacggggtggtggccgggcagaggggctcctcgcttcccagtaggggcggccgggcagaggcgcccctcacctcccggacggggtggctcagccaactgattttcaacaaaggcattaagaacatacattggggaaaggacatcctctttaatatatggtgttgggaaaactgaatatccmtatgcagaggaataaaactagacctttatctcttatacaaaaattaactcaaaatgaattaaagatatagatataaaacctgaaactataaaaactactagaagaaaacataggggaaatgcttcaggacattggtctaggcaaagactttgtggctcagacttcataggcacaggcaaaaaacaaaaaaataggcaaatgggaccatattaaa

SEQ ID NO: 732865 - DNA, 630 bp, Homo sapiens
atcgctcgtagttgagaaccattgcagtaaacaaaggttggtttttcctaaagggaggagtgaaggagggtttaccatgacaagtcttaagcttccaacgtcaagattctttaataccgttataaaccgtatgttctttattgttattayggggaaaattaatatccttcagttctctagcaggactaagactctagtagaaaaaaaagaaaaaatgacttccacattccagatcgggaattgtcttttcttttctttttttaattttttacgtctagtgaaaactgcacacaataaattctacacactgaaaaaatacaagcacttttatgtaaagaacaaagagatttctgagttgaatcatacaaatattatttgctgtaggccatgtaatggtgcactgtaactataaattatttgcaaccaaagtgtatgataattccataaagctgccacactctactttcaaataatacttgtggaaggaaaaagtcaaatgtgctttaccccacagcaagatataaaactgttgaaaaaaaattcgatgctggtttctttccctggagtttcttaaagcatttctacaaggggcaattttatgggcttaattgtgccctgtgaatttttatg

SEQ ID NO: 732866 - DNA, 630 bp, Homo sapiens
atcgctcgtagttgagaaccattgcagtaaacaaaggttggtttttcctaaagggaggagtgaaggagggtttaccatgacaagtcttaagcttccaacgtcaagattctttaataccgttataaaccgtatgttctttattgttattacggggaaaattaatatccttcagttctctagcaggactaagactctagtagaaaaaaaagaaaaaatgacttccacattccagatcgggaattgtcttttcttttctttttttaattttttacgtctagtgaaaactgcacacaataaattctacacactgaaaaaatacaagcacttttatgtaaagaacaaagagatttctgagttgaatcatacaaatattatttgctgtaggccatgtaatggtgcactgtaactataaattatttgcaaccaaagtgtatgataattccataaagctgccacactctactttcaaataatacttstggaaggaaaaagtcaaatgtgctttaccccacagcaagatataaaactgttgaaaaaaaattcgatgctggtttctttccctggagtttcttaaagcatttctacaaggggcaattttatgggcttaattgtgccctgtgaatttttatg

SEQ ID NO: 732867 - DNA, 587 bp, Homo sapiens
ccttgtccatgtctctgttatgaatgggaaaaagtgggaattgggatttggaggaaaaggctcagaccctgcaagagctattcaagtcctaaaagaggcagcagcagctgtctgggaatgacagaatgggtgagagggaaacttggaaatacaagaagagtacagagttttttgctttgtgtttttgtggggtttttttcagagcatttccagaggtattgcctgaggtgcaaatttaatgaaaaaawtaaacatttttcatttcagaagatcttagcatgtgctttaggatagttggagacaataaatatatttataaatgttatatttgaattctcttgatttaatctatcattatttcatctttaatcctggatttttcctgtgtttactttattggggtgttaattacagaccattttgtgaaagcaaccaagtgagagagaatgggagacaagaaactaattagaaaataactaattcattcaaatggtaacttaaacgcttgtttagcacagaggctgggagcatgggtttcagattcaaacacaggtgggttcaaagcccagccctgccaattatttcta

SEQ ID NO: 732868 - DNA, 587 bp, Homo sapiens
ccttgtccatgtctctgttatgaatgggaaaaagtgggaattgggatttggaggaaaaggctcagaccctgcaagagctattcaagtcctaaaagaggcagcagcagctgtctgggaatgacagaatgggtgagagggaaacttggaaatacaagaagagtacagagttttttgctttgtgtttttgtggggtttttttcagagcatttccagaggtattgcctgaggtgcaaatttaatgaaaaaaawaaacatttttcatttcagaagatcttagcatgtgctttaggatagttggagacaataaatatatttataaatgttatatttgaattctcttgatttaatctatcattatttcatctttaatcctggatttttcctgtgtttactttattggggtgttaattacagaccattttgtgaaagcaaccaagtgagagagaatgggagacaagaaactaattagaaaataactaattcattcaaatggtaacttaaacgcttgtttagcacagaggctgggagcatgggtttcagattcaaacacaggtgggttcaaagcccagccctgccaattatttcta

SEQ ID NO: 732869 - DNA, 525 bp, Homo sapiens
attgcacgacaagtggggctgaggaagaaatctgacctgctgggagaacagagagcaggagagcgggccatgcgctcccaacccagacttagcgatttgtatcttcactcactcatgctttaaagccctgtaagcaaccagctctgtgcctcaggccccagtctcaccaatatatacacaatacgcaggccagatattctgaaacgactttcccaactatgtttatcaaattacgtagaatcacctatgtgtaacatgcctcaagaaatatgttacctctctatgtgtttggcactacaagcaagctgaaaagtgccggctctgtctccaggcrggataggacaggagggtaatcctggagtgtgagcagcactgatactaggattggctgtgagcaagtttatctccattagtctcctggccctcaccttcctgggaactccattccccctactttcaggttcaatagttggggtctccaggaggcataccctgagatggagttccagtataaggtgtttatta

SEQ ID NO: 732870 - DNA, 553 bp, Homo sapiens
catggtaacatctatttcaaatcaatttcctacaaatgcctttcacaactattttgtttttattaataaattaaaacacagcatacttgagcaatgtatttttgttccgtgcaaattcacagagatccaaaaagattatgaaggagataaaatttgcatttacaagagactctccttcagaagagtgaaagaaattattctttcactattcaaaataggaaaccataaaacaaggrgattataataaatccttggcaaaaattcacatgaatacttcctgccaacattttaattaaggataataggttggtttatcaaatataattgagggaatattgaccaaaggttggtttgtctaaggggcaggcaagggaacatgaggttctagtcacagcctctctcacatttccccttgactccctttgcaaagagacattttccctcaccttgacttctcagacctagaaacagataaatcagaaggcgcagctggatctgacccccaggttctgtggaactggaaagcattctggtgctgatggaacttttgaaa

SEQ ID NO: 732871 - DNA, 658 bp, Homo sapiens
ttagaaaattctgtttaagtcttataataaaggagcaacttaacagctagagaaatttgagccaatgaaaaaattgatgtgaaatgaatctatcccctgggctggggtattttatgtttcaatattgaaacttgaacatttttttacaccagaaaagttattcttagtagttggcagagtaaatccatgttatcrtgcattctgaagcagttcagctgaatctaattagaacatctgcagatttatgcagctttctgtatattaaagtcctaacccttgtgaaataaatatttctcctcaatcctttatttttacccttctcagggttaatcagactaatatggtataaattttaacaaccatttttatgatcccaggatgaatggtgcaatacaagtctaaaatatcaagatcttataaatagtgtcagtatgtactggctttcaatgccttcctcctggccatcaattttggcttagagaaagggaaacaattatgaactcagtcacttgcttctttgtattagtttttcagagattttcaaggtgatccatgcatttctgggatgttgaggagaacgtgtttggtcttaactgtctctcgatagagaattcattgaatcatgtaggcaattaagctaaaaaggtcagtttggttt

SEQ ID NO: 732872 - DNA, 640 bp, Homo sapiens
ctctggtctcaaaataaatttgagacttttgatatcccttgaccatatggtttatttattgcataagctgttttgcagaggctttttacttagccatttgtgattttctcttctttttgccattgttttcaataattagatgtcctagacacaaatagtgactgtcaggcaatatttaaaaactttcttaaaagtatttattttgaagtaattttttgatttaggagtaaatatatcttttggtatttttaagtcagaatcttatttagaatatctcaggtaataagtactaaagaattatatgacattgttatttatattttctgttcactaacggtaatacattaattttttagttttaaaaggaaaatagcaattttgcattttgtgaaaaggtaaatttgagtcatcacatatataaatgttacatacgtggcctatacaagtagggtatttgaatttaatattaattgggaaaatattttggatttttattactcacsagtattctatctcaaacagtatataaaactacagaactcattcaaaatcggatcaaaatgattactaactatagaaaaataattattcatggtgtattagttccctaagttgacgtaacaaagtaccacaagctggg

SEQ ID NO: 732873 - DNA, 616 bp, Homo sapiens
tctcaggcagactgagcaaagtgtgagggaaaaagtcttggatgagacactgaaccaaataaggatggaaggaacagaaggcattgaggtaggaacagaaagacagctagaaagatatcatactaaaaaatggtaacatttaacaattgctatttttctattyttctccattgtatcttcttaataatgtcatggatcttatctcacatgctgtcttaggttgtgttcccaaaaagaccctaaaatgaggtgtgcaaatgatttgttaaggaagtgatctcaggaaacactggtaaagttggggggatcaggacaaggaaggaggggaaaagacaaataaggatgcaatctcaggcaaaatcccctagagggtagcttcagcctgatcctacagtgaactttagattataaattaacccctagatgtaccctgatagagtcgagggacctgggcttttatatccttgtacctgtcaaatattggtcaatggctatctgaagaaataagttcccaggcacatctggttctctgttgtgttgatgaaatagctccattagctaatgacagtaatctgatgataaccacaaataaaaaaatgtcaggaataaaagccca

SEQ ID NO: 732874 - DNA, 616 bp, Homo sapiens
tctcaggcagactgagcaaagtgtgagggaaaaagtcttggatgagacactgaaccaaataaggatggaaggaacagaaggcattgaggtaggaacagaaagacagctagaaagatatcatactaaaaaatggtaacatttaacaattgctatttttctattcttctccattgtatcttcttaataatgtcatggatcttatctcacatgctgtcttaggttgtgttcccaaaaagaccctaaaatgaggtgtgcaaatgatttrttaaggaagtgatctcaggaaacactggtaaagttggggggatcaggacaaggaaggaggggaaaagacaaataaggatgcaatctcaggcaaaatcccctagagggtagcttcagcctgatcctacagtgaactttagattataaattaacccctagatgtaccctgatagagtcgagggacctgggcttttatatccttgtacctgtcaaatattggtcaatggctatctgaagaaataagttcccaggcacatctggttctctgttgtgttgatgaaatagctccattagctaatgacagtaatctgatgataaccacaaataaaaaaatgtcaggaataaaagccca

SEQ ID NO: 732875 - DNA, 616 bp, Homo sapiens
tctcaggcagactgagcaaagtgtgagggaaaaagtcttggatgagacactgaaccaaataaggatggaaggaacagaaggcattgaggtaggaacagaaagacagctagaaagatatcatactaaaaaatggtaacatttaacaattgctatttttctattcttctccattgtatcttcttaataatgtcatggatcttatctcacatgctgtcttaggttgtgttcccaaaaagaccctaaaatgaggtgtgcaaatgatttgttaaggaagtgatctcaggaaacactggtaaagttggggggatcaggacaaggaaggaggggaaaagacaaataaggatgcaatctcaggcaaaatcccctagagggtagcttcagcctgatcctacagtgaactttagattataaattaacccctagatgtaycctgatagagtcgagggacctgggcttttatatccttgtacctgtcaaatattggtcaatggctatctgaagaaataagttcccaggcacatctggttctctgttgtgttgatgaaatagctccattagctaatgacagtaatctgatgataaccacaaataaaaaaatgtcaggaataaaagccca

SEQ ID NO: 732876 - DNA, 603 bp, Homo sapiens
attgattactcaccgaggccagatattaagctaaggtttggtaatataaaattgaagaaagcatggtactagccctgaggaaattaactggaagaaaccagatggatgagtgtgcaaatgtatgtgtatatatgtatctatatctgtttgtatatatgtataaaattgtaagcatgtggatgagtacaaagtggaggactgtagggagttatgtgtgggtgcatagaggaggaaagagactaaaattgtgagtgtggatgactgctaagtggaggactgtagggagttatacatggatgtatggaggaggaaagagactatgcagtaytgggggaacccacccccaatatttcaacgtaggttctttctattttccataagtgtcggctggccgagaaataaagagagacagtataaagagaggaattttaccgatgggccgccaggggtgacatcacctatcggtaggactgtgatgcccacctgagccccaagccagcaagtttttattaaggttttcaaaaggggagagggtataagaacaggagtaggtacaaagatcacatgcttcaaagggcaaaaagcagaactactaataagagt

SEQ ID NO: 732877 - DNA, 599 bp, Homo sapiens
ttaattatgttatacttttattactaatgaggttgaaaactttttatatgtgtattgaaatgtatgtcctcttttgtgaaagtctaatcatatttcttgcctattttttctagtgggatgtttgcatttttcttgttgatgtgtgggacttctcatatatttaccaactctcttgtacagtgtcacagattaatgattccaggaaatggttggagtttctcttggtcatcttatcagaacttcttgatatagaaatgaattttctgatgagtagatgataaaataatggatacaataatagagtaagatgctaaaactggtggatattctgtaatataaacaaaacaaaacaaaaattctctttaaatggcatgtgttttctcaataaatgaatgtcagataatarcttctcatttacatttagaatgtattattttgtttaccttttgaaaaagatatgccacaattttttaaaaatcaacaatggtgaagaaggaagagcaacaaccctaatttcccctaattggagcagactcatataaaatgttgaaatgaagtaatgcctgttcatgccttactatatatgtcagcattccact

SEQ ID NO: 732878 - DNA, 593 bp, Homo sapiens
acctatatagtcaataccatatgtgtttaatatcgaagcagattagatgaatgaagacagttgattttcttggcttacgatgtttctttaacatatttttttgtggattgatttgtgtaacctcaaatggcgtaaataaaactgtggtttttacattgcaaaaattatggactaaagaaatttactgcaggatagacgagggtattttgacatgccaatgttaataatgtggatgctttaacctagaaaaagattgattttggaaatgaaactcctaaatatgattatttgccattcattgctgagctgaaactgttacggccataaatgcacagaagaaaagggaagaaagaatgggtttaacctcataatgattagattatggaaaaatgaaaaagcactcatgttgctgacactcatgaggaagcctagaacttttagtayacttgtctgggatctagcagaagatgaaaataagtggataaagtcatttttacatgtttacattttactgtttatctttaatagtaatattggtgaaaatgtcctatggatatagaattaagaaaaggtgagttagacattagatacag

SEQ ID NO: 732879 - DNA, 619 bp, Homo sapiens
caaattcccagatggtagccaggcctttgggcttctttgtctttggagcatatgttgtgataggctgaaagagaaagttgctcgacttcttcctggattttgttctctaaatcctaaatgttgagagtttatgcccagaggaggagagggaggaatagaatttgtgaataagataggtccttattggacccaggtcagagttggagcatctgggagtagtgaggactcttattttccttgcttcaggcatgcartcatacctaagaggaaaaggctgcgtggtgtatttaggaacaacatattagtgtgctaggcactaaggctgtcagcctcagtaagaatctcagtgctcaagttttagaaacggcagagaattgacaacttcttaagggattatgcagcctgggactacaaatattaacagaggtgaccaggtggaccaaagaccaaaggatccacttaccaaatactctttctagatataaaagactctaaagatctctagactctctagagagggaaaaaaatctcaataatgcacacgactgaaactcctcctttctgtttagtggagtctcagagtcatgtataatttaatttagataaagagatagttttt

SEQ ID NO: 732880 - DNA, 619 bp, Homo sapiens
caaattcccagatggtagccaggcctttgggcttctttgtctttggagcatatgttgtgataggctgaaagagaaagttgctcgacttcttcctggattttgttctctaaatcctaaatgttgagagtttatgcccagaggaggagagggaggaatagaatttgtgaataagataggtccttattggacccaggtcagagttggagcatctgggagtagtgaggactcttattttccttgcttcaggcatgcagtcatacctaagaggaaaaggctgcgtggtgtatttaggaacaacatattagtgtgctaggcactaaggctgtcagcctcagtaagaatctcagtgctcaagttttagaaacggcagagaattgacaacttcttaagggattatgcagcctgggactacaaatattaacagaggtgrccaggtggaccaaagaccaaaggatccacttaccaaatactctttctagatataaaagactctaaagatctctagactctctagagagggaaaaaaatctcaataatgcacacgactgaaactcctcctttctgtttagtggagtctcagagtcatgtataatttaatttagataaagagatagttttt

SEQ ID NO: 732881 - DNA, 707 bp, Homo sapiens
tgctttttgtattatttactatgaatttaaaaatatatctttttaaaaattaactttaaaaaaataaaacaggccgggcgcagtggctcacgcctgtaatcccagcactttgggaggctgaggcgggcggatcaggaagtcaggagatcgagaccatcctggcyaacacagtgaaaccccgtctctactaaaaatacaaaaaaaattagccaggcgtggtggcgggcgcctgtagtcccagctacaggggaggctgaggcaggagaatggtgtgaacctgggaggcggacttacagtgagccaagatcaggccactgcactccagcctgggccacagaagcaagactccgtctcaaaaaaaaaaaaaaataaataaataaaacaaatagccaggtgcggtggctcacgcctgtaatcccagcactttgggaggccaaggcaggtggttcacctcaggtcaggagtttgagaccagcctggccaacatggcaaaaccccatctctactaaaaatacaaaaaaattatctgggtgtggtggcgggtgcctgtaatcccagctactcgggaggctgaggcaggagaatcacttgaacctgggaggcggaggttgcagtgaaccaagatcatgccaaggtggcagtgagccaagatcagcctgagcgatagagtgcgactctgtgtcaaaaaaataaataaataaaataaa

SEQ ID NO: 732882 - DNA, 707 bp, Homo sapiens
tgctttttgtattatttactatgaatttaaaaatatatctttttaaaaattaactttaaaaaaataaaacaggccgggcgcagtggctcacgcctgtaatcccagcactttgggaggctgaggcgggcggatcaggaagtcaggagatcgagaccatcctggctaacacrgtgaaaccccgtctctactaaaaatacaaaaaaaattagccaggcgtggtggcgggcgcctgtagtcccagctacaggggaggctgaggcaggagaatggtgtgaacctgggaggcggacttacagtgagccaagatcaggccactgcactccagcctgggccacagaagcaagactccgtctcaaaaaaaaaaaaaaataaataaataaaacaaatagccaggtgcggtggctcacgcctgtaatcccagcactttgggaggccaaggcaggtggttcacctcaggtcaggagtttgagaccagcctggccaacatggcaaaaccccatctctactaaaaatacaaaaaaattatctgggtgtggtggcgggtgcctgtaatcccagctactcgggaggctgaggcaggagaatcacttgaacctgggaggcggaggttgcagtgaaccaagatcatgccaaggtggcagtgagccaagatcagcctgagcgatagagtgcgactctgtgtcaaaaaaataaataaataaaataaa

SEQ ID NO: 732883 - DNA, 609 bp, Homo sapiens
gaggaagagcacaggcttttgaccagctacggggctcctgtcccactgtggccctaaaccgttcagagcatccatgggcaatggtaaacattgaggtgagttctggagatgtttctgctgaaactactccattgccatcttacagagtcagggttttcctgtagctctgttgcttttcctggactctttaggacactgaagaccagttttccaatcccggaaaacgtgtgcagaacattctgcctgaggttcctgcggcctgagaaatggaaacttattgagcaatgtcatgtcatcagcatccagttagccctgatgtctaatgagtgtctgcttgtttgcataatgcagaactggcctgtgtgtgccctgcatgtgggcatgggtatrtgtgccagagcgcatcctcaagtccatggatgtccgtcctaactgcacctagggaagggtggagctgaatgtctccattggtgcttttctatgtatcacagcgggtagcagaggactaagtacagcacacaacaggtgctcagtaaatgcctgctgatggttggttcactgactcatttgctcattctttctcagcctgctgatcgcttactcctgacc

SEQ ID NO: 732884 - DNA, 570 bp, Homo sapiens
acagtgggctcttgagtgatgtagttcaggatcctctaggcccactagggcctctgacatgaactcagtgttgtagtttatctccttatgttccaaattcctgcctgcaggatggagccttgaaaaggagtcagtcctttgtcctaggccctcaccttgctgagggacacacatcacttactcttcagaggtctcagcttccttatcaatatgataacttccagtgccaaggttctctcagtaggggcaagaatattttatctctccaagctcttaaagcaggacagcagagcagcctgaaatctccatctttagaactcttgaagaaagctggagaaagctatcttcctggcatggcttatcctcgggtaacctagaaggctcataaaccctgcaggtcaagttctggactagggagctttgaatgggcmtatcctacaccaggaccctgggaaagcctggtctctgctccaaggcaaatgtccacactaaatgggctgcatgttttaaagtttccaatgtgcaagcacattctgcttcctattacatactgaccaacatggagcaatg

SEQ ID NO: 732885 - DNA, 579 bp, Homo sapiens
ccctcaatacctggtcgtacaattctgactgctctagagcagccagccaagtaagttctgcttagagtccctgagcagtcttggctagagagagaattaaatggcattaacctgacaagcaaatttctgaggcacctggtacaaatctttgctattgattaaaggaattagtgatctgagaacctatgaatasacaaaaagaaaggaaatgcaatccttttccacaagcccagacacagatcagacattcactgatttcttttttccctgtttgcacatacctgtggttccatggggctgaattcccggaaggagctcctttgacacagggaccctgctctagcaagcgaatccctccccagcagaacttctcccccaagcactccacaccctcctttgaccacagcagccagcgccagggagacagtgtacgagggactgataagagggctagtaatctctgccctgagtctgttggggcatattgcaatctagagccactaaattgcctaaattgtctgcatctggcctccaccacccacacttgtaaaaaacaaacaaacaaaaatgtcagtattt

SEQ ID NO: 732886 - DNA, 633 bp, Homo sapiens
tagtattttttaaggaaatccaccccgctttgtccctgaacacttaaaaaaattgaacaaaataatttttaaataagaaaattataaaaccagattgttgtaagcccagttttttagatactagaaaaaaataaaatgtgacaatgacttagtgtttttcactttcactaggtttgatttctttaaacgttgggcttagggrtagaagaaatatcttactcatttttatttccctactagcagcaaagtataggctcataatacatgcataaaagtgaacattttcaaaatctgtctactgcctttcatttcccattgtctcctcttccattccctctccttatttggtaattcgagccagcctgaacaccagccaatgccgcaaagaaatggagggacaagtaagtggctgctaggttgttttattggctgggcatcaaaagcctcatttcccaccatgtctctgaggggatgatgaaatttgttcctgattattagatcagtatgaatcagtttgttacactggaactaatggaatagaatctaagacaggtgagtttgggaaggaaggctagaggatgatatctgggctctttgcatttgtctacttgagctttcataacacaatattag

SEQ ID NO: 732887 - DNA, 529 bp, Homo sapiens
ggttttcctttacagtttaacacagggtggtgtaaatgatgggatatggattgcaatataaacactgtgccatgcccatgtgagatatcactgcagaggatatttttatgttcctgtttttatttgggtcccactgcttcagaaaacatacaggtttgctttgrctatagaacatcacattccattcacttatttacaaaagaccacatatattgtgttcatggttcagtttaaaccactaaatagtacattcaatagaaagaagagtggaacaggagcaaaagactgaattcttatcccagatgtgtgatctcaggcaagtcatataattgactcaaacattgaatttctgaacagggagagtttttgctgcattcctctctctcaagttactgtgacaaacaaaatggtgcatatgaaagcatttctttaaattttaaataaaattttattgaggtataaattcacagatcttaagtgaaaattcacaggtttcataatgaaattcacagatcttgagtgtacagtt

SEQ ID NO: 732888 - DNA, 589 bp, Homo sapiens
tcctcatatccacagccttgtttttttatttttcttaatagcttttttgttttaaaatctatttttaggctgggtgcagtggctcacgcctgtaatcccagcactctgggaggccgaggcaggaggatctcttgaacccaggagttcaagaccagcctgggcaaccttgtctctacaaaaaaattaaaaaaaaaaaaaaaaaagctgggtatagtgacaaatgccactccggaggctraggcaagaggatcgcttgaaccctggaggtggaggctgcagtgagcagtgatcacaccaccacactccagcctgggtgacagaggaagaccttgcctcaaaaaaagaaaaatatatgtgtctggtataaaatcttgacagtataaagtaagttcagtaaaaaagtctcttccctaaacaatgttcccaatccttctccctctccccagaaacaaatgctgtcaaagttgtaacatccttccaattgctttttcccagtatttttttattaggtataactttcatactgtaaaaatcaccaatttttttctttttttgagaacggagtctcactctcttgcccaggctagag

SEQ ID NO: 732889 - DNA, 589 bp, Homo sapiens
gtccttcaaaaaaatacatttcaattcagacatttatggcaccccaaagcaattcaagtcccttcagcacagatggggtagggcatgtgggctcgggccactcacaccccaccccgcctcctcctggcgtggggaggcctgactctgcccacctttactcatgagcccaccgtttgaccagcgaactctctgaggaggcccatgtgctaggtttgggggctgaggcatttctgtgctcttctctggttcagtctccctcccaaggtgaaaaacagcctggaaaaccaagtagaaastgttgcagcagtatgtacttctgtgccctaaagagcaaaattgttacacaaattgctttgagattccttagaagtgaaagctttctctttgcttagcaggagccggtggcccttactttctctcaactttccatgtgttccagaaattccagccctatccccttagaggggctgtcatccaggaaggtgatttcatttttcttttagagagacagggtcttgctgtgttgcccaggctcgactctgaacttaggggctcaagtgatccttctgcctcagcctcccaagtagct

SEQ ID NO: 732890 - DNA, 610 bp, Homo sapiens
ctcctccttggaagggcttcacaccaagctggggaacatcaagaccttaaacctggcaggcaacctcctagagagtctgagtggcctgcacaagctctactcactggtcaacctggatctccgggacaacaggatcgaacaggtgagcccaaggacctcacrgttttgggatttctgtgccttggtgtgtatcatgttaaagaagaatgttaagattcctttcatttaaaagagaccatgaaacgtgttggcgtgttgctgaagtgttaagagaagggaccaaaggggatggaactcataccttgcagatggaggaggtccggagcataggcagcctcccgtgtctggagcacgtgtctctgctgaacaaccctctgagcatcatccccgactaccggaccaaggtgctggctcagttcggagagagggcctcagaggtgagccccagcacagtcagaagagcccagggagaccttcgggatgcagtcaagtctgcatgggcggtagggggatatatgtccattgttctacccttgcctgcttcagaaagaggtcctgtcccttaggggcttttcagttctgggaagtccactatctccccaggaaaaag

SEQ ID NO: 732891 - DNA, 621 bp, Homo sapiens
ggacaacagagtgacactctgtctcaataaataaataaatagaagaagaactaattcttaaaaattaaagacacatggaaggtttccgcaggaggctgggagctaccaagggttaggttgaaatgtgcaacgtggccacgtgggtccctyggaaatggtcagaacatggttatttcttgaggttccactggtgaaataaacgggaaacatggaggctgccccagcagtgagttccccatcccttcttcagcctagtttgtggccttcaaaagatgcttcccgtggcacctggatacaattcagaaggctttttcaattaatttaattttcattctggaggttacggcctcttggtgccagttccagagggtctgcagaatattatggaaattcatatttggagccaaagaatggcagcgttaaaaaaaaataaagaaaaaaggcaaaaggcatctaactaaatgaattagaaacagaagtcttccaaatgcttacctgtgagaacatagataaaaagcctcaaagcctggctttcagaagctgatgttgcatctttattatggctggcgagaatgacctgcgccctccctgaaaggcagccagagtctagactctactgga

SEQ ID NO: 732892 - DNA, 541 bp, Homo sapiens
gcctgccttccttcttttgcacctactgtgggcttggggtcagggaaatatatccaagggagtgctggtggcctaagaattcagtttcctggagaacagaggcatctgaacaggcagacgggagacagggccacagggacctttatagttccatcacgaaataactcaggggttcccagtggtaaatcttggtgaggggcttggctggattttgaagccctagggacagatttgccggctggtctggcgttccaggtcattggagcagagtgagtggaaagccttatattctctaagccccaaacaagtcgttgcacagtttttttgtttttgttggtggtggtggtttttttyttttggacggagtttcactctgtcaccagtctggagtgtagtggcacgatgtcggctcattggcgttgcacagtttttaaacccacagcagtgttcatctggaactcctgattttggaagcagactgggcttaggaactccagctgctgatgctttgagtaaagggaagagtacctgtctatggggt

SEQ ID NO: 732893 - DNA, 610 bp, Homo sapiens
ccctgtatcagtcccatggtgtaacaaccaaattcacaagatgctgcagaggggaagagattttaaattttctgagaaagacaatgatatattttggacaccatgagaaatactgttattaacttgttttaacctaggtacacgcaatcttcatcattcagtgattctgtatttgtgacttgcctgcttactaaaatgtatttgtcatccccacatcaatattcctggcatttaatttttttattttaaactttcattttaggttcggggatacatgtgaaagtttgtgacttaggtaaacatgtgtcatgaggttttgttgtacagattatttcatcactgtggtattaaacccaggacccaatagttaccctttatgttcttctccttaccctcggctattttgttcatgcacagaacggcaaaaaaattgaactttttttttttattttttttggatggagtctccctctktcgccaaggctggagtgcagtggcgtgatcttggctcactgtaacctccgcctcctgtgttcaagtgattctcctgcctcagcctcccgagtagctgggattacaggcatgggattacagccaccacgcctggcta

SEQ ID NO: 732894 - DNA, 653 bp, Homo sapiens
acattgatctttcaccattttaatcacaatataagtctctgcaataacaatttactatgtatgttttcatcatgggaagtgcccacaaaataagttggccataaagcatcaatttaaaaggaagcaaaaactggtaaagaatgaagcatcatgcaagtctgactgaaatatagctatggagaaagtggaaaaataactagctcwgtaactactccctgatgctccaggaaaataaaagaaagctaaaaggcttctaaaataaaatataacacgctatctgtaaagattcatcagccaaactacttaatgttaacttttttaaaaaatcaattactcttaaaaaaaactaacacctattcaaggggttcctaaagaatgagaattggattctttatataagacattttaaatatgagagatgttataagaaatattgtacttgataaagataaccgtaagctcagtagatattttattcttgaaattttgagttattttgatattttagtcttgattcatgaggaataaaggctgtatcatcttaccaaataaaaggttgtaagaaaaataatcagcttaaatgaacagttttcctctttttctacataactaggttattttataaattgctagatgtttttgacctcaaaaaa

SEQ ID NO: 732895 - DNA, 653 bp, Homo sapiens
acattgatctttcaccattttaatcacaatataagtctctgcaataacaatttactatgtatgttttcatcatgggaagtgcccacaaaataagttggccataaagcatcaatttaaaaggaagcaaaaactggtaaagaatgaagcatcatgcaagtctgactgaaatatagctatggagaaagtggaaaaataactagctcagtaactactccctgatgctccaggaaaataaaagaaagctaaaaggcttctaaaataaaatataacacgctatctgtaaagattcatcagccaaactacttaatgttaacttttttaaaaaatcaattactcttaaaaaaaactaacacctattcaaggggttcctaaagaatgagaattggattctttatataagacattttaaatatgagagatgttataagaaatattgtacttgataaagataaccrtaagctcagtagatattttattcttgaaattttgagttattttgatattttagtcttgattcatgaggaataaaggctgtatcatcttaccaaataaaaggttgtaagaaaaataatcagcttaaatgaacagttttcctctttttctacataactaggttattttataaattgctagatgtttttgacctcaaaaaa

SEQ ID NO: 732896 - DNA, 653 bp, Homo sapiens
acattgatctttcaccattttaatcacaatataagtctctgcaataacaatttactatgtatgttttcatcatgggaagtgcccacaaaataagttggccataaagcatcaatttaaaaggaagcaaaaactggtaaagaatgaagcatcatgcaagtctgactgaaatatagctatggagaaagtggaaaaataactagctcagtaactactccctgatgctccaggaaaataaaagaaagctaaaaggcttctaaaataaaatataacacgctatctgtaaagattcatcagccaaactacttaatgttaacttttttaaaaaatcaattactcttaaaaaaaactaacacctattcaaggggttcctaaagaatgagaattggattctttatataagacattttaaatatgagagatgttataagaaatattgtacttgataaagataaccgtaagctcagtagatattttattcttgaaattttgagtyattttgatattttagtcttgattcatgaggaataaaggctgtatcatcttaccaaataaaaggttgtaagaaaaataatcagcttaaatgaacagttttcctctttttctacataactaggttattttataaattgctagatgtttttgacctcaaaaaa

SEQ ID NO: 732897 - DNA, 533 bp, Homo sapiens
acatgttattaaatgtgttctaaaactacacattttattcccattattataaatccaatattattataaatgcaaacttatcatttatagagtttatctgtaacaaatgtcatgtatgaacataaactctgaaagctgaaataagagcaaacagttttatctggatcayggaaaaggggccaatgataggtgtttttttaaagctgtcaatttaatcatttgattctaccttgccatataatcttttaaagaataaaaaaaacgtaaacaataataaaaattatctacaaaaataaaaacttttttttaaaagaacaaacaaaaaaattaaaaacataaaattttgtgatgcatcattttcttgtaattttaccgtatcaggagaaatattgcttttaaatgagaatggagtctcaatataatgggagaagaaaaaaaaatcaaggaaggagcaaaataaccagaggagaatagggagaaaacagaagaggatgggatagatttgaagaaactccttttctccatttctcttg

SEQ ID NO: 732898 - DNA, 638 bp, Homo sapiens
tgcaagattttttgctccttagttcagctaaatctgggttcttgtctcacaaccaggaaaaattaggcacacggacacattgaagggtgaggaggatggaatttattaagcaaaaggggagctctcagcaaagagaggggtcctaccaaccagctcccatctcacagattgaataccaggccaccacatatgagatgaagaggccaggctcctcccctgcataaggtgcaaatttctggtggttccaccccattctcccagtgcgcatgtgggcccttattctgagcctctccacattgatttattttccttaccrcacatgtgttgaaggacagaatttttcactgtgggcatgttttggcaagcagcctgtacacaatcacctgggcaggctacaggttctccaaggatctttccctctctgcctaggcatttggctatctcctgcctccatcaatatcaacataccattctgtaggtggaagtgcagtttgtttgtaatatgaccctgtttctctctggataattccacagccttttaaaaattctcaggtaagagttgaaagaaaccaaaatatttcaccccaaaacacagtttcctgatacaatgagtattttttgaattaaagacccttagt

SEQ ID NO: 732899 - DNA, 614 bp, Homo sapiens
tgtgaggagcacctctgcccggccgccccgtctgggaagtgaggagcgcctctgcccggccggcccgtctgggaactgaggagcacctctgcccggccgcctcgtctgagaagtgaggagcacctctgcccggcagccgccctgtctaggaagtgaggagcgcctcagcccagccaccccgtatgggaagtggggagcgcctctgcccagccaccccgtctgggaggtggggagcgcctctgccyggcggccgccccgtctgggaggtggggagcgcctctgcccggcggccgccctgtctgggaggtggggactgcctctgcccagccaccccatctgggaggtgaggagcccctctgcctggccgccaccctgtctgggaggtgtacccaacagctcattgagaacgggccatgatgacgatggcggttttgtcgaaaagaaaagggggaaatgtggggaaaagaaagagagatcagattgttactgtgtctgtgtagaaagaagtagacataggagactccattttgttctgtactaagaaaaattcttctgccttgggatgctgttaatctataaccttacccccaacgccgtgctctctgaaacaagtg

SEQ ID NO: 732900 - DNA, 626 bp, Homo sapiens
ttgaagagtcccatttgtagcaatcacttcattttacatagcactggagatatgtgataattctcaagtagaaaagaaaaatttccacacacctcttttgcaatgtggcctacagtagagtatagttcaagaatattacttatgacagtacagctaaggcacttggggaattgaatacaaaatgacaattatttcatgggaaaatttaagtcaatgccaggaaactgctggtttagaagcatttacaaattataaataatatttaaacataaaattaataaatgacatatgagaatgatatgtgtactaaacaaatcttctttcaacacgacagtatgtgcaaatacacaataataatactgacatgtatgctaatggtctaatttttctctgctgtgtttatattgaagtctctatsaaaatcaattataatactgtcaatcccttgaatatgccttcaagttccattctctgagaggcattcagcacaaatctctgtgtcctcacaatttcgtcactgggagtttcccttaggccaactaaggttccttcatcttaattaggttaactaaagtctctacaatctaaaagtctcatattcacatttcttagtgctatttctgcag

SEQ ID NO: 732901 - DNA, 496 bp, Homo sapiens
cgtgccactgcactccagcctgggagacagagggagactctgtctcaaacaaacaaaaaacaacaaacacaaaacaaaacaaaaaaaactaaaaaaacaaaaactcagaaataggcagcagcagctaaagataagcagaacaaccatgttcatgttcatattcatgtaagaatgtattttgttaattgactccctgaattcaaaatacagtgcatccatggcaaaaaaaaaaaaaaaaaaaamagtttggaaaataacctgtttactcactggaaatttgaggttcagatattgcatgtggggtagttgtaatcatctttctctattagagagttgaagaagaaagagtctatctaattttaaatagttatttagttattaattattttgtgatgtcattatgctaattgtgacagctgcttttggcctcacagggctggaaaacaccttcctagttcacctgaaactgactaaatgtgggtaacaaaaggcagac

SEQ ID NO: 732902 - DNA, 597 bp, Homo sapiens
atgataagggggtcaattcagcaagaggatatgacaattgtaaatatttttgcacccaacactggaacaaccaaatatataaagcaaatgttattagagctaaaaagagagaaagacctgagtacaataatagctgaagacttcagcattggctagatcttccagacagaaaattggcaaagaaacattaaacttaagcttcactatagaacagatagagctaataggtatttacagaacatttcatccaattgctgcagaatatacattcttccwcacagcatatggatcgttctcaaggatagaccatatgttaggtcacaaaacaagtcttaaaacatttaggaaaatggaaataatgtccagcatcttctctgaccataatggaataaaactagaaatcaataagagaaattctggaaactatacacacggaaattaaacaatatgcttctgaatgacaagtgagtcaatgaggaaataaagaaggaaattgaaaactttcttgaaacaaatcgtgatggaaacacacacaacataccaaaacctctgggatacagctaaagcagtactaagaggaaaatttatagctattag

SEQ ID NO: 732903 - DNA, 597 bp, Homo sapiens
atgataagggggtcaattcagcaagaggatatgacaattgtaaatatttttgcacccaacactggaacaaccaaatatataaagcaaatgttattagagctaaaaagagagaaagacctgagtacaataatagctgaagacttcagcattggctagatcttccagacagaaaattggcaaagaaacattaaacttaagcttcactatagaacagatagagctaataggtatttacagaacatttcatccaattgctgcagaatatacattcttcctcacagcatatggatcgttctcaaggatagaccatatgttaggtcacmaaacaagtcttaaaacatttaggaaaatggaaataatgtccagcatcttctctgaccataatggaataaaactagaaatcaataagagaaattctggaaactatacacacggaaattaaacaatatgcttctgaatgacaagtgagtcaatgaggaaataaagaaggaaattgaaaactttcttgaaacaaatcgtgatggaaacacacacaacataccaaaacctctgggatacagctaaagcagtactaagaggaaaatttatagctattag

SEQ ID NO: 732904 - DNA, 495 bp, Homo sapiens
caagatggtttactgaatattttaagtaaacctactgctcaggagaaaaagaaagattcctttcaaaatattactgctcattaacaaagtacctggtcatccaagagctctaatgaaggtatacaaagagattaatgttgttttcatgcctgctaacacaacatccactctgcagtccagggaccaaggagtatttcaactttcagtcttaatagttaacaaacacattttggaagtctatacctgtcatagatagtgatttctgtgatggatctgggtaaaaaaaattgaaaatcatctggaaaagattcaccattgtagatgccattaagagcatttgtgattgacgggagaatrtcaaaacatccacgttcacaggagtttgaaagaagttgattccaatccttgtggatgactttgaggggttcaaggcttcagtggaagaagtaactgtagatgtggtggaaatagcaagggaactagaattagaattgg

SEQ ID NO: 732905 - DNA, 577 bp, Homo sapiens
acaatgaaacatttccacctaagataaagaacaggacaagaatgtctgctttcaccatttattcaacatttcactggaagttgtaacttgaaaattaaattaggttagattacaggcacggtggctcacgcctgtaatcccagcactttgggaggccactatttgggaggtgggtggatcacttgaggtcaggagtttgagatcaacctgaccaacatggcaaaacmccgtctctactaaaaatacaaaagtgagctgggcatggtggcagatctgtaatcccagctacttgggaggctgaggcaggaaaatcgcttgaatccggggtgcagaggttgcagtgagccaagattgcatcactgcactccagcctgggtgacagagcgagactctatctcaaaaaaaattttttttaaattaaatgaggtgagaaaaaagaaatgaaaggcatctaaattggaaagtaagtaaaactatctctatttgcagatgaaatgatcttccacatagaaaattccaaagaatacacagaaaagttacgagagctaacaaatgtattaatcaaaggttcaggata

SEQ ID NO: 732906 - DNA, 577 bp, Homo sapiens
acaatgaaacatttccacctaagataaagaacaggacaagaatgtctgctttcaccatttattcaacatttcactggaagttgtaacttgaaaattaaattaggttagattacaggcacggtggctcacgcctgtaatcccagcactttgggaggccactatttgggaggtgggtggatcacttgaggtcaggagtttgagatcaacctgaccaacatggcaaaacacygtctctactaaaaatacaaaagtgagctgggcatggtggcagatctgtaatcccagctacttgggaggctgaggcaggaaaatcgcttgaatccggggtgcagaggttgcagtgagccaagattgcatcactgcactccagcctgggtgacagagcgagactctatctcaaaaaaaattttttttaaattaaatgaggtgagaaaaaagaaatgaaaggcatctaaattggaaagtaagtaaaactatctctatttgcagatgaaatgatcttccacatagaaaattccaaagaatacacagaaaagttacgagagctaacaaatgtattaatcaaaggttcaggata

SEQ ID NO: 732907 - DNA, 577 bp, Homo sapiens
acaatgaaacatttccacctaagataaagaacaggacaagaatgtctgctttcaccatttattcaacatttcactggaagttgtaacttgaaaattaaattaggttagattacaggcacggtggctcacgcctgtaatcccagcactttgggaggccactatttgggaggtgggtggatcacttgaggtcaggagtttgagatcaacctgaccaacatggcaaaacaccgtctctactaaaaatacaaaartgagctgggcatggtggcagatctgtaatcccagctacttgggaggctgaggcaggaaaatcgcttgaatccggggtgcagaggttgcagtgagccaagattgcatcactgcactccagcctgggtgacagagcgagactctatctcaaaaaaaattttttttaaattaaatgaggtgagaaaaaagaaatgaaaggcatctaaattggaaagtaagtaaaactatctctatttgcagatgaaatgatcttccacatagaaaattccaaagaatacacagaaaagttacgagagctaacaaatgtattaatcaaaggttcaggata

SEQ ID NO: 732908 - DNA, 536 bp, Homo sapiens
agctaatgggcctcttgggagtttggagacaacatttttctcattcaggtgtgctactccagcccatttaccaagtgatccccaaagctactaatcttgtgtgggacccagaacaagggaaggctctgcaacaggtccaggctgctatgcgtgctgctctgacacttgggccatatgaccyagcaggtccaaagtgtcagtgacagatagggatgctgtttgggacctttgatcagcccacataggtgaatcacagtgcagatccttaaatctggaggaaaaccctgccatcctcacagataattattctgcctttgaggaatagcttttgtttgtggctggtcattagcagtgatttcacatttaaccacaggccacagagttatcataaaatttgagctgctcatcatgaacaggctgttgtctgaccctccatgtcataaaattgggcttgcacagcagcactctattatgaaatgaaagtagtatatacaagatcagattcaagcaggccctaaaggcagaagtaagttaca

SEQ ID NO: 732909 - DNA, 585 bp, Homo sapiens
tcaaattttcttgttttttttttaattgttgaattgtaaaagtgatttatattttttgtattttgattaatatagctttgtagtaaacttatgaattgggaagtatgagcggcccaattttgtcttgctcttttaagattgttttggcaaaaatgggtcttttcagttttaatatcaatgtgtcaatttctgcaaaaagtgcagctgggattataaacgggattaatagggattacagtgaatttgtagataagtttgtagagtatagctattttcacaaaatgaaatattttgattcataaatactgaattttttattgattttggttttttcttctttcaacagtgttttgtagtattcagtatataaacgttacttttttattaaattgatttctaattattatttttgatkctaatataaatggattgttttcacaaattcatgtttgcattgctcattgctaaagtataggtaaataactgatttttgtatactgatctgtactatacagattttctgaattcatatattagttccaattgaatttttgtggatgacttagaattttctgtgtaccaggc

SEQ ID NO: 732910 - DNA, 550 bp, Homo sapiens
caaaaaattaaaaatagaactaccatatgatccagcaatcccagtgctgggtacatatccagaggacgtgaaatcagaatgtcaaggagatatgtgcactcccatgtttattgcagcactattcataatagccaagacatcaaatcaacctaggtgtccaatgacagattaatgcctaaataraatgtggtgcagatacacaatggaatattattcagccataaaaagagtaaaatattgtcttttgtgccaacatggatgaacctggaggacctcaaattaagtgaaataaaccaaacacagaaagataaataacacgtgatctcattcatatgcagaatcttaaaaacaaaaaagttgatataatagaaacaagtagaaccgtggttaccagaaactgtggaagggagtggggaagagagaatgagaagaggttcatcaatggataccaagttaaaattatgaatgctgagtcagttctggcattctattgttaagtagaataatgatggttgacagagagatattattgtatattacaaaattacta

SEQ ID NO: 732911 - DNA, 657 bp, Homo sapiens
taatatataagtgttttacctcgactccttgattttgccaatgtaatggtacaaaatgatatctctttgtactcaacaacatttacatgattactaccaaagctaaaatgaatgtttcacatattaaatagtaacagatacttcttttkctctaaaatttctgctcatgttttttctatttattaattaggtatatttacctttcgtttttatttccaatggtttttacatattttttcattccagctttggtctgttatatggattgcaaatatcttcttctactttctggcttatctctttaatctttaaatagtgccttaatggagaggcattcttaattttttaagattaaacctctgaggactcatcagttccatcaaggtgtcccttaaacttgcacctggggcaggcagttcttccttagcacctgttcaaatgcttgtagaacgacctttgtcataaaatagtttattttgatgtttcctcagtttgactgtgaactccttcagaatgaaaatttgtaatttcctaatttattatattggaataaacataattcctttctcacaagtttgctttgagtatcaaatgagaaattggctgtaacatattttgttggtttaggttatattaagatgttacatcttatttata

SEQ ID NO: 732912 - DNA, 524 bp, Homo sapiens
gttctcacactgctataaagaaatccctaagactgagtaatttataaagaaaagaggtttagttgctcacagtgctgcaggctgtacaggaaacacagtggcttctgcttctggggaggtctcaaggagcttttacttatggcacaaatcacatggctggagcaggaggaagagagcaagggaggaggtgccatgyactttcgaacaaccagatctcctgagaattcactcactatacagtaccaaaggcggatagtgctaaaccattcatgagaactccacacccacgatctattcacctcccaccaggccctaccgtcaacactggggattacaatttgacatgagatttagtggggacacagatccaaaccatatcagtcactgatggacgaatacagtgtttatcttaagaaacaagagaaaaagaagagcatctgaaacccaaaccatatcagtcactgagacactcttctcttttaatataggcatttaatgctataaattttccttgaagtcttatt

SEQ ID NO: 732913 - DNA, 560 bp, Homo sapiens
gtactcaccagccagatgaagacacagaagatttctgtgccctgctttagaggatttttctgtgtcctgtcctagttagaatccactgttctcccataaggagtaagtgctattctgactcctgtcactcaagataagatttgcgtgttcttgaacttcatataaatggaatctcttgtatctctcttttttcatccaaactggtacttctggaattcacccatgttgttttggaaatcaacagggctttttttcaattgttatataatcttcctttatatgaccacaccacaattttttattcattctcatgatgataggtttgtaggttccccaagtttccctcgctctctatgtttcacagagcgccttgatctctctgtsacctgttcagctgcatgttttccctgcaggtttgaacccaagccaaggccttgaacattcccaggcactagtgaagttgtgtaggttatggcctgaaacactggaagatcagaatgtgttgcacaacacacagaagctagctgtgatcctgagccaaatttcttaagccctcttat

SEQ ID NO: 732914 - DNA, 598 bp, Homo sapiens
aaaagctctccacagtggagatggggatccaaataagttgcccagtatgaggctggggtccggggtttttatggactgggaaggggaaggaatgcacttagcctgcgggctgtcttggagaaagcgtgattcagcttggtctgggaccttggcccgggaccaatcaggaaccgaagtgatgattcataagggctattcagcttggcccgggaccaatcaggagttgaagtgattattcctaagggctattcagcttggccygggaccaatcaggagctgaagtgatgatttacagaggctgggcttttccttttccacaaaagaaagtgccaacctgaacctactgaagcccactgtgttcatgcccacaaaagaagaaactttttcctcggagcctgctgattatacaaaggacaaaggcatttctgtgtctggtcttgttcccttaactgagtgagccggaggtttgtgcgagtttttacctgaatgggctggaggttcttctatctgtgcagccatgggcatgtctccaggcacaatcccctgtgctagttcccttatcagtgcctgtagcttgattgtcttccccaggctgctt

SEQ ID NO: 732915 - DNA, 598 bp, Homo sapiens
aaaagctctccacagtggagatggggatccaaataagttgcccagtatgaggctggggtccggggtttttatggactgggaaggggaaggaatgcacttagcctgcgggctgtcttggagaaagcgtgattcagcttggtctgggaccttggcccgggaccaatcaggaaccgaagtgatgattcataagggctattcagcttggcccgggaccaatcaggagttgaagtgattattcctaagggctattcagcttggcctgggaccaatcaggagytgaagtgatgatttacagaggctgggcttttccttttccacaaaagaaagtgccaacctgaacctactgaagcccactgtgttcatgcccacaaaagaagaaactttttcctcggagcctgctgattatacaaaggacaaaggcatttctgtgtctggtcttgttcccttaactgagtgagccggaggtttgtgcgagtttttacctgaatgggctggaggttcttctatctgtgcagccatgggcatgtctccaggcacaatcccctgtgctagttcccttatcagtgcctgtagcttgattgtcttccccaggctgctt

SEQ ID NO: 732916 - DNA, 654 bp, Homo sapiens
ccccagtatggattctcttatgttccttaagctgggaatcatgaatgaaggccttcccacatgcctcacaaatgtaaggtttctctcctgtgtgtaatttacgatgaacattaagtgctgatctacgactgaaacctttcccacattgctcacatttgaatggtttctctccagtgtggactctctgatgagtttgcagatgtgagctttgactaaattccttgccacacacatcacacataaagagtttctctcccacgtggactctctgatgaacatgaagagctgagatgtaacagatgctttttccacactcatcacatgtataagacttctcttctgagtataactgctgaggaagatcaaagatgggaacatcactgawggactgtttacacttcccaccctgggaaggtttctgtcctgtatgaattgtgggtagtcctgcttcaacctgggaggggacatcaccattttcaaagaactgagagttatttatgatagagtcctgagacctggttaagtcttttgcaatttgttcccagatttgctggcaggaccactcttcatgtgctcctgcttctggaacagactccaactcagtttggatcttgcctcctataaagacacagatttaagagatgtgtacaggtg

SEQ ID NO: 732917 - DNA, 643 bp, Homo sapiens
tactttgagtctaagtcataccttaatcctgggaatgtaacacatcctactctgccaggagaatacaatagaaggtccgcatttggttattctcatctggaccctgttttatttggtttttctctaagtataatatacatgttttccctgtaaaaatcagtcagtgagaataaaagtattcagtgagttctgagagtttagaaaattattgaatgcaaaggcagttttgaaaacctcctgaatttgcacttggtgtgaagtgagagcagttctctgtaaaatgtctcagtaaattttgyagttggttgaactctgcacaacattaaacatcaaacacttcatagtgtttctatgtacacattcaaagtatccctgcacaagaattttgcacagcatatgtaaaatacttcatcttacttttctgtattgatgtggagagtaacttggttatctgaaggagtacagagacacacaactacagttttgaggggaatctgaaaggctgtccttccaggggtccacaaagggggatgctcctgagcagacaatcaaaaatgtgaagaatcacatgaaatgaaaagaaagcctatgatgcagataaataggactttataactttttatattgaagactacacattagt

SEQ ID NO: 732918 - DNA, 643 bp, Homo sapiens
tactttgagtctaagtcataccttaatcctgggaatgtaacacatcctactctgccaggagaatacaatagaaggtccgcatttggttattctcatctggaccctgttttatttggtttttctctaagtataatatacatgttttccctgtaaaaatcagtcagtgagaataaaagtattcagtgagttctgagagtttagaaaattattgaatgcaaaggcagttttgaaaacctcctgaatttgcacttggtgtgaagtgagagcagttctctgtaaaatgtctcagtaaattttgtagttggttgaactctgcacaacattaaacatcaaacacttcatagtgtttctatgtacacattcaaagtatccctgcacaagaattttgcacagcatatgtaaaatacttcatcttacttttctgtattgatgtggasagtaacttggttatctgaaggagtacagagacacacaactacagttttgaggggaatctgaaaggctgtccttccaggggtccacaaagggggatgctcctgagcagacaatcaaaaatgtgaagaatcacatgaaatgaaaagaaagcctatgatgcagataaataggactttataactttttatattgaagactacacattagt

SEQ ID NO: 732919 - DNA, 584 bp, Homo sapiens
gcccctgttatgacacttcaacacttctgtggtatccacaccaacaatgcataatctgaacctaaacatgaaatacataaatcccaaatgactatctttctataaaatactttgcctatatacttcaaggatgtcaagaataaaaagacaaagcctgttgaatctttctagattaaagaagactacagaaatgtgacacctaaaagcagtacataaaattggactttggaytgggggatgggggaaaacagttacaagaactttaaaaagcacaacaaatttaaatatgggagtttggatagaaaagatgatggtgtctagccatatctaataggtaacagaattaactaatattaatagtcttttaattgatatctagtatttaatagtgatattacttaatattatatctaatactacctagcatcttatatgaaactctatagccagcccttcctaaatgcctcttaccaagacactccatgatcaccttgctatgtggggttccttgatgcagaaagctacaataagttgtttctcattataagtttgttcccagtggtatttggctgatgggtgttaac

SEQ ID NO: 732920 - DNA, 488 bp, Homo sapiens
aaagagttcaattcaacaagaagacctaactatgctaaacatatatgcacccaacacaggagtacccagattcataaagcaagttcttagagaccttcaaagagacttaggctcccacacaataatagtgggagactacaacaccctactgacagtattacaaactttattgaggtagaaaattaacagatatgttcaggacctaaactcaaaattggaccaaatggatataatagacctgtacagaactctccaccccaaaacaagagaatatacattcttctcatagccacgtggcacatactctaaaattaaccacacaatcagacatacgacaatccttagyaaatgcaaattaatggaactcataccaaacacactcttggaccatcacacagtaaaaatagacatcaagactttaaaaaattgctgaaaaccatgcaattacatgaaaattaacctgctcctgaatgacttttgggtaaata

SEQ ID NO: 732921 - DNA, 593 bp, Homo sapiens
acactgcgagaaagcggtcgcacaggtagggtggagagaggcaggctgagcgaggtcaaagtcctggaaacgctcacagcagggcacagaggaccccgccaattccaacccccgggatgcgagcacagcacccccatcccagaaagcttccgtggacgggaaaaaaaccccattccccgcccccaccaaacctccgctctccgccaaggcttcttttcccttgcttggatcatcgatcatcgggtcgttgcgaccccaagcgaaggtgacaagttcagaaggacccgccagacgcagaaatggctcaaactacgcggttatgtagcaacsgcaggctcacacaccggaagtgctcgcgtctccacagagcgtctggactccacttcccagaattccccggttcaactgcttgagccaaagggtccgccattccatgaagttgatggactacagttcccagaattcactcgtccacccgcctgagccaacttgcccgcgactcagagtgtgtctggactccgcttcctccaatgccaaaggaaaatgtctataatctcactcttcagcgggaagcgttggactccgcggtggtc

SEQ ID NO: 732922 - DNA, 524 bp, Homo sapiens
tttagttttggcgcttcatcaaagcataaagtaaatagcagaaaaaaatcatatgaaatatattcactgttaaattcacatgtacactcagcatgatacatatgcatgatgattactccttattcataacaaatctcttaaaagctgggtaaggtgcatgttatttaaaaatacattaattcctaaaattagcatggactttaatttttgagcaggaacctctgggaagtgagtaaagtcttcacatatagatagaawtgctgcaatttttgatattcaacgacactgaatgttaagagaacataaagcagcctaaaaataaagtataaaataggatgactaattttatgtggagaggttttacagatgaaggaaattcaatttgcaagtctctttgtaagtaaaaactatttgttattcttgacgttattttgaaattcttatgcaacaactaattgcaagaaagagctctaaatatgctattgataacccattaaaggcaaagttgcaggttacttaaatta

SEQ ID NO: 732923 - DNA, 454 bp, Homo sapiens
ccttgggcaccttccttaaacttgataaaggctgagactgtaaagatttttagacatttcaaggaacaaaatagcaacagatctctgatatagcaatagatctctgatacagccaaggaatgcctgagagaaacaacactgcaaaacacagatgattccaggatcaaaatgcaaacaaatatggttgacagarctgctacatctttagtctccaggtgctaaccagttggctttaacccccaagtgacgagcctatagttctgcaggatttttacttttttagtcctttctttttattggttattttcatttcaaaactggaatttgaaatctgaaataaatgattcagggaattcctctgatgaggccagaatttcagtttttttcatgaaccaggtaccacctgaagaggcttgcttacccagtgagactccagaagggccgttctgttgga

SEQ ID NO: 732924 - DNA, 507 bp, Homo sapiens
agggcagggatggggaacaagtgcaattctgcagaactgtgttctcacaattaccctaactcgataccaaaagtgttcacaggacacctttggggtaggaggaaaatgtctgctcctctccacacaaccttataaagacagaaaagaggaacacctttacatatccaaaatagaagataatattcaaataatacattcagggctttgtgttccaatgacacaaaatattctgctgctcatagtgtttctccttgaggaactctttctagccctgtggtcaggtctccccttcaaatcatcttgaagatcactctaaaatgtctgttctagcgatgtgagtcggtctgactgctgcaatggaggargcggcaacacagaagctaggcagcctgggcttgcatcttagcccatcacttctctgctctgcccttcggcaagttactcaacctctccgaatccacagtcaccttgtctgcaagtcagagataccaacgttaccttctagtt

SEQ ID NO: 732925 - DNA, 619 bp, Homo sapiens
tctcttcttcctaactacattagtgaagaaaacaatcactaagaaaacgccagttccatcctaagggactgagcatgcaaaacaagaactccaagtagttcagttcccaagcttaaatggttgaccccttattctctgtgtgatattcatgcatcttgatgttcaaagtaaaagctggttctaatgaaccatgaattgtgttgttagtctcatataaggcaaggcctttctaaccacttccaactgcagggtctttgttttaggaaccatctggaagatgttttttggatagtagcacactctgataggatcactrcctccctctaacacctaaatacaacaatgatccttcatttccttctttctcttcttaactgaattgaataactaccccatttgacatccatcatttcccatgtgacttaaacagaatcattataaagagtgttatttctgcaaaaaatatgcaaaggtttcttcagttttctcatggatctctattaatcctttgatattcctatcatgctcacttgaggcatttttccagttattggaaaataactctgtgacaaatttccccaaaacttactggcttagaataacacctattttgctcaaa

SEQ ID NO: 732926 - DNA, 612 bp, Homo sapiens
cacttatgataatcatagactctctaactaagcagagacaaacattatttagacagagaagctaaaaagcaaacaaattacttgacctctgggatccaaggtctgtgtgatcaagcaaatcatggtgacttctctttcctatattctcctaggcccaaaacaagtaaccactttttctgtgtctgggagctatttaaacatcacaaagtatcttagcactgtatttggccataccaagtgctaaaacaaatgtctttgaatgaygggaattaaaactagcaaacttttagagtttcaaatgttttaatcaagtcttagaaacagccatatcagtgtaacaatttcaaatatttgcttcaattgttttaaaacacacacacacacacacacacacacagagagagagagagaccatgagaaaaagatacagaactaactctaaaagaattcaagaaaaatttaaggatgggaaaagataattatacttttttagttgcacagggtgcgaatggggtggaagaaattgagcaaaaatgtaattagtttgttacttctaaccaaaccacttctgaagcataactttataggctcttactctgatttttcattcta

SEQ ID NO: 732927 - DNA, 622 bp, Homo sapiens
ggattataggcatgagccactgggccaggtctgatttgtgggtttaaaaaaatatatatttaatataatttaccactgacaagccatcaaagtctagagattattttgtggaaaagtttgaaaatacaaagttactttccttaacagttagaaaacaatycatattttctatttctttttgtgtcagttttgatatagtttacttttctagaatttgatgctttcacctgaattttaaaatttattggcataaaacagttcattcaattgtcttatgactttttttatttttaagttatgcgttatttatttatttatttattttttaggcaaggtctcactcgggcacccaggctgaagcgcagtggcacaatcctagttcactgcagcattgaactcctctgctcaagtgatcctcttacctctgcctccctagtacctagggctacaggcatgcaccatcatgcttggctaatttttttttttttttttttttttttttgtagagatgcggtcccactatgtctcctaggctggtcttgaccccttggcttcaagtcattctctggcctctgactcacaaagtgctgagattacagatatgagccaccacccccggcat

SEQ ID NO: 732928 - DNA, 611 bp, Homo sapiens
gatgtcgaggtgctaggttgggccaggccccctcactgtgtaaggccctcactcctgcacattagcatccagaatgcatttctcatttgtggcttggtaaattcataaacacctgccggtgccaggactcggctgttaaatctgcgaatgttccagagrttgaccatatattctgggataacaacagagcatctgctgacaaaaatgattggggagactgaggacatctctatacagtctcctgtaaaaggtctctgaaatattgtttctaagaccagttattctggaagcatattctcttgcaaacccctccctgtgtgtgacctctctgcaaaatgtaaacaagtggagtggagagaaagtatccactccaaacagctcagcaccactggaggcacttcttcctgcactcttggcttaggacaaagggacagatggtgtgcaatcaatcagacaagcgactgtgacatcaccatgtctacatacagctttctcaggcaacactcgatttacattcccagcagcccccaaatcagtacaatcattattccacactgccctctagcacctgagattcacagttgttttgggatccagtacatgatcaataa

SEQ ID NO: 732929 - DNA, 598 bp, Homo sapiens
atttgagtttttaaaattcttatttagtccaattgtgttatcttaaccttgtaagaaacctgtgtttaagagtactgatagtctttctcatgaacatctttaaagacacagcactttaggatttgcaaagagcttttagaaaaaaaaaggcatcatcataaamctgtggacaataagacaaaatgatcatggttaaaaatgcaattgacaaagaaatttgattattttctctggcctacaacaatttagcaaaatagccacaattatgattgattacatgtaccaagataaatcaaatgtttaggactcttgtacagttttgaacacatactaatgatgtatttgtacaaatataactcaaaggttaagcatcatttcttgtttgacaatgcttcccataggactttaacatacacaaaataagcctaatatctctctgtcggattttcagggatgcatctggagtatctaaaatttagttttaggtcccccaaagtttagagttgtgaatttggaaagcttgtcaaatatcaaaggtttaaaacatttgatcaaaataggattacagattactgtaaaataatagtcattcatttag

SEQ ID NO: 732930 - DNA, 588 bp, Homo sapiens
gttcaaataaggcaaatgccccattgtaactaattagctgttttttcacctcatttcagctttctataggtcacttacctttttctgtytgtaagtgttatccaaccatgtgacagccctggagtcactctgaaccaattctgattttgagggctgcccaattcatgattcattttttgctcagttaagtactattaaatttaatttttctaaagtttatcctttaacatttctaacaatgaggccaccacatctttgctattcttgttctaaacataattttaaaaaatagtttttgagtcatttttttggatgatgttttcctagttacttataattttttcatttcagatggtctttcacttgctgtatccctagtgtcacgaggcttctcttcatcattctcctctttctctctctattccctttagacaatagtgatgctcacctactctttcagtcccagtctttcttcattgttttgatcctctttccacacgtcccccttggtcaagccactagactctcaccatgattgcatttccagcccccacacacgctgtgcccatgtgcacagacacacactca

SEQ ID NO: 732931 - DNA, 562 bp, Homo sapiens
ggattatctgtttttttctcatttggaatactagtcctttgtcagatggagtttgtgaatattttctactgctctgtgggttggtttgtttactctgctgattatacttttgctgtgcagaagttttttagtttaattaggtcccattgatttatttttgtttttgttgcatttgtttttggggtcttagtcatgaattctttgcctaagccaatgtaaaaaagagttttcccagtggtcatgagagttygtccccacttgagatcatactgcaaggttcagctgggagcttctttcaccctgaaacccctccctgagctcattggctgacttccctgagggcccctgtgagatacagtcaggaatggctttccttggttgatgctagagactgggaatgcctacaaggcacttcctgctgctgcttctaattttatatttcatgccgctccagctctgggtagggttaaggccttctcccttggactggattttcagattccacagtggagacgtgtacctggaggcagactttcctcccgtcacactctgggaactgata

SEQ ID NO: 732932 - DNA, 656 bp, Homo sapiens
gtcatgcaggatgtatactggtgggaacttcctctcatatgtcagaaggactccacttggctaataaacctcagaagtaggcccagtgaagagaagaatgcccagctacatccctcactggtcactgatgcccctcatttgcatttagtataattcctgtatggaatccctgcacttttgattggcttctggcccctagtatcacagtaatcccttatatgaatggcatgcttttgaggtagaaagtatctgttatataaaatccctgatgcagatggcaaagtgacactcrgggaagtcactatggtagaaagtggtagaactatagctcaaagccaaattggactccagctgcattgctctttctgctcagccaggcatcctgtctctagtttagagtttatagggcctgggactaaagccacttgtaaactttgatgtgatgaggtcaattatttttaaagtttattgtcagtacagagtgtttgaaaatcaaattcctcggaatctactggatggatgaagatacatacaaattcctcctccctcagctagtttacaaattactttatttcctttgcaacatgtatttattctacatgtggactcctatagtatttacttattctttattctttcaacctgttttgaaaacc

SEQ ID NO: 732933 - DNA, 651 bp, Homo sapiens
ggtatacagctcaaaaggtattatttttagtgggtgtctttgagttgtatgaattaataaggagcagcttgggtagtggaactcattaacttctcaaatctaacttatttacactgaatgtaaacctttctcagactattgrcatcagccattataaatgacgcccccaatgtgaactgtattttctggtggcaactgcatttttgtgttagagcataggagtggggatggagttttcagatgcattcagatatctgtttgtgggtgacttcatcttctgtcacctgcaaccctcgttgaaatcaaaagttctgactcattgcaaagacacttgcaaccaatcacatactggctgtgtttgttaaacaccattgtgtagcagttaattcagttcttttagaatcactcaagttggtcaatggtctgttgtcctcatcaataggttattagtgttagtttacagtagagtctctctatttcacttcacttgtaaaggcactctgtctgcatgggggctgattgttgcacgggaagtctctcccaaatatgagttccctcttgcagacccctctacaggcttacatatcctttttctacagagaggacttggcagcatatgccatccccccaaattatttaatatagggcatt

SEQ ID NO: 732934 - DNA, 651 bp, Homo sapiens
ggtatacagctcaaaaggtattatttttagtgggtgtctttgagttgtatgaattaataaggagcagcttgggtagtggaactcattaacttctcaaatctaacttatttacactgaatgtaaacctttctcagactattgacatcagccattataaatgacgcccccaatgtgaactgtattttctggtggcaactgcatttttgtgttagagcataggagtggggatggagttttcagatgcattcagatatctgtttgtgggtgacttcatcttctgtcacctgcaaccctcgttgaaatcaaaagttctgactcattgcaaagacacttgcaaccaatcacatactggctgtgtttgttaaacaccattgtgtagcagttaattcagttcttttagaatcactcaagttggtcaatgrtctgttgtcctcatcaataggttattagtgttagtttacagtagagtctctctatttcacttcacttgtaaaggcactctgtctgcatgggggctgattgttgcacgggaagtctctcccaaatatgagttccctcttgcagacccctctacaggcttacatatcctttttctacagagaggacttggcagcatatgccatccccccaaattatttaatatagggcatt

SEQ ID NO: 732935 - DNA, 526 bp, Homo sapiens
gctgtaagatccagaatgcccagctaacagtggttcactgtatcagttcattttttacttaacaggagctaggtggtcccagggtttgttcattagttcagcaacatcatctggaacccagggttctttccatccctcttttttttttttttttttttttgtgatggagtctctctctgtctcccaggstggagtgcagtggcacgatctcggctcactgcggtctccacctcctgggttcaagagattctcctgcctcagcctccagagtagctgggactacaggcatgcaacaccacgcccaactattttttgtgtttttagtagagacggcgttttgccatattggccagggtggttttgaactcctgacctcaagtgatctgccctcctaggtctcccaaagtgctgggattacaggtgtgagccactgtacccagcccctcttctctattattctcagctctttctcttcatgtttattgccacatggtctcaagatagctgccacagctccaagtatcac

SEQ ID NO: 732936 - DNA, 549 bp, Homo sapiens
atttctaacaagctcctaagtgatgctggtctgtacctctttgagtaacgcagccttagctcaccttccaaattgccttcttaattctctcccattttgaaattcttgcaccctgtctgaggttccccttacattaggatgttggtattacgagtaaatggagagggaagaaacatcccacatcccctccccaacttacattttacaacagccacaagaacctagttatgttacaagtacgtaaaccaattggatagtttctaataatctgcaatcaaaagaatttggtcatttcyaaagtcccaactttccagaacctttaaattcatattttgtaaatcaatttgtgcctaggggagtttagcaatcccccggctcctctcatctagccatgtgtaaggctcctttcatcccatccgtgctccttgcctggctgcagagagtcctgctctccaagctgaactggaaaataacttgtaacacaatgtcagaagataaagcttcaggctacccctcctaggagtgtttgaatttcatagacaatgacag

SEQ ID NO: 732937 - DNA, 618 bp, Homo sapiens
atgtcagaaggagaagttcaggaatcatcaagatgaattacaggagctcggagtcgggaggctggtgattaagggcctgggtttgaatcctggctgcacccatactggctccataggaccaagagcaagccatgtgatctctatatgaattttcccatctgaaatatggggatggtaacagcaccaacctcatgggattgtcatggggatcaaaggaggtgtgactgtgtgaactgttaaagagtggggctgrcatagaaaactcccaccaaatttcagtttttgtaaccgtcagacttccatatcccaatagctgataaagcttctattcaggtaatcaataattcggacacataagatgcatatccacaaagtcttctttgctcgaaagggccaaagcaccagggtaaatagggtgctgaactgggagataggagctggggtctagtccctggttctgtcttgacttccatgtgatggtcagcaagacacagggatactctaagccttgtttacagagtgaaacgattgggtcgtaaattctaagatagtataagatcaatctaaaacatgaatgctttagaggattgagaaacatacgggttgatcatgcatggc

SEQ ID NO: 732938 - DNA, 557 bp, Homo sapiens
agaatgatcctgcatcacagaatgactggtaacaatgtactcatcaccccagaaaggatcagttcccatggtgcaggcaggtggggcttagggacaggaggaaggccaggatacaccatgcaaaccaataaaccaaaccaaacccccacacagtgagaggaccaccaggggcaccatggcctgtccctccacaagatggcactcaggtcccttgtcttcagttttcatctgtgatgttcagctgtcacagaaacagactggggagaaagcacatggctcactgctcctatcatgctccatatgctttctagttggaacactacagtttctatgtctttccctcaagatcatgaggtgttgtgttggggtcctcagaagctctgctgaggcagggagagggagtggcrtgtaccactctcagtggtctggctgcgttggggtttactcaggggctgctgaagaccaccctgtcacaaaacatcactggacttctatgctcttcaaatccttttttctgcttgtcatgatttttcttttctctcttgtcctgtattctc

SEQ ID NO: 732939 - DNA, 551 bp, Homo sapiens
agtcaacggaaggggagcagattagttccttctgagaggaagttttcaaaggcattataagtttttaccagcttcattgctcttttcctgtgccaagttccttcggcttggtcccaagaatgagaaggcacatggaaccatgggacctgagctgtggcctcctacatgtgacatgagcaagaaagaaatatctgaggtttgggggtcattggttacttcagcacttagcactttattgaaattgtttgtttgyttgtcttattcaaggtgcattcaggaaatgcatcttcttcgttggatgtctgcatagtctggagcttggcagttggtgggagctaataaatgtttgtggaataagtgaatgattcaatgaagatctccaatgagaagcatctattatctgccatggcaattgtgctgactggagaatgtttcttaccctgagcagaaattgaatcctcctgtacttccactatgggttttagttatatcccttaggctcctataaaaccgtctaattcctcatccatatgacagccctctaatgcctg

SEQ ID NO: 732940 - DNA, 513 bp, Homo sapiens
aagatctccaatgagaagcatctattatctgccatggcaattgtgctgactggagaatgtttcttaccctgagcagaaattgaatcctcctgtacttccactatgggttttagttatatcccttaggctcctataaaaccgtstaattcctcatccatatgacagccctctaatgcctgaaagcagtgctactattcatcttaggattttatctttgcagaataggtattcccagtccttatccattttggtatctcccatggttttaatgtccttggtttcctgggggtcctctttgcaggtgctcttgatgcatgtctctcttagcacatgggatctgcaattagcatcattatccatgtgtggtcagagtagcacagggtgaggaaagagtgtctcctccctctgtctagacaaattatactgagtctaacacagcctccagttgccttcactggtcttggcagccccatcatgctgctgacccatgtggagtcaaccaaatcccttaag

SEQ ID NO: 732941 - DNA, 575 bp, Homo sapiens
tgtccagaatttgaccactgcagagcttctcccttgccaccaccttcatccaagccaccgtcatctcttgcttggatcggggctgcaagtccctgttcctgagcttgttctcctctagtctacctaagagacagagtgatgctttgaaaatacaaaccacatcatcttagtcatcctttaaagcactccagtggttccccgatcttacttggtgtgaaaaacagttatttcatggtgggtcacgcctctaatcccascactttaggaggcggagacaggatggtcccttgagtcctggagttcaagaacagcctgggcaacacagggagaccccacttctacaaaaaattgaaaattagctgggtgtggtagcgcaagccagtagtcccagctattcaagggctgaggtgagaggatcgcttgagccctggaggttgaggttgcagtgagccatgactgcaccactgcactccagcttgggtgagagagtgagaacttgtctcaaaaataaatagacacatgaatgaatgaatgaatgaatgaatacataaataaataaatgaaactgttaattc

SEQ ID NO: 732942 - DNA, 383 bp, Homo sapiens
attttggatgtgtcaaatgttaaaaattaatttcacccatttttgtgacgtggctactaaggaatttcaggtgatgcttgtggctcctcacacggtttctactggacagtgctgctgcaggtgatcctaaggcgggtgggtgcaggaacccagctgagagtttagaaattacgtgtaamtttggagacaagtgtctgtgggggaaggagcctccggacgtggagatacaactcttgctcctaacatttatcgagtctttaattaatgccctgggtaactataaggttggaactgtaattgtcaccatattgatgatgagaaacttgagaaaggataagtgacttgtctaaaatcacacagtaaaacctcaaatcaaacccagg

SEQ ID NO: 732943 - DNA, 608 bp, Homo sapiens
gcacacttttcccttccccgatgacctgggatggtggccaggccgtgcccttgctgttgctgggcagtgtctttttggaaagggagctgccccaggctttagtgcagctgccaacgctgttaggcctggcctctcgaggcctcttctgacttcaagggtcacagccccccaaagatcctctcacccatggtagttgctgctcatggttctgtctgtccgtgcaccgatgcayacaccacaccccaccgctgtactctgaaattggcgagtgagttgagagccagctctgcggggtcatcacgcagccatggttgtgcctgtccttcatggtggtctttcaggttatcttggcaacatgtacattgcttttattttttttcttttttgcttttattgtacagtcagttctataaaatttctcttttgagttttatacctttgtagcattttagatgacattgtgtttgtactttgttgtgtagagtggaagaattgtgttgaataaacccaagatcggaatgcaaatctaaaaaaaaaaaaattaaaacaaaaggggcaacatttaaaataatatttaatctgtatgttactaatatacctagtaatga

SEQ ID NO: 732944 - DNA, 552 bp, Homo sapiens
cagtcactgctccaagtgagtttatcagcaagccacacacccaacacatggtctctcttttattattaagaaaagtaggtaatacataagaagcggggctcccaccaatcattagcaaatcctccaaagaaaatccagcatatatcggatgaagtcttttccctagtggacttgtgaaatttctctgactgaatcatttaagcaaagaaaactttcctcccttccaatcatggtctctccttcatagtatgtggtgctcattcaaaagagtacatgcagaagaaaccagaatatatatgtttgctctctctccatgcggggtaaacagtcctgcctttctctgccttccaacccaaaggtggccacgcyaggtgctgcactgaaaaagatttgtggcttattgtcctgatggatgccagagtaatggaatagctctgtagtatgtcctggaaaggcaggccaacaaagcattgtgctattgatggctcacattataatggagaaatattagggggatatttcaatagccacccagaggagaaacagcagcta

SEQ ID NO: 732945 - DNA, 607 bp, Homo sapiens
atatatatatacacacacacacacacacacatatatatatctcaagacaaaagtaccaaacattactaaaggtacaaattttccactaattttaactagtccaagctactgaaatccttttgtatgtatatattaaaaggctggaattgtaatatataggacaataagagttgcctagtaatttatttcagctgtggcttaaaagaggcaagaggcttcacggagaaactgaacagagaccaatcaggaagtccagctggcataaatctttgggtcttgaggagttaggtaataaacttactaaatcattgcccttatttttataagtcaaatagcaggagagttgctaaatgccttttatttgaaggggtttatttttttcctttcctcttgtcttttaatacaggttgaatcaggttatgaggaaaatttcacccgaatgaaatacagtacttgccaataaccaacatcaatctaagagtcagatccagaaaaattatacaacttaaaatgcagtcagggtaatgcttcaaaaagtgataatragattcctccaagttggacccgtttctaagttcttacagacagctgctttaccatgcggtgt

SEQ ID NO: 732946 - DNA, 630 bp, Homo sapiens
aaattgaggtgtttgtgtgtgtgtgtgtgtgtgtcttttttgttagtgtgtcttttttgtttctgtttagagtttaataaaatcctaagacagttgttgcatttcaagaggaacatacggtcctgttattaatgcagagtcactagtgattatatcctcagaccttcaaaagggaccctcagccttcattccactcatctggaaagataaagtgttytatcaaaaaagtaataagtgcacaatataggaaaaaaaaaacgaagaaaaaaggaaccaatcctagttctacaactcaaacaaaattatttatatcttattataattcttcccagtcttttttgttcctatatagcgactcttccatattaaatttcctttcttaaaaaatcggtaatcatagtagagctccttggaattttttaaaagggagacatgatggacatatggaattcttggcttcccagcatctatgtcaccttcctttggtaattgtggccatattctcctttgggtattacttttccagtgatgtacctgatgggaatgtcacctggaatgtcctgtgttcccctaaccctggggagggcatctgactcacatgaggccactcagatacttctatgcttggat

SEQ ID NO: 732947 - DNA, 495 bp, Homo sapiens
tatacattgagtacttgttctgtgccaggcaccatgctgagcactttacatatattataataatccagcatcacaaaaactctttaaggcaagaactgtagccacaccagaccaatctgcttcaacttttatgtaataaagttgtaagttgtttttcagttgctatggaccctcaggtcatacagcctgaacgtacccagatgaaccaagcatgcaaccacagaggaacctaaatgcttggaccaagaaggaggggaatgaatcaagaagtggacaccacatggcaggatccagaatccagtgagtctgagcccyggcatcgccccacggcagaaaccagtcagatcatgcctcccaacatcaccttgtcacaaaatccaattagatcatgcctcattaccctatgcttataaaatctgacccaacccccaactcaaagagatagattcgagcatttcctcctgtctccttgccagtagacttgcaataaacctt

SEQ ID NO: 732948 - DNA, 541 bp, Homo sapiens
gtcttgcctctgtcttactgagtaagtgtaaacaaggcactttgccctgccacatctccattttctcaaatacaaaacagggaaaataatttctgcccagcctcctccacatggcccctacaggattcagaggatgctgctggcagygcagcactttgaaagtttatgaagttttccacataggcaagatgctgtacatgtctaagatctctcccctcccactttctttgcttacacaaccaggaagtgaaaagcagatgtggaaaccactctcaaactttgtgccagaccctcaaatcttgtgcctaggaaatgtcctccaactttccctcacaccaacagcatcattatcttggcatagaagaaaaaaaatctatacatctcttcaaatagacatctaatttccaattggcttcacctggaatgtgaaccataggaaacagaccacaaccaaattttccacaagcactgttttccatgcacacccaaaaccaagcaggaaagagaggaaatggaaaattcccctgggcacttagctctt

SEQ ID NO: 732949 - DNA, 554 bp, Homo sapiens
ttctataactatatatttctccagattctaggaactgtccactgaaatcattttacattttaaatccattgtatttaggttttgtctttcccctacaagaactgaatctatctataaactaactacctagtattttcttggtgagtagccacttttattttcytaaagtgtacaggatggaaatttgaagaagatgtgcaaatcacaactacaaggcaggcaagtgagtaggggaggcttctaccctttcttctgttcctaatagaacccccttaaagctcaagaaagagatgtaagcagctagacattagagttcttccttcttttgcaaggaaaaaagggggaggggaagagagagagagactgattttctgagcactgacaggctttgtccttgatgaatttcattcttcctttgttctatgtgtgtaagaaggagggagagaattagaagaaagagtgacaaagaaattgacatccaatgggtatgcaaaagagaccctggctgaacttaccatttgagggcagggcgccaatgatctgtggccacccgt

SEQ ID NO: 732950 - DNA, 613 bp, Homo sapiens
ttggagtagtaattatattttaatgtaatcatctgtgaaatgaatgggttttcctgcatgacttctaagtttctgggtctctacatttccatgattccaaggggctttatattttactggacacaaaattcacaacagagaactcaaaaccagagaaatctggtcacatgcaaagttgcaactgtgatttctactttgcctcagcctttatgaatatgtctgrccatgtatgtacaactacgtaactatgaagcttagatttcaacattctcaatgtctaaagatgactatttgtattttaaaaagaagataactatgtttccagactcaacaaaaattattaagtgctctagtcttctaggcaatcaagccaagaaatcgggagtgaaaaattctttgctacttcctgtgtgaaaacacttagttcaatgccctgcatgagtagacgctccacacatgtgttagtagtgaaagaatgaaccactctttcttctttgttcctgcagagatttgcttgattctgttttaaatgcttattccattcttcctggtaataaaatgggttgtctccatgtatctaatagactgtaagattcttgaggaacaaggggta

SEQ ID NO: 732951 - DNA, 599 bp, Homo sapiens
aagagtctcaggttgcatgcattttggatcaacttaaattatgtgctcatgctctaagctactaggggctgtcataagaacctcccagatttcatttttcatatggtagtaagcagtctgcatcccaccaaatctatacacatcgtgtgagctatccctaaagaggaagaggttggatattaaatatcattcccccaacgtacacacacacaatgcctactacaaggaagatgtccacacctagaccactggcactatgagtcaatggaatamatgttctcccagccacagctcctacattcagcacttatttatggagatgaatctctaagaatgtgacagcgaattataatttatcagccaggcagagcccgttggttttatttaatgattcatgggtatatctctaatttttttaatccaacataatcaatcttatagctggcagaaatttcatcccaaattctaacagtaagatatctgttaggatcaatttcaattttgttctgcattttttataagatgggccaggtgctagccatttccaccatagatacttaaatttctcaaaatgttattttatattcagctatcttaag

SEQ ID NO: 732952 - DNA, 478 bp, Homo sapiens
tccatccccagacctctgtcaccgtgcccttgtctgtgagttgtggctaaaaggacagactcctgagtcgggatgcctgggtctaaatcctatgtggccttgggaaagttactcatcccctcttgaactcagttttcccatctgttaaagagagagagagagagagagagagagagagagaagcaagccctggcaacatagagaggcgtcatctctacaaaaataaaatttaaaaaatagccaggcatgatggcatgcatcaatagtcccagctacttaggaggyggaggtgggaggatcacttgatcccaggagatcaaggctgcagtgagctgtgattgcaccactgcactacagcctgagcaacagagcaaggtcctgtctcaaaaattaaaaagagagagagagaatgataatagtatctacttcgtagggttgttgtgggatttaattaactattagcacagaccatgacatt

SEQ ID NO: 732953 - DNA, 683 bp, Homo sapiens
acccaagttaagtgatgatctacaaaataactggccagttctcttcaaacttatcaagatcatgaaagataaagacataagaactgtcacaatgtgggggaaattaaatagctgggactactgtattagtccactctcacactgttacaaagaaatatctgagactgggtgatttataaagaaaagaggttaattggctcatggttctgcaggctgtacaggaagcatggctggggggtctcaagaaacttacaatatagtagaaggtgaaggggaaacaggcacatcttcacatggccagaggaggaggaacagagaggaggaggaggtgctgcacagttttaaacaaccagatctcatgagaactctatcacaagaacagcaccaaagggggaaatccaccccrtgatccaattacctcccactaggcccacctcaaacactggggattgcaattcgacatgagatttgagtgtagacatatcaatcaaaccatatcaactagtaaaggcaatgtgggatcttggattagatctggacaagaaaaggacactagtgggaaaactggcaaaattcaaataaggtctgtagattagtcaagagtatcaaatcgatgttaattttctggtttccataattgtcctgcggttatgtaaggtgttagcactggtggaagcagagtg

SEQ ID NO: 732954 - DNA, 625 bp, Homo sapiens
cttgtgctcagtcagttcccgggtgggggccacaagatcagatgagccagtttattgatctgggtggtaccagctgatccatcaagtgcagggtcggcaaaacgtctcaagcactgatcttaggagcagtttagggagggtcagaatcttgtagcctccagctgcatgactccaaaaccataatctctaatctttgcttatgtttctaatcttggcacatttctaatgtgrcacttgttagtcctacaaagacagtctagtccccagaccagaaggagatctgttttgggaaaggctgttactgtctttgtttaaactgtaaactataaagtttctcccaaagttagttcagcctacgcccaggaatgaacaaggacagcttggaggttagaagcaaaacagagtcagttaagatagatttctttcaccgtctcagtcatcattttgcataggcagtttcactgttacaagtcaagggccgcatgagcaggaccgtgggggtcacgttaaagatttctgcctttctcctaagggtaatgaagtggaattgaaaagtgttcagcaggggagtgaggcaaaaagttctcccctacacaaataaaaaccccactttctgtaagttaca

SEQ ID NO: 732955 - DNA, 508 bp, Homo sapiens
gaaggtctattctctagggaaaggaaaaaaaatagaggcactgaagcaccccagatacagcagagagcagggagaattagtaaaggtttgcagactcagtgcggaaccccacctcccagacttcttctcgccctcagctcccagattgctaggcaggacatggaaatgatctccaggtcatctgacaatctccaaaggaaaaacctagagataccaacattgrgatgcccagagaccagctacgtgaagctcacaattgacaagctgtatccataagcgcagcttccagttagctttcaaatatgagctggaactaaggctccccagacagttgaggagaactttaatgtgaaagacagaaacttaaataagcatgggaaaaagagcagcttggaggaggcagagaccttgcaggaaaagggaaacttaaagagagagaaaactatccatcacagtagtgtaaaccaaaagtatctgagacaggtctcaatcaatttaggaagcttat

SEQ ID NO: 732956 - DNA, 621 bp, Homo sapiens
gggtcttcaaatttggtatatgtataaattggataaaaactaaaacaaattatcccttttttaacttgggcaatggaactaaaggctttctgaaattgcctttacctataacagtgcagggctcaaagtgatttcttatttttaggaaacacaataggcagttttcttgaactctgaggtcttctggcatcccttgctgtttgtgaaatgactcccttaagtgaagaaatagatcagagtcacattccctgtgtattgagttygggtgcgttttggcatgtccctgccactgagccctgtgaatcgatgtaaagcacaggactaatgagatcctggtgcacatcagctgcccctcagtcacccccaactccttccctagacaggccttggactccagcaaatcaagggcagctcatgccccttgctgggggctctcctagccccctcctccatcacccactatgcatattcctgaggctgcaatgaatgttcccagagattgttgcaggaatcaagggacaagagagaccaatgggtgagacaggaggatttattaggtgtgcaccagcccagtggattagcatccaaaggctgagccctgaacaaagacagggcttgact

SEQ ID NO: 732957 - DNA, 612 bp, Homo sapiens
attcatctgaacacagaagatgaatattacatagagccataaaaaactaaaattaaaaagctgggctgggtgcagtggctcatgcctgtaatcccagcactttgggaggccgaggcgggcggatcacaaggtcaggagatcaagaacatcctggctaacagggtgaaaccccgtctctattaaaaaaatacaaaaaaattagccgggtgtggtggctggcgcctgtagtcccagctactctggaggctgaggcaggagaatggcatgaacccgggaggcggagcttgcagtgagccgagattgtgccactgcactccagcctgggcaatggagcgagactccatcttgggccggggagyggggtgggggaagctggaatgagaaggcattattttgtgtgtgtgtgtgtttttttttttttttgctttctgtgctgccgtgttgcctcctttccccagtgctatgctccagctgcaatgggaggatggcaatgtgctggaaatcccttatgagaaccaccaatgtatgcaggagtaaatgaggggtaaatgaggaaagaggaggtaccgaccaagcaccaaggctcactttcattcaaactcacaaagccta

SEQ ID NO: 732958 - DNA, 578 bp, Homo sapiens
aacttcctatgtacagaaagtgccctatgaagatgtaccattttaactttttttgtttttgagatggagtttcgctcttggcatccaggctggagtgcaacggcacgatctcggctcactgcaaccttcacctcccaggttcaagtgattcttctgcctcagcctcccaagtagctgggattacaggcrcccaccgtcacacccagctatttttgtatttttagtagagacggagttttaccatgttggccaggctggtcttgaactcctgacctcaggtgatctgccagcctctgcctcccaaagtgctgggattacaggcgtgagccaccacgcccggccatttcaatcttttatagcatatttttactgcatcttttctatgtttaggtatggattaggcacacaaataccatcaagttataattgcctacagtattcagtatggtaacatgctctaggggtttatagcctaggagcaataggctgtactatctacgtttgtttaatttcactctatgatgttcacactatgatgaaaccacctaatgacacatttttcagaatgtatccctgtc

SEQ ID NO: 732959 - DNA, 583 bp, Homo sapiens
gccatgacgatcacagaaagttagtctcatcttgccctctctccgctctgcccaggctggtttggtctctcccatccttagcctcaaggtcacagtaagcgtaccatgttcaagacaagagcccactgtgtgggacagtatcttcgctgcacagccctgaggaggcctccgaacakgccccatcacaccagatgcactcaaaaacatacggtgtcatttacccccatgtgcctagagccctagactctgcactttgctgtgtgccaacccaggctagccagcacggccttcagacccagccccagctctcacgcagccgcacctccctcctgtccgagcaaagttcgtcttgccttgactggacgtccaaagtttccacaagagccttcagatatccagtgagctccaaactggccacacagccaccagagagatcctgttttgaagtgctggattatgatatttatttacactgaccacagaatgtatttatttttaactttcactgtggaaattttcaagcatatccacaagaagagagactagaataatggacttccatcttctcatcccctgacttcaa

SEQ ID NO: 732960 - DNA, 583 bp, Homo sapiens
gccatgacgatcacagaaagttagtctcatcttgccctctctccgctctgcccaggctggtttggtctctcccatccttagcctcaaggtcacagtaagcgtaccatgttcaagacaagagcccactgtgtgggacagtatcttcgctgcacagccctgaggaggcctccgaacatgccccatcacaccagatgcactcaaaaacatacggtgtcatttacccccatgtgcctagagcccyagactctgcactttgctgtgtgccaacccaggctagccagcacggccttcagacccagccccagctctcacgcagccgcacctccctcctgtccgagcaaagttcgtcttgccttgactggacgtccaaagtttccacaagagccttcagatatccagtgagctccaaactggccacacagccaccagagagatcctgttttgaagtgctggattatgatatttatttacactgaccacagaatgtatttatttttaactttcactgtggaaattttcaagcatatccacaagaagagagactagaataatggacttccatcttctcatcccctgacttcaa

SEQ ID NO: 732961 - DNA, 627 bp, Homo sapiens
gcattattaactggagtcacaatggcgcacgttagatctccagaacttactcatcttgtaacttaaagttttcagactttaaccaaaatcacattttctccactcccaagccctggcaaccaatgttctactcactgtttccataagtttgatttgtttagagtccacatataaaagaagatcctgcaggatttatctttctgtgtgtggcttatttcatttagtataataacctctagactcatctatgttgttacaaatggcagaatttccttctttttaaaggcttaatgatatttcattctatatgtattacataccacaatttcctgatcygttaattcatcaaagaacacttactttgtttccatattatgactacagtgaataacactgcattgaacatgggagtaccaatatctctttgaaatactgatttcaattcctttggatatgcaccatttttttttcaaacaaaaatagaaaaggcaatcctaaaatgtgtatggaatcacaaaagaccctgaatagcccaaacaatcttgagaaaaaataaagctggaggcatcacactacccaatttcaaagtatagtataaagctgtagtaatcaaaacagtatagtatt

SEQ ID NO: 732962 - DNA, 610 bp, Homo sapiens
cttaataataatgtattgtatttttcaaaattgctaaaagaatagatttttaatgttcttgccacaaagaagttggtgaggtgaggaatatgttaattagcttccttgaatctttctacaatgtaggcatagatcaagacatcacattgtaccccatacatatacacaattattatttttcagttaaaaataaattrataagaagttgatgtttagggagtttaacatgcttgcccaaggccacacggacaacagcactgctgtaacttggtgtcaatggcaggtcgaagacctttatcttctgtcctcaactccagcactccttgggtgaccatcactctacaaactgaattctgtatgtcaagaatatttccctttttgctccataggagaaaattcatgatctgaatcataatatcatccttttttatctttctgatagcctttgtaccagtagcctgaggtccattgtgaaggtgtgaattgaacttacaacttctgatgacaaaattccctgggccacgcacaaggctgtgtttatacttaataatctcatcaggggttgtaaggcctaattaattactgttggtacagcagcctgatatatgaa

SEQ ID NO: 732963 - DNA, 610 bp, Homo sapiens
cttaataataatgtattgtatttttcaaaattgctaaaagaatagatttttaatgttcttgccacaaagaagttggtgaggtgaggaatatgttaattagcttccttgaatctttctacaatgtaggcatagatcaagacatcacattgtaccccatacatatacacaattattatttttcagttaaaaataaattgataagaagttgatgtttagggagtttaacatgcttgcccaaggccacacggacaacagcactgctgtaacttggtgtcaatggcaggtcgaagacctttatcttctgtcctcaactccagcactccttgggtgaccatcactctacaaactgaattctgtakgtcaagaatatttccctttttgctccataggagaaaattcatgatctgaatcataatatcatccttttttatctttctgatagcctttgtaccagtagcctgaggtccattgtgaaggtgtgaattgaacttacaacttctgatgacaaaattccctgggccacgcacaaggctgtgtttatacttaataatctcatcaggggttgtaaggcctaattaattactgttggtacagcagcctgatatatgaa

SEQ ID NO: 732964 - DNA, 562 bp, Homo sapiens
aaatgtccctttcccctcagataaaggcatgggcagcaagtagaatcccaacactaaaaaagctaggagaggaccttgggaaaagaacccacaagttgctgagcagcaaatgatgtttgttgttatcattaccttgcttgtgtgatactggaaacagacttctgtttattatgttaatgaatcctctgtgattctccattgcttgtgcataattaagatggccttttaaaaaataccttcctctgaagtttgggaaaactaaagtgtttgtttggattggtaataactartaacaaaaaaatatggcaactgcttccaaaggaactgcaggaaatgagctatctgctagcagaaggaggatgctgaggaggacccaatgaccataactctgtaggggtgcaggattagggaggcaattacctattcttctccagtcaaccaactttaagggattcttgtgccacattttaggaaaaaattgataattggaatgggtccaaacaagagtctccagatggcaaaaaggcttgggatacttccacatagggcttggtaagatgga

SEQ ID NO: 732965 - DNA, 614 bp, Homo sapiens
gtggatttccaaatgtttcctgcttgggtctggctggccctttgagctaataaggttcccctctagctggaagagaagcctgaagcctccaagtgatattttaattcaattagtgtcttaccaatttgatgcagcaaccaaggacctatggtgtctgattaatatgctgatgctaagacacaagagtgaacagaatgccyatttggataaggcctggcagcaaagcgtggcattgctatggaaaccacagaaggacattaattagctatcaaataaaatcattggaaaattctggaccctggcacatctgcccccttcaaagagaagggcaagaagaggtcacactaacagcaaagctcccttcagtgattaaaatcaaagttacatgtagtccagagactacatgttgcaaagtggaagaaagatgggggagcaaaacgggtgaacacaataggaatgaggctttgggattattcaagtccaagaatataatttggaatgtggagtatcttgttgggttgtctgtattgataaaatgatccaaatgacaaatatgttatcctatactctgttatgtagaaagaaaatgataataatgatacggatccatccac

SEQ ID NO: 732966 - DNA, 598 bp, Homo sapiens
tttgtggccactggatacatagagtaggtttttcatttgttcatttttccagtgtaaaacattaatttttttgcaagcactttattttttgaaaacaaattgtattgtgtgtatttgaggtttacaacatgctgttatgagatacatatggacagcaaaatggttactatagtgaagcagattaacatagctatcatctcacctagttactttyctgttacaagagcagctaaaatctacctatttaacagcaatccccaatgctgtattaattctgtaaatgtgttcatcctacttatttgttattttgtatcctttgacctacatttctccatttcctctctccctacaagcagagtaaccactatttccattatctatttctctgtctctgtgtatttgagctctttttttcttttccttctgcatttaagtgaaatcatgcaatatttgtatttccgtgtctggattatttcacttacaataatgttttgtagatctatctatgttgtaacaaacagtaggatatcacacttttgaagctgaataatattatatcatatacatatggtcagccttccatatctgtgggttccac

SEQ ID NO: 732967 - DNA, 553 bp, Homo sapiens
aaagaaacgaaaacctatctccatacaaaaacttgtctacaaatatccatggcagcattaattataatagtcaaaaagtggaaacaccccagctgtccgtcaactgatacatgggtcaatgaaatgcgattgggatattactcagcagtgaaaaggaaaaaagtccttatccacactgcagcatggaggaaacttgagaacacaatgctcagagaaagacacaaaggccacaggttgtgtgactgtttccatacagtgtccaatttccactttccatacaaaatccaattttagatatgtccagaataggcaagtctatagcaagtggattcatggttgcttaggggtagggsaatgaggattgtgggggtgaatgctacggggcatgaggtttctttaggggggtgatgaaaatgttctaaaattgtggtgtgtggtgatggttgcacaactctctgaatagactaaaagccactaaaatgtacactttttttttttttcgagagagggtcttgctctgtcacccaggttggagtgcagtggcacgatcaat

SEQ ID NO: 732968 - DNA, 599 bp, Homo sapiens
tgcccagggaggcaccggcaggtatcccagtcaaggtcagggtccggcctacagcgagctctggccaggctgatgtgtccgagtctgtgcctctctgtgccccgtcgctgccatccctgggtcctcctgctctctgagcaccgtgacaaggaccctgatgagtcactctgtgcctcctccaggagggcaggtcagggccgagcctccaccctccgctcttaaagggccagagccggagtcagggctgctgcctgctgctggccagggctgcctctgcctgggctccagcagcagccctcgccacccctcccagccagttgccctggaacacatgtcctaaaacctcctgtggtccctgcaggagccgttctgccctggtgcagctcaggggccagacctcggtgtttcggaagcagatccactgcattctgggaggggaggtgctggcagtggccratgctggttccacccctggtgccaccgttgcccagtctctgcgtccctgccaatgccatctccatctatccctgtgtggagggcctcgcaccttccctggggtctctcttcacctctcgcctctgttgcatcttgggagcctc

SEQ ID NO: 732969 - DNA, 624 bp, Homo sapiens
atccctgagtgccggggtcggctctgaaatgtttgagagggtccccaccaggaatcttgagaaaactccacacacccaagatttccccagggtcttggccagccacggtggctcacgcctgtaatcccaggactttgagaggccgaggtgggcggatcacttgaggtcagtagttcgagaccagtctagtcaacatggtgaaaccctgtctctactaaaaatacaaaaattagccgggtgtggtggcgcgtgcctataatcccagctactcaggaagctgaggcaggagaattgcttgaacctgcttgaacccagaaggtggaggttgcagtgacctgagattgtgccactgcactccagcctgggtgacagagctagaagatagactccatctcaaaaaaaaaaaaaaaaaaaawatatatatatatatatatatatatatatattcccaaggtctcgaaggccccaaagaggcagaagatgtggcttacttccttttggaagattctgagctgagtctggcaggaaagatggcttgagccagggggtagttcttgtatgtttatgcaagagagagagagagagagagagagagagagagaatatatgtggtcattggaacaa

SEQ ID NO: 732970 - DNA, 369 bp, Homo sapiens
actctccttcccccgtactccatatatctcttcatctatatcctttataataaacatgtttccctaggttctgtgaggcactgtaacaaattaaacccaaaaaggaggacttgagatttctgatttataaacagttcgtcaaaaaagacagatcacataacctaaaacttaasattgacacctacttggggtggggggcagtcttgaggaccaagccctcaatttgtgatatctgacactatctccaggtatatggtggctgaggcaggtgaagtgcgaggctgcagtgggccgtgattgcaccattagactatggccagggtgacagcaagacccagtctctaaaaaaaaataaaaattaaaagaaca

SEQ ID NO: 732971 - DNA, 571 bp, Homo sapiens
tatattgagttttaacaagtaactatgaacagtcacctttatgatccaccacccaggacaagaaatagaacagttccagcacctgagaaaccttgtgtctccctcgcagtccttcccaactctagagcaacccgtcatgaaaaatgctaccgtagtcacttcctagcttttctttgtagtttaataggtatatatatgtagccctaaaaatgtatttcagggagatttctttttattggtagaacttatggctgaagtaaaattttcttaggcttgaccaagaagtcatmttctctaagtctgtctgtcttttggtttacattaaacttcatttaaactcatgaaatgtatgaaaaacagaaaactgtctaaatgtagaaaatgtagcctttattattcttctctaaaaccatagttgtaaattttgatgaggaaatattgattggttttcaagtataagatgagcctcctttttaaagagtattttatacctataaagagcaaaataatacgttagcttgaagactagataaccacatcttaggttatctttgaagacttccacaaagac

SEQ ID NO: 732972 - DNA, 598 bp, Homo sapiens
gtcagtactaaagagcatgtctttctgggcccaagtcagtatcacagcctgcttccctaggggcagaggctaggagccctggtgaatgacttaggggtcaataaatcaccccctaacactttggccacacatgcttgtggcttctcttctttagcaatgaaagtacctcaaaatcttggtaagaaaaatctcccaaaaacaaacctgggagtcaaagagaataataaacaaggcaattcctcagagagtggatccagrgtaagaacaaggaattttcttttttttttttaaattttattattattatactttaagttttagggtacatgtgcacaatgtgcaggttagatacatatgtatacatgtgccatgctggtgtgctgcacccattaactcgtcatttagcattaggtatatctcctgaagctatccctcccccctcccccctccccccaccccacaacagtccccagagtgtgatgttccccttcctgtgtccatgtattctcattagaacaaggaattttctacatggtcacaacaaaatctttacaatgtctgacctacagaactccactattgcaatagaccagtgtat

SEQ ID NO: 732973 - DNA, 641 bp, Homo sapiens
gaaaagaggtttaattgattcacagttctgcagtatgtggcatcacaccagcatgttcttggcttctgataaaggcctcaggaaggttacaatcatagtggaaggcaaaagagagcaggcactctacatggtgaggcactctacacgggagccagagagagagagagagaagggggaggtcctagactcttttagacaacyagatcttgcataaactgagcaagaactcactcgtcacccaggggatagtactgagccattcatgagggatctgctcccatgatctaatcatctcccaccaggctccatgtccaacattgggaaccacattccaacataagattaagaggggacaaatatccaaactatatcaatcacctacttttgttctgtagatagttgtgatcactaccggtagttttctgtggctttagaaattccctgccctaaagacaagaaataacaaaaatcagagctgaactgaaggagacacaaaaaatcactcaaaagatcaaagaaataggagtttgctttttgaaagaattaataaaatagactgctagctagactaataaagaagaaaagagagaaaatccaaataaacacagaaacaataagggggatgttaccactgaccccac

SEQ ID NO: 732974 - DNA, 464 bp, Homo sapiens
ctggaaacaagactttaccacctgagaatgaaaacaaacctgttaaagtgactattggactaaggaagagataaaaataaacaaaaccatcaaagcaaaattgctgcataaaagttaattcataagtacaaatatttttctatatgttttaaagaatgcaaacatactaaattttagaaaaagaaagtaagaccaacatggattaaaagaagaattagataacaaaattagttaatagkaaattgtttaaattaccaagtatttaaaaaaatagaataaaagcaaatgtctaataacattattagcaaatatgaaataaaaatatgtgataaatacaattaacaatgcttttagaaatagatgaaatgacaaattcttccaaggatatcaattttttaaaaatgccaactcatttccaaacgatttttttatatagtgctaagctctatttgtaagatttcctt

SEQ ID NO: 732975 - DNA, 595 bp, Homo sapiens
agccttttaaaatatgcttatcagctgcatgtatgtcttcttttgagaactgtctgttaaggccccttgcccactttttaatagggttgttcatgttttacttgtaagtttgtttaagtagttacagatgccagatattagacctttgtcagatgcctaatttgcaaatattttctcccattctatacactgcctgttaaccatgttgacagtttcttttgctgtgcagaagctgttaagtttaattagatcccattcatcaatttttgcttctgttgcaattgtttttggcatcttcatcatgaaatctttgcctgtgcctatgtcctgaatcatgttgcctsggttgtcttccagggtttctatagttttgtattgtgtgtttcagtctcaaatccatcttgagttgatttttgtatacaatgtaagaaagcggtccaattttaatcttctgcacatggttagcctattatctcagcaccatttattgaataaggagtcctttccccattgcttgtttttgtcagctttgtcaaagatcaaatagttgtaggtgtgcagtcttatttctgggctctccattgtgttccattgg

SEQ ID NO: 732976 - DNA, 618 bp, Homo sapiens
caatgtaaaacaacctcactgaattttattattatttataataataataatatttgtatttattacccttcttaaaacctacattctgtctgctgagtgcttatattattgagtagttactgtatacctaatactggtactatggtttggatattgtttgcttrtttcaccaaatctcatgttgaaatttgatccccagtggggagtgttgggaagtcttagtgggaggtgtttgggtcatagaggcagatccctcacaaatggcttggtgcccttttcacagtagtgtgtttgttcttgctctcacaagactggattggctctagggactagattagtttgcccaagagtagattgatataaggccaggttgtcccttggatttggtccctctttgccagggcccactttccctttgaccttctccatcatttttagatgcagcatgaaaagccctcaccagaagctaagcagacgctggtgtcatgcttcttgtacagcctgcagaaccatgggctaagtaaacctctcttttttaaattacccagcttcagatattcccttatggaaacacaaaatggactaagacactatgctaaatgcttgcatgtattagtt

SEQ ID NO: 732977 - DNA, 622 bp, Homo sapiens
tatatatatatatatatatatatataaataaagtattcaatcaagaaactgctgtattaatttagggaaatgattgattgatagtctcataagtcaaattttcatcacataattttaagctccattcttttccatatacagaaaactacccgtggggaagaaactggtgaaatgggatccctcctctaccaaattctgccttctagagctagatagatagatagggaattttgcttctctccaaatttcaagtttggttaagttcttggaactcaaagtgtgaaaattttatgaagtaaaattatttaactctgtgtatattaggttaaataaaaataaaacttaaaaagacaagcttagggtgctgcattggcttgttgcatctaccttctaaactttaccctgaaggctgctggaaaaaaagtaagttatgctgagtccaagtttcctgagtagcagaaaagtattgataaattttatytgttgcactttttaacaaaacaaaaagcatctgccaaccacagaacattgcaacacctaggccctgggctttcccccagcattcattcactagcacctcatgttttgggggcacaagcacagggctttcttaggctgtaaa

SEQ ID NO: 732978 - DNA, 609 bp, Homo sapiens
catttcttgacaggattctattttgaaagaatgatgctcaatctgtaccttttatgcttcttgtttcttctccatcaataatatgtcagtcaactgcttgtcagagacacttagctgctgacaggtcctcataacctgactcaggtaaactgccaagagatgcttgcactggaatataaaacacacacacctattagaaacaggcagggccagggctggccagtctaaccaagatttctcattaccatcttatttggcaggagaagactagagcatacagattacggggtctctaactgattgtctaaaaagtgcagatgggccgggcatggtggctcacacctgtcatcccagcactttgggaggctgaggcggatggatcacttgagatcaggagttcgagaccagtctggctgatrtggcaaaaccctgtctccactaaaaatacaaaaattagctgggtgtggcggtacatgcctgtaattccagctactcaggaggctgagccatgagaatcgcttgaacccaggaggtggaggttgcagtgagccgagatcacgccactgcactacagcctgggtgacagagccagactgtctcaaaaaataa

SEQ ID NO: 732979 - DNA, 575 bp, Homo sapiens
accaaaaggaaaacagttctactaacaaagaaaaagaaaggatgttgaaaagacataaacagcagatgccaactatatccggtgagaatcttcccagatacatctaaaactacacaactgtttcctttttggcttgttttaggaatacgggttggagagataatttcgtatctgcagttggcgagcctgagtctttgagatatcaaagtgacacaattagagtttcaggatgaattctcgatcggcattgtaatccagagaacrtaagatttagactcttctctaagactttggaacttattgtctagcaggctgaggtaataggcagcactactccatttggaagatgcatcttattttcttgagactcggggaaatcttgattttgaggcttgaaatgtttcccagaccctgtgtcaaaccagtgacaggattgtgtgtttccgagtgtaaactattagctggtggacccaggtatttcctaatgaggccgatttaaatagaatacttcttgggatgagaaaatggatccgtctcttcaatggtagtttttttctataatgctggattttggc

SEQ ID NO: 732980 - DNA, 638 bp, Homo sapiens
catcaatctcaatatagttacatcacaacttttggttaatcaaatctgtggttatatttctaagactgtgaaaatattgcttattactgaatcaagtagtgtagtataattatgtcctattcttgagaaagtgtttcatttttttcctttgctaagttttcaatgtttccaaggcgttttctccgtccccaacccatgcgcagtacttctatatatctgtccattttaaattaatatttctctcaactatatcaaataattgatcagctccctgcrcagagaccttcatattgatgttggcctcttcctgtcctcctcttctctggtttctttctaggactggtactgacattttctatcactggctcctctgtttctaagttgatgtttttattttgctaaaacatatccaccagtagcttcctaaaaaaggatgcataaggggtaaattttttgagtcattgtatgtgaactctctttagtctgtcctcatactcaattgagagtttgtctagatttagaatgtcagtttgaaattaattttgcctcagaattgagatatagctccattgctttctagcattcataattgctattgagatgtctgatgtaattctttgcatctttgtattctttgt

SEQ ID NO: 732981 - DNA, 592 bp, Homo sapiens
gatttccttgaggatggcagagctggacatgttcaggaaacctcagaaaaagagctgtatgtcactaagtcaggaagagggcccagaggtcagggtttctcatctggggccatcaataccggcctccttctagctctgtcagacacttggccccttctgggtactctggcagagtttggtaccattctctcacactgaagagagaccctcataggtagaggcattgcaagctgcaggctgtggctcacattgcaatgtagctgtatcagccatgatttttagttacaggcatcagccaactctggctgactgaagccgaagagagtttgatgcaaagaacactgggtggctggagaatcagtaggaatgctgacagtaaggctggagaataagcagcctggagcagcaccgagaatcacayggtggaaggagtctggagaaacttctactgcttcagccattgaatgttgggcactatcattggcatcacagtcacctctgtgcacaaacttgaacctgcagtagggagagagagaactccacccttcctgtgtctagctccagagtcaaaacccagggtggcacatggtgg

SEQ ID NO: 732982 - DNA, 601 bp, Homo sapiens
tgtgtacagcctgtgcctggctgcaaaggctgctgggaaagccagttgctgcatttttggcatctacagtgggaagcagccactgaagacaatgaagactcatgaagtgggaacttctcaatgaaaaaggagttcaaatattgggtggccaaataaaatgataaatattcactatcattgccttagttgagaatcgagaagctgggggcagtgtgagggtactgatggcaacattctctaacaggtattgagtgattattctctgggctaactattctaaatgcagtatctcatttaatccttccgacaaatctcccaggcaattactaayattgtacctattttccaaaggagacaactggattgtagacatgactgtggcacatacctagtaggtgtctgagctgaggttctggcgtaggcagtctgtcttctgagactgtgctcacattttcatgattgagggctggtgaggaactctaggggtatttctttaagttaaagcattaaaaccagctgtccctagtgctcatcattccaattatgccacattaactccagtcttttaaaaatcccgtctcaaggtacttctaggagtctc

SEQ ID NO: 732983 - DNA, 478 bp, Homo sapiens
gcctcggcctcccagagagtgctgggattacaggcatgagccaccatgcccagcctataattgtatttctaaagagctaagtaggaagtgggaaaaaggaggaaaagaagagagagaaaacaaagaatttaaaaataattaaataattgaggccaggtgcagtagctcacgcctgtgatcccagmaccttgggagactgaggtgggcagatcacttgaggtcaagagtttgagaccagcctggccaacatgatgaaaccccgtctctactaaaaatacaaaaattagcctggtgtggtggcatacgcctgtaatcccagctactcgggaggctgaggcatgagaattgcttgaacccagggagggggcagaggttgcagtgagctgagattgtgccactgcactccagcctggatgacagagagagactctgtctcaaagaataataataataataataatttaattaaagtggaggt

SEQ ID NO: 732984 - DNA, 498 bp, Homo sapiens
attatttcttcacattttttttttggacttcttcctgccctcttagggattccaattacatgtatattaggctccttaaatatgtgccacagctcactgatgctctgtttatttttactttttaaaaatatattttattttatttatttattttttgagacagagtctaactctgtcatytagactggagtgcagtggcatgattttggctcactgcaacctctgcctcctgagttcaaggtattctcctgtctcagccccgccgagtagctgggattacaggcactcgcccagctacatttttgtatttttggtagagactgggtttcaccatattggcaaggctggtctcgaactcctgacctcaggtgatccgcccacctcggcctcccagactgctggtattacaggcatgagccactgcacctggcctgtttttactttttttctgtttcacatttcatagattctattgctatgtctttgagttcattaatc

SEQ ID NO: 732985 - DNA, 523 bp, Homo sapiens
gcaggggctccagtgaagcccagcactgctgcagggggtgggctgcctgcctgctctgagctctctcttgcacgctctctcttctctcccaggctctggctcatgcacatgcaacaggtgcgtctgtctatatgtctgggttcttgtcttttgtggtctgtttgtcttttctacctctttctcttgcagtgatagactgagggggtaaaatcaagagaaaaaactctcaggaatcaaggaacataatcctgtggagggtaatccattacatgagcttctcctgttcttccactttcctgcctggctttcactccttcccctgctctgcccagcctttccctcccacccactcctccttctgcaaatgccctgaaggccarcccttaccccaacacccacttccccacctccttaggccccagatacatacatgcccacatgcacgcttacatgtttagagccatccttgtttccaaatatgacccttcgcttgagggcaactgcataggtacatctaactctg

SEQ ID NO: 732986 - DNA, 545 bp, Homo sapiens
attctgttccattaatctatgtgtatatatttccatcaatttcatactacctttcttattgtagctatatagtaagccttaagtagattgattctccctcttgtattctactgtctcaagactattttagctattctagtgctgtgacttttcatataaattttactataaacttgtcttcatctacaaaaaaacactgctagaattttaatacaaaatgcattaatcctattgatcactgttggggcaattgcatctttactgtattgatttgtccaattcacgaatgttgtaggtctccctatatatttagatcttccttgacattttttatcagcagtttttaatgttcagtacgtagatcctgtatatcttgttaagtttatattrgtatttcattttctttggagagattttaaatggttttatgtctataattgcagtttccacatgcctatttttagtatataaatatgtgattgatttttgggtgttagtcttctatcctgcaatcttgctcaatcagtcctgggaaatgttctaca

SEQ ID NO: 732987 - DNA, 649 bp, Homo sapiens
ccacaccctactaatttttgtattattagtggagatagggttttgccatgttggccaggctggtctcgaactcctgaccccaggtgatccacccgcctcgacctcccaaaattctgagattacaggcgtgagccaccacgacctgcctggagatttctttttcaggaaattgttaattgtcaattcaactcatttaatggttataggactataagtttaatattttatgtttgtgtgtatgtgtatgtgtgtgtgtgttgtttgtttgttttgagacagagtttcgatctgtcacccaggctggagtgcagtgatgcaatctcagrtcactgcaatctccacctcccgagttcaagtgattctcatgcctcggcctcctgaatagctgggattataggtgcacaccagcatgcccagctgattttcatatttttagtagagacggggtttcatcatgttgcccaggctagccttgaactcctgacctcaggtgatccacccacctcggcctcccaaaggactgggattacaggagtgagtcacctcacccggccttgtgtgtgtgattttttaggaaataatcaagagaaaatatatcataatataaatttttataattgattcagaatgatgtaaaaaacatgaaata

SEQ ID NO: 732988 - DNA, 527 bp, Homo sapiens
ttcctttatcctttgaatttttcattcttgatttttaaatgcatacttcattgagcagaatagtttctaatactagtcttgagaatcatatttagggggtatattttctgaacatttacataattttcttgtaccttttacttraatagctctgtacatatttctttcagcttctgtctttcaaaattctgtagataccacttcataaatttatgacttttaatcattctgaatgtgattcctctgtaggcattttgtatttactaactgaatgcttgaaagattaatttttttctttttccttaaaattcaaaaatgtatctaggtcatagattggcattgtcaccattgtgttaattttttgtagtgagtttttaaatattctcatgaaagcttttcatcagccctgaaaaaaataagtgtttttgagtgcatttttgaatgatacttctcatccaattgtcctagtgatgtatcgttacatttcctcttatttattcactgtttttatttacattctagaggag

SEQ ID NO: 732989 - DNA, 631 bp, Homo sapiens
taaaatgcacatcttatcacatcattctctcaaagtctttcaaggatttcttatatttcaacatgaaggtctaactatttagcttatataaagaaagctgcagaaactaggcatgactgttcattgccctttctagggaagttttttacagtccagtcattccaaaattattacattttcctgaatatatccaatctattccgctgtagatttttaaatactgtatattaccctcttgtcctcctyctacagaatcacttggctcaccccttcttgacattctctaagaggctcagacattacctccttctggaagcctcccccaatatctcccatctggatctgggcccatgactttgcagatgttgcaccttgagagcccattcagcataaagctttgcagcaggcattgttggtgactatttccctttttccctccagctacctcgaattaaatctgaactttttcaggggaagggctgtgctttcatctctactttttctgaaatatacttgataaatggctgttgtggaagacataaatacacgatgactagataagagcattggactctattattccattcattcatgaatacatagttattcaaaatcattttgcctactagaa

SEQ ID NO: 732990 - DNA, 621 bp, Homo sapiens
ttagaacatgctcctttagctcagagaagtttgttattaccgaccttctgaagcctacttctgtcaactcatcaaactcgttctccatccagttttgttcccttgctggcgaggagctgtgatcctttggaggagaagaggtgtgctgktttttggaattttcagcttttctgctctggtttctccccatctttgttgttttatctacctttggtctttgacgttggtaacctacagatggggttttggtgtggatgtgctttttgttgatgttgatgctatttctttctgtttgttagttttcattctaacagtcaggcccctcagctgcaggtctgttggagttttctggaggtccactccagaccttatttgcctgggtgtcactagcagaggctgcagaacagtaaatattgctgcctgatccttcctctggaagctttgtcccagaggggccccctgtctctatgaggtgtctgttgcccctattgggaggtatctcccagtcaggctacacgggggtcagggacccacttgaggaggcagtctgtccattctcaaagcttgaacgctgtgccgggagaactactgctctcttcagagctgtcagaccggaatgtt

SEQ ID NO: 732991 - DNA, 302 bp, Homo sapiens
acatgagatttggacagggacaaatatccaagctatatcacattgataaccaaaaaaaaaaagcaaacgagaaacagaaagaagcttccttaacctgataaaaggccatctatgaaaaaccaataggtaatatcacacttaatagtgacagacyaaatgtatctatccttaagttcaggaacaagacaagaatgcacactctcatcacttctattaaacatcgtagcagaggtcctagccagggtaattggcaagaaaaataaataaaaggcatacagttggaaagaaaaaaaataaaacta

SEQ ID NO: 732992 - DNA, 496 bp, Homo sapiens
gacatctcacactataaacagatcatgtgctttttaacaactttcaattaatttacctatttctacaactgcaacacagtccctgccctcatgggcacacacggaaagtcaaacagacctacagggtaaattgtgtgatactgcaccaaataggtagcttacataggacatatcagatgagcaggtaagagggtttactgcaataatatagggaagaaacatgagttctagtccaagctctgatactgactagacttatttggtgaatttaatgaatgcctctaaatctcagcagccagatctgtaaagctgagagaggggaggaagasagaggctaactgacccttagggattctttagccatagtatttcatgattctagcttattaaggtggtcacagtggaaacaaaaatgcccaagtagaagcaaaagatgatgtgaaggcagagtaactggaaatgtgtggtgtaagagaaataaatattgatcaccaca

SEQ ID NO: 732993 - DNA, 496 bp, Homo sapiens
gacatctcacactataaacagatcatgtgctttttaacaactttcaattaatttacctatttctacaactgcaacacagtccctgccctcatgggcacacacggaaagtcaaacagacctacagggtaaattgtgtgatactgcaccaaataggtagcttacataggacatatcagatgagcaggtaagagggtttactgcaataatatagggaagaaacatgagttctagtccaagctctgatactgactagacttatttggtgaatttaatgaatgcctctaaatctcagcagccagatctgtaaagctgagagaggggaggaagacakaggctaactgacccttagggattctttagccatagtatttcatgattctagcttattaaggtggtcacagtggaaacaaaaatgcccaagtagaagcaaaagatgatgtgaaggcagagtaactggaaatgtgtggtgtaagagaaataaatattgatcaccaca

SEQ ID NO: 732994 - DNA, 554 bp, Homo sapiens
ttaaagctactgagattcaaggggtggtgacatagatcccacttctcaatgagaaaatatcaaataatttgaggccatttttaatccactgtaccagctaagatgatctcctgggaggcaaaacatttatttcctatwagcatatatactccctcctaaatatctttattatttatataatacttatagtgaaaataattaatttttactgtactgccaatacagaatatgaaatattggcatattcattcttaaagaccataaattattttcattcttaacacttcaaaaataatatgcaattttagctacattaacttcaattacattgaataactgttaaacccacatgaaagcttcaagatgaaataaaactgaaagatgtacttgcaaattccagaccacctagtttgcagctgtgctaggtgttaaaaacatctctcctgttctgacacccagcatacaccagcaaccttcttgaaggattttgaactttagagatacaccacacactgaatctgggaaatctcaccaacctgcaaatttttctattt

SEQ ID NO: 732995 - DNA, 554 bp, Homo sapiens
ttaaagctactgagattcaaggggtggtgacatagatcccacttctcaatgagaaaatatcaaataatttgaggccatttttaatccactgtaccagctaagatgatctcctgggaggcaaaacatttatttcctattagcatatatactccctcctaaatatctttattatttatataatacttatagtgaaaataattaatttttactgtactgccaatacagaatatgaaatattggcataytcattcttaaagaccataaattattttcattcttaacacttcaaaaataatatgcaattttagctacattaacttcaattacattgaataactgttaaacccacatgaaagcttcaagatgaaataaaactgaaagatgtacttgcaaattccagaccacctagtttgcagctgtgctaggtgttaaaaacatctctcctgttctgacacccagcatacaccagcaaccttcttgaaggattttgaactttagagatacaccacacactgaatctgggaaatctcaccaacctgcaaatttttctattt

SEQ ID NO: 732996 - DNA, 611 bp, Homo sapiens
aacctataattcaatagctttcacagttgctaagtcagagatgcagacattcatgatggttcaatgagaggatctgatactgtttatgccaaatcagcataatttctgttctgctatacttattttgcaccagggcattgtttgaattttgctgtttaaatggcaaacataaaggtcttacttcaagatttgtctgtaggaaattctatarggaaaagatttagacagagacagcttcacagagaacaagactcctgggaagcaatttaatttggtcaacagacagttactgtaaaaccttgttagctgatggaatggttcacagtgctgccagtcaaaagtcaaaggtattccctcaatgtcaaaagatttcatgaagactgggttagtgagaatactgcagagcttgaaacccaaagaaaactcttcagtcatgggcacagaggaatatatgtatatgcttcaaagttaatcagctatctacaaacaactacaattactttctcaaaagaggaaattagagaggaatatgatcctaaaccaggtattaacttctaattctttttaatatatgtctctcttgctctcaacaaataatcaagactgtttac

SEQ ID NO: 732997 - DNA, 611 bp, Homo sapiens
aacctataattcaatagctttcacagttgctaagtcagagatgcagacattcatgatggttcaatgagaggatctgatactgtttatgccaaatcagcataatttctgttctgctatacttattttgcaccagggcattgtttgaattttgctgtttaaatggcaaacataaaggtcttacttcaagatttgtctgtaggaaattctatagggaaaagatttagacagagacagcttcacagagaacaagactcctgggaagcaatttaatttggtcaacagacagttactgtaaaaccttgttagctgatggaatggttcacagtgctgccagtcaaaagtcaaaggtattccctcaatgtcaaaagatttcatgaagactgggttagtsagaatactgcagagcttgaaacccaaagaaaactcttcagtcatgggcacagaggaatatatgtatatgcttcaaagttaatcagctatctacaaacaactacaattactttctcaaaagaggaaattagagaggaatatgatcctaaaccaggtattaacttctaattctttttaatatatgtctctcttgctctcaacaaataatcaagactgtttac

SEQ ID NO: 732998 - DNA, 611 bp, Homo sapiens
aacctataattcaatagctttcacagttgctaagtcagagatgcagacattcatgatggttcaatgagaggatctgatactgtttatgccaaatcagcataatttctgttctgctatacttattttgcaccagggcattgtttgaattttgctgtttaaatggcaaacataaaggtcttacttcaagatttgtctgtaggaaattctatagggaaaagatttagacagagacagcttcacagagaacaagactcctgggaagcaatttaatttggtcaacagacagttactgtaaaaccttgttagctgatggaatggttcacagtgctgccagtcaaaagtcaaaggtattccctcaatgtcaaaagatttcatgaagactgggttagtgagaatactgcagagcttgaaacccaaagaaaactcttsagtcatgggcacagaggaatatatgtatatgcttcaaagttaatcagctatctacaaacaactacaattactttctcaaaagaggaaattagagaggaatatgatcctaaaccaggtattaacttctaattctttttaatatatgtctctcttgctctcaacaaataatcaagactgtttac

SEQ ID NO: 732999 - DNA, 638 bp, Homo sapiens
ctgccagtgcatatgacatgatgaaaggacggggggctgtggtgtccagcaactcttagcatgaatcctgattccatcacatggtgactcagccttgggaaagaccatcctttgtttgttggttcattcatctatccatctgtctgtcctccctgcctcccttcctgtctcccrttcacaagcattcactgtacagcatgctagatttgggggatctgggcagcattttcccatccataaaatatagatattgcagcatattaaggagcattgttaggaggattcaatttgctaataatgcatgtgaagggacccagtacaacaacagcaacagcctggcacgtgataagatgctcagtaaatggtgctgtgtggtcagtcagcaagtctcatcgttcttgtgtaatttccctggcctctgttacttccatttcttagcagcctgcatgatgatggccaattactttcatacctagactatgcaagaggcttctaatgaggcattataggcctcaatctattctattaaattcttcctattaccaccatttgcacttctaaagcattgtttttgtctgtgttactctttgttcagaacctttcagtgatttcctaggctattctgaatttcttactgg

SEQ ID NO: 733000 - DNA, 638 bp, Homo sapiens
ctgccagtgcatatgacatgatgaaaggacggggggctgtggtgtccagcaactcttagcatgaatcctgattccatcacatggtgactcagccttgggaaagaccatcctttgtttgttggttcattcatctatccatctgtctgtcctccctgcctcccttcctgtctcccgttcacaagcattcactgtacagcatgctagatktgggggatctgggcagcattttcccatccataaaatatagatattgcagcatattaaggagcattgttaggaggattcaatttgctaataatgcatgtgaagggacccagtacaacaacagcaacagcctggcacgtgataagatgctcagtaaatggtgctgtgtggtcagtcagcaagtctcatcgttcttgtgtaatttccctggcctctgttacttccatttcttagcagcctgcatgatgatggccaattactttcatacctagactatgcaagaggcttctaatgaggcattataggcctcaatctattctattaaattcttcctattaccaccatttgcacttctaaagcattgtttttgtctgtgttactctttgttcagaacctttcagtgatttcctaggctattctgaatttcttactgg

SEQ ID NO: 733001 - DNA, 557 bp, Homo sapiens
gtgagctgagaccgcgccactgcactccagcctcgtgacagagcaagactctgtctcaaaaacaaacaaacaaacaaacaaacaaacaaaaaaaagccacaaagtatccaatttaaagaaaataccgcttggtttagcttgaaaagccaaactttattcatagtttacttcttgcctagggataagagaaaaataaatgcttcagaatggcttgtaatctttgattttacatagaacagaaagaaaaaaatgcaatggcttttgttcctaggtctcatataaatgtccgacttgttaacaacaatccataaatacaaattaataggcaggcatggtgttcaactattcctatcaaagcctacacacacacacacacacacacacacacacacacacacasacacacaaagttaagataagtttaatactgttgtagaattaacagtgaaaaaatggaggcattttctaaactataggattaatatatagaagaatatcatcatggaagaaagtaaaataaataaaatttttaaatagtttcactattttgaataatg

SEQ ID NO: 733002 - DNA, 608 bp, Homo sapiens
cctagattaaaatcaaaagtcactttaccaactatgaaattataggaggattcgaaatcacaaaagcatacatttttttgtgtgtctgaatttgtctttttacatgtgttaatgtgtagaatcaaggggaatgaatgttaaaaaattcctgttctctcttttagtccattgtccctgccagtcaggtgctgtagaactgtttcttataacaccagagcaaatgtgtttattatttattttttttcctgacttctmtccttctttagtaagcctacacactgctgctgccacaatgtagtacccagacttacttgctcttgaagatgtgtgttccactgctgacatcctgctcctctggctgaatcccttctgcaatggtagtcacagatgctctgtcaaaagtggaattgtaaaactactataaatggatattaagtggactctaaatgattatcagtgttttttctctaaatgtttcccttcgtttttagggtttactgtttttcttgaaaatctggatatgcttaaatgaggattaactcattacacctgtaggtcaccttcactgactctggccttgtgttttgagcattttgtcttaatctcaa

SEQ ID NO: 733003 - DNA, 554 bp, Homo sapiens
tattaaatcataactgtataaaattcactgtaggccatgctgtgctacagtaataatttcatggccacctcctgctgctattgtggtgagttcaagtgttgcaagtgcctgcttaaaaggccttgcgatgttaatcacatctgcatgaccaattcttctccccagtaaatgcgtattgctgtaaaaattgatattttgtgattcttgtgtatttttaatcattttcagtgcaacaccatagaccttgaataacrtcatgggacccacatgaagtgccactagtgatgctggaagtgctcccaagatatagagaaaattcatgacttacaagaaatagttgaattgcttgacctgtatcatggattaagatctgcatctgtggttacccacaatttcaagataaataagtgcagtgtaaggactatcataaaaaaagaaaagaattttgtaaagccatcactgcagctatgccatcaggcatgaaaaccttgcactttttgtaaaactcctttttatctcatagtgaaaatgcagcttttatgtgggtgaaggat

SEQ ID NO: 733004 - DNA, 473 bp, Homo sapiens
tattttatgacaatttaaagcaaaaggaaggtgaagggtctaaagctggataatttaatgccagcaaaggaatctttgataattttagaaagagatttggcttaaaaaataacaagataatagaaggagattctgctgaccaagagacatcaggcaaattcccagtcaccattaagaaaatcattgaagagaaaaaaacagccamctgaacaggtttttaatgcagataaaagtgtcctattctggaacaacaacaacaaaaaagccttaaatgacatttattagaaaggaagagaaatggatttaaggcaggaaagaagaggcaaactctactgttttgtacaaatgcaattgggtttatgaccagggctgctcttatctctgatgctgctaacccccaagccttgcaggaaaaaataaacaccaccatccagtcttttggttgtaaaagaaagcctagacaatgagaacct

SEQ ID NO: 733005 - DNA, 582 bp, Homo sapiens
tgctatctcagctcactgcaacctccacctctcgggttcaagcgattctccagcctcagcctcccgagtagctgggattacaggtgcatgccaccacacccagctaattttttttgtatttttagtagaaacaggattttgagatgttgcccaggctattctcaaactcctgagctcaggaaatcctccaccttggcctcccaaattgctgggattacaggtgtgagccaccattcccggccatgatatcttacttaatccatacaatactctgtgatgcagmaataccaataatacaatacaggtaacaaaacatactcagagtagtcaagtgacacggccaaggtcatacagttaataagtagcaaagtcacggtttcaaccaagtatatctgactccaaagtctgccatgtttaacaatatcctgctctaagtaagagacagaacaatccattactcaacccttggtgctatggtttgaacgtgtcctccaaaattcaggtgttgaaatttaaaggccagtatgacagtagaaagaggtagaacccttaagcggtagttaagccatataaaggctcctc

SEQ ID NO: 733006 - DNA, 646 bp, Homo sapiens
tctgctatgaatcaatgtcttttcacatctttgctcactttgtaattgtgcagtttgtacttttgtttctcacctgtaagaattcctcatatattcagaatactcgacccttatcagatatatgcttgccaaatattccccacccatttgtatgttatctttccgttttttgaagtatacaatttgttattaactatattcatcataaagtgtaaatagatctcttaaaatcacttcccctgtctcactgaaactttgtgtcttttgactatgatctacccaatcccctcacttcacagcctctggtaacctcaatttactctgtttttatgagtttgacktgttttcatctacctgcatgtgagttcatgcagtatttgtcaagccgtgcgtggtttatttcacttaccagaaagtcctgcaggttcatccatgtggtagtaagtgacaggtttttccttctttgtaaaggctaaatagtattccattgtgcagatagaatacatttctttatatttctgatgatgagtccttaggttgattccatttcttggctatggtgatgaatgctgccatgaaaacagaaatgcagatatctctcaacatactgctttcatataaactcagtagtgggattgctggatcc

SEQ ID NO: 733007 - DNA, 551 bp, Homo sapiens
ttaaacagattgtaccctatgcctgagccaattacctgtttttgagccatcaaagctggccagcctttcaaaccgtattcaaattcgtcgaacgccgagaggtaacccatccagctgtttgtgtacttcacttccattcttttgtacgtcacttttctttttctgtccataaattttcttcccctaaatggctgtactggagcctctctgaacctattctggttgggggttacccgatttgcgaatcggtatttgctcaattaaactctattaaatttgacccggcgtggkggctcatgcctgtaatcccagcgctttgggaggccaaggcgggtggatcacttgaggtcaggagttcaagaccagcctggccaacatggtgaatccccgtctctactaaaaatacaaaaaaaaaaaaattagccggatgtggtggtgggcacctgtaatcccagctactcaggaggctgaggcaggggaatcgcttgaactcaggaggtggagtttgcagtgagccgagatgacagacaccactgcactccagcctgggg

SEQ ID NO: 733008 - DNA, 549 bp, Homo sapiens
aggctgcaaactacagaaacacaatctttgttgtaaaatgaaggtgtgttccagggaacagagggaaggctccggttttaaagcaaaagtttctgcccaggttccctatcacctatgttgctatcacctatgttgatgccaagaaagagtgaaacttacttagttcttattggttaacacagctcagtcctgattggttgatacagctgagcgctgattggccagggaaggtgaactctgattggttgcttcaggtgagctctgattggttggtttccaagccccaaaattaaaaggtgtgarttttgaggggacttagagtacctgtatgacctctagacagcaaatggctggtaggttctattttaaatttaagcccaagtaaccatacaggatccatcccaaaagactggctctttcaaattcacatttgttcacaacatgaatgcatctcaaaagcattatgctaagtgcacaaagtcagacacaaaaaactatctcttatataattccatatgtgtgacgttctagattacaaataactatagt

SEQ ID NO: 733009 - DNA, 549 bp, Homo sapiens
aggctgcaaactacagaaacacaatctttgttgtaaaatgaaggtgtgttccagggaacagagggaaggctccggttttaaagcaaaagtttctgcccaggttccctatcacctatgttgctatcacctatgttgatgccaagaaagagtgaaacttacttagttcttattggttaacacagctcagtcctgattggttgatacagctgagcgctgattggccagggaaggtgaactctgattggttgcttcaggtgagctctgattggttggtttccaagccccaaaattaaaaggtgtgagttttgaggggacttagagtacmtgtatgacctctagacagcaaatggctggtaggttctattttaaatttaagcccaagtaaccatacaggatccatcccaaaagactggctctttcaaattcacatttgttcacaacatgaatgcatctcaaaagcattatgctaagtgcacaaagtcagacacaaaaaactatctcttatataattccatatgtgtgacgttctagattacaaataactatagt

SEQ ID NO: 733010 - DNA, 549 bp, Homo sapiens
aggctgcaaactacagaaacacaatctttgttgtaaaatgaaggtgtgttccagggaacagagggaaggctccggttttaaagcaaaagtttctgcccaggttccctatcacctatgttgctatcacctatgttgatgccaagaaagagtgaaacttacttagttcttattggttaacacagctcagtcctgattggttgatacagctgagcgctgattggccagggaaggtgaactctgattggttgcttcaggtgagctctgattggttggtttccaagccccaaaattaaaaggtgtgagttttgaggggacttagagtacctgtatgacctctagacagcaaatggckggtaggttctattttaaatttaagcccaagtaaccatacaggatccatcccaaaagactggctctttcaaattcacatttgttcacaacatgaatgcatctcaaaagcattatgctaagtgcacaaagtcagacacaaaaaactatctcttatataattccatatgtgtgacgttctagattacaaataactatagt

SEQ ID NO: 733011 - DNA, 470 bp, Homo sapiens
atagaatttaattttaaatttaatttaaaagtttaaatatgcgtttaacctgatctgctttatgtatttaagaaaatgaaatatccatactatgcagttcaatttaataacatagtacaaaagataagtttggtatagatggtaaattgtagatgcttttactattactgcctggttttttatttacaagcatgtaacaatttttgtaataaataattgttgtaaggagatctttattkaaaatcctcagaagttttcaaatatgtactcaaagataaattcatataggaaaacgaactatatgaaagcagaaaaggaaaagttaattagataattaaaattgccacagaaaggtatatatttgaataataataaaagaacatttctcaattatctactataaaccaggcactttgctagcatttcaggcacaccattccaataatcttcaaaagaaatttgcaaaggag

SEQ ID NO: 733012 - DNA, 608 bp, Homo sapiens
agtcatccttcaaaacccctttctagtgatctccctgcgctttaggaaattgtctcaaaactaaggttgagctttggcgaccttccctgggctcccccgtccctgactgcccccagcagggagtgtatgtgcactatccaccccagcctcctagggtgaggcctgggaggcaaggctcagttctttctgggtccccgcccccatgaatctgggcagctggaggcattgataagtgaggacaggacctagggaacgcatgggagaaccgcaggattgggtccctggagacttaccaaactgggaggtgcgggtggggtaacgggtgccttscttccctggcactgccttattttctgtccctcaagacctgccgtctccttgttgttttagactctggctaaagtcttggaggctactgccttgaagatgacctctagggaccagcccagacccaagggccccccgaaaagcacttcggtgaggagggcatgtggtgggatcagccctcaagggaaacccgggcccaatgtggttctgccccttttccacctgtgacctgggctggccccgcccaggcctcgcagctgaagacaatactggtcgctgct

SEQ ID NO: 733013 - DNA, 539 bp, Homo sapiens
ttttttttttgaggtagggtctcggttacccaggctggagtacagtggtgcagacttggctcactacaacctccacttcccaggctctaggaatcctcctacctcagcctcctgagtagctgggactacaggcatgcgcaaccactcccggccaattttggtattttttgtagagataggatctcactgtgtcacccagggtagtctcgaactcctgggctcaaacaatccacccacctcggcctcccaaagtgctgggattacaggcgtcagccactgcacccagcctatattaatgtaactatacataacattatattaatataataaaatatgtattgaatcctgtgaggcacatgggaagagtstggctgagaaaagtgaaaccagtgcaacaaaaatataaaaatatatccttagtctccaggagcttagagttataaggcagatccacactatttcctgtatgttttatagcaaggagtaacagataaatcctatgagtttagaagtaacaagaaggattcagatgggcagaa

SEQ ID NO: 733014 - DNA, 620 bp, Homo sapiens
tgctttccacttaatcctgggtttccgttcccttgccatcatgttcattcaaacctttccagcttgaagattgctcctctttgtttattatgatgtactttttatactgaatagaaagataaggcttatttaccggtaacatcagtgatggttgataaataagggtttgtgctataattaaatgcarcgtttaaattacataatccaagtgaagtggagaactaatataaacatgcaaatgaagttagtcaagaacatttttaattgatctaaatgaagtggttttgcatcttaaattatttggaaactctaggtgcctcattttgcccctttacagcccagcagttttcttggcatttctctggcaaagaaaagacactgtgggaaaacccttagacaattagcatttgactctctcttggctaattaaagaaagtcagagtcaaaaaagcaatggaagcttttgagctcctaataaattttaaatctttctgcaagactcttctctatcactctttttcaggaagacagagatggttcactgtgacaccagtgaagcttaaacttcaaggtccctccccgggacaggctccttccagtgccctggagcatggttcagg

SEQ ID NO: 733015 - DNA, 570 bp, Homo sapiens
tattatccaggtgcagtggctcgcacttgaaattccagcactttgggacaccgaggcagatggatcacttgagcccaggagctcaagaacagcctgggcaacatggcaaaaccccatctctacaagacagacaaacaaacaaaaccaaaattggtcgggcatggtgacgtgctcctgtagtctcccagctactcagaggctgaggtaggaggattgcttgagcccaggagattgaggctrcagtgagccatgatagcaccaccgcactctagcctgggcgacagagcaacaccttgtctcaacaacaacaacaaacaaacaaacgaaaaccagctggcatatgagtgttttttcctttagtctaattaggcccccacctccatctctagaatactaattgcagccaggagaaccacatacattaattggctgggaataatcaggttcatctccttctagggctagaaatggagtggatatgtgaacagcaattaggattttgttagaaaggagagggggaaatgaaggggaaaatcaagttttggggaaactgtggttcatggtctttat

SEQ ID NO: 733016 - DNA, 664 bp, Homo sapiens
cctgaggtattttttttagcatatgtcccgaagttgacattggtaaatcctccaatgaacccccaccatttctgtgacacttccagacacctcatctgtcttttgcaaagcaagcaggcagcaaataaaagctacccaactattgcaaaatgcaaattttttatctgtgggatctgggaattatcagtcaacacttatctgggaattattgattaagcacttatctacactgtcctcagcactgtgtggacagtcccaaatgtcccccgcccccataaaatgagaaaacacaattcttgttctggcaaaaattataatctaataacggcactgtcacgagaagacaatgaacactaaaagaagacagagcaagtgccaaaagaaagtatgggtcatgaggcactttttgagcccagaggaggaggagaacgtgtctgctctggatgggctgtgccagccagccggggaaggaatcagtaagggtaaagataagraaatcttgggcattgtttaatacaacatgctaaatgctttatctaagatggagggatttgggagaggctagtgggaggtaaggctacaacaggattcagggcaatttggaaataggacttagattaaaaagaataaaatcaagatttatcctaaaggcaaccctaagttt

SEQ ID NO: 733017 - DNA, 495 bp, Homo sapiens
tttagaaatcatggtgactaagcagagaaaattagatgaatatacagtacttagatatttatcccccacaccaataatggaagaaaagggaatcaggtactcggctaacctgagagcaaggtaccaaagacaagaagaaaggtcaaagtagagttttactcttttgaaggtaatgacgcttaaaagcatttagaagctgactggcctgggtttatatgccagttctagcatttactcggctttgtgataytgagcaggttatttaattctctcagcttcagtttgctcatctgagaaatgtggataaccacagtcgctacctcctggaggggtggtgaggcttaagtggagtaaggcatatgaagaactcagcttattagcccttagtaaatacaggccaggactatgggtaaggtgacttcacagttcattgttgggaatacatgttgcccttccatagccttttaagcctgagtctcaggttcctgagtggga

SEQ ID NO: 733018 - DNA, 614 bp, Homo sapiens
gaacctaatatggaaggacttggattagggttttcatgtatctgcaatgatacttgtcaatgcctaccactgtgtgactgatgggtgggggcaggggacaggggcaatgctttcctcctcagagttgtgaacctcaaatgggacaaagggttagaatgagctttgcaaatagggaaggttttgacagcattagaagggcaatgggaaagatgcataagctctgaagctggctatgctcttggtagttttcacstttccttaatttgttatacaaggaaataagcaggatctgaagtcagactttcctattagctgtgataactttggaaaatttttcttttctctaagctttggcttttccatctattagatgtgaataatgataacaataactaccttcactggtacaagccttaaataaaattgccacataaatcttccagaattggtggggtctgaggctggatttctaaaaaggaggccaggagtcaatagaaatcagtaggtgaagaggacttggggaaacagttaggcaccaagctttgataaccttcttgatcttctaataaaaaacccagcttgtcctctctcctctgatgctgactttccattgt

SEQ ID NO: 733019 - DNA, 628 bp, Homo sapiens
ctcaccaatatactatcgcaagtcaccttgcttgtttatttaattgatcaatgtctattcccacttccccaacacacatgcacaaatgtaagttctatgagaacagaaattgtttctgtcttgttcattgcagtatccagagagttcagtgcagagcttgtcaggaagcaaagtcttgaatatattcatcaaataggtgaggataaataatctacaataatcactgttattagatcttactcttaatattccagaacgggtttctctactgtccatcataaagatttgatcatgtgacaattccagagrctcctgatgtttattttgcttgtaaaaacatttctctttctccttctttgccaaattccttcgagaaggagtgctggactcatgttagaggcatataacatgttaacgctaaaaggaaccttagtggttctgtgacataacaccgtcatttcacaagtgtgtgaacaagctcagaaagggcaattgatttgctacaagtcacacatttaattgatgagagaagagcttgaaatctagaatgattgcccttcttttagtgtccttattatcatgagaaattccagccccttttggataagatattgtttgatcagcctta

SEQ ID NO: 733020 - DNA, 607 bp, Homo sapiens
ttctgagtggccagtgtttcatttaacagctcatctgccaatggattgtgtcacagaaatatgtgaaccagacaatgtgttgtgaaatgaatggatttaccaaccaggggaccagccctgtgccctgctcattaggaacaatttgcatgcagaacatcmgtgcgacaggcccagcaagggatttgtttagctcatttagagtaatggagacaagagattaatcacttgaacacttgtgtgccttgcctctgcagccccactgtgcactgtgacccagctgagcctgatttgatgggatcttgtctctgatttcagtgcactgacagtgctctcacttgtgtctcaaaccttcggggtctggcctggggcttccacccacaaacagtgtggacctacccaccacatggaccagaggagtgactcagaaatcagtcacatcagtcacatttgtcttcagttcttccctagctcatttcttaattcctcatattcactgggttttgaatcacaagtggccttcaggtcaggttttctctaactcacatgggcaccctacctgtgcctgctccagttcttcacttcttctctccaatgcagcagaaacagt

SEQ ID NO: 733021 - DNA, 587 bp, Homo sapiens
aaaccaccaaattatcctccaaaatggctgtaccattttatttccatcagaagtgaatgagagctcccattactccacatccttgacaacatttggtggtatttatgctctggattttggccattctaatagatgtgcagtggttacagttaattttttaaacaaaaccttgtattctgcaactttggtaaatgtacttattatctcttgtgtagctttttagattttccatgattttttttgtaaagaattatgtcgttttcatatrcacagttttgcttcttcctttctgatttgtatgccactgacatcttttttcttattattgcaaatggttaggattttcagtatgatgttgagtagaagtggtgaaagtgggaatccttgccttgctcctgatcttaggggaaaagtgttcaatatgataccacaaaggatgacgttatctgtaagttttacagattccccttgttggtttgaaaaagtttccttgtatccctcatttgctgagaagtcttatcattatttggtgctggattttgtgtaaatgttttttctgcatctattgagatgattgtattgtttaa

SEQ ID NO: 733022 - DNA, 615 bp, Homo sapiens
acacacagacagagacaatagtatttttcttctgattaccagctgtggcatgtccatcctattctttacaccagtaaagtagctctgaatcttagaattacagttccaaataagggtacagtgatatttctgattgcttgtgtctcctggcactccacgtttccatgaccatctggtcataatgccaaggttgcaatgacagcaattaacagcatgttttattccctgccttcagttcagctaaaagccaagagcattaatagcaattagataatctattttacttgttgcatttgttctgattggctagcaaggaaaggatagcaagtatcttgaagcaaactcttagttttacaagaactctaaaactgagtcagaaaagaaactatgaactcacyaagttaggactatttttgagtactgtttacatatttacactcacccctttctcttttttttttttaaataaggaaaatagattccaggcaagagcctctaattgtctaattagaggtgcgagtaatatattagttagggttctacaaagaaatagaaccagtagaataaatctatataactaagaagagatttattataacatattggctcactcat

SEQ ID NO: 733023 - DNA, 615 bp, Homo sapiens
acacacagacagagacaatagtatttttcttctgattaccagctgtggcatgtccatcctattctttacaccagtaaagtagctctgaatcttagaattacagttccaaataagggtacagtgatatttctgattgcttgtgtctcctggcactccacgtttccatgaccatctggtcataatgccaaggttgcaatgacagcaattaacagcatgttttattccctgccttcagttcagctaaaagccaagagcattaatagcaattagataatctattttacttgttgcatttgttctgattggctagcaaggaaaggatagcaagtatcttgaagcaaactcttagttttacaagaactctaaaactgagtcagaaaagaaactatgaactcactaagttaggactatttttgagtactrtttacatatttacactcacccctttctcttttttttttttaaataaggaaaatagattccaggcaagagcctctaattgtctaattagaggtgcgagtaatatattagttagggttctacaaagaaatagaaccagtagaataaatctatataactaagaagagatttattataacatattggctcactcat

SEQ ID NO: 733024 - DNA, 616 bp, Homo sapiens
tattgcgagtaatatcatccccgccccccggataatacgaacaatatgatagaggaatgtacaccctctgcagtattgggactaatattattccctttctccctgcatattacgtacaatatcactgcggggtgcacacaccctgtgatattggatgtaatatcatcccctctccttctaatattacaaaccwtattatagggagtgtattcccactgtgatattgagggtaatatcatctcctcccctcctggatattatgaaaaatgtaacagagggtgtacaccttctgcgatattggaggtaatatcatccctttgtctaataagaagaagtaatatcatcttcttctcccactgaatattattaacaacatcacagggggtttacacaccctgtgatattgggagtaatatcatcctctcgccccctagatattaccaacaatatcacaagcagacgtacacctcctatgaacaatatcacaggaaggagtacaccccctacgatattgagagtgatattatccccttttttttctagatattttgaagaatatcacaggggagtatacaccccctgcgatattggaagtaatatcattccctacccttcc

SEQ ID NO: 733025 - DNA, 616 bp, Homo sapiens
tattgcgagtaatatcatccccgccccccggataatacgaacaatatgatagaggaatgtacaccctctgcagtattgggactaatattattccctttctccctgcatattacgtacaatatcactgcggggtgcacacaccctgtgatattggatgtaatatcatcccctctccttctaatattacaaaccatattatagggagtgtattcccactgtgatattgagggtaatatcatctcctcccctcctggatattatgaaaaatgtaacagagggtgtacaccttctgcgatattggaggtaatatcatccctttgtctaataagaagaagtaatatcatcttcttcycccactgaatattattaacaacatcacagggggtttacacaccctgtgatattgggagtaatatcatcctctcgccccctagatattaccaacaatatcacaagcagacgtacacctcctatgaacaatatcacaggaaggagtacaccccctacgatattgagagtgatattatccccttttttttctagatattttgaagaatatcacaggggagtatacaccccctgcgatattggaagtaatatcattccctacccttcc

SEQ ID NO: 733026 - DNA, 315 bp, Homo sapiens
tgaatgaatgaatggatatctaaaatgagagctttctcattccagaaaagttattcaactctatattctataacaatttttggtttttagagagacagtcttgctctattgcccaggctggagtgtagtggcatgatcatagcttcctgcagcctgaaaccctcrggctcaagtgatcctcctgcctcagcctcccaagtagctgggactacagatagatgccatcatgcctggctatctttttttttttgtagagatgggtctcactatgttgcccagcctggtcttgaactcctagcctcaagcgatcctccc

SEQ ID NO: 733027 - DNA, 613 bp, Homo sapiens
catccactgaaaaacacccactagcatcctcttatctgacttcctcaatgctttctcacctgtggtcagttaacacaaggtactgatcttcagctacaaggcagggcttcctcttgtcattttctgtttccctacccactttatggtggttctccttcctctttagccctatatggccgccgttccaaggtctagaggctcattttgattgtggttttcttgtaaatgcttcatgaaatcagaatacctttcttttaaagtaacattttcaggaatataatcactacgaggtgttcagtccataatttggacagtcatagaatttggagctattcttgcccttcagggaatggtgtgctattatcaaagcaggtaattttcaaagggagaaaccttcataacctgaagatttaagagcaccctggcttgttgtttctgaggataattcttttctgatcagctcctctctagcctttarctttgagtgaggcaatcacactttgttgcctttattcatttggaaggttcttcctatttcaatttatgtgaacccatttaaacaacagtaaaaatggaaactcatccaaataaatttaattccaattactctgac

SEQ ID NO: 733028 - DNA, 662 bp, Homo sapiens
agccataataaccatttttgttttctatgtgtaaggcaatgacctagtaattgcacatatattatcataaatttttcattcatgctacaaagtaactatgaaacttacttaacatataggtaaatcaaacctcagggacgccaggatacttgctcaaaatcacactcccgtcaagccaagatggcaccaggtctctatgactttraaaccaacattctttcaacagactattgctgctatagtgctgcataggctgctcagttgattctctctctctctttttcacacacacacacacacacacacacacacacacacacaaacacacaccactacttagtgagactttctcacttgacagaaataaaatggaagactcagaaaggagaaagaagaccataaggctggttggtggtagtactaaaattggaacccagctgtctacctgagctctttcttgtctacctgtctctcacctatgatatatataaatccaagctgatttcccagaaatctaacctggaatgactctgtttcctcaatggttagttttttcttattccaagaatcctaaggctgaggagaggagacagaaacactccaatgctgctgaagcagaaggaaaaggggaagcagagcccagggactacagttctggctcc

SEQ ID NO: 733029 - DNA, 552 bp, Homo sapiens
tagagacagggtttcaccatgttggcaaggatggtctcaatctcttgacttcgtgatccaccagcctcagactcccaaagtgctgggattacaggtgtgagccactgcacctggcctacttttttttttttttctaatttacctgtttacatgaaatctatttgtaactataatgttcaatttttttaattttgtttttgttgtcagatatataacattgtctttactggaaaacataccatggcactcgcatttccaatcaaaataatctcccttttcttgaaaaccaagtaaaaatatcacttttccttgatattcatggctttatcagtagtacaagcttgtatgttttcacttcctgataaaatrtttctgacgaggagagatacccttatctatgaaattatatattgtaattcagcaaatactttatcttctggaacatgagtttaattggcatatttaggcttgggcaattcttgctagattaattcagattaagatccccaaggttttgcttttatgccaatctcttgaaggaaaaaaaaaatc

SEQ ID NO: 733030 - DNA, 545 bp, Homo sapiens
aagctcctggtgctttttgttatttgtatttggttttttgttttgtgataaggttggaatgtttatcccctctaaaactcatgttgaaatttaatttctattgtaacagtgttaagaagtgagacctttaagaggtcattaggtcatcagggctctattctcctgggtgggattggcgactttataaaagggctagattcgtccacccttgccctcttaccttctaccatgtgatgatgcaccaacaaggcccttgccagacgctggcaccttgttcttagacttcccagcctccaraactgtgagtcaataaatgtatattcactgtaaataatgcagtaccaggtattttgctatagtagcacaaaatgaactaagaatattttatttttagtgttttgggtggtactactgatttctttttcctttgtgatctttttattttttattttattatactttaagttttagggtacatgtgcaaaatgtgcaggtttgttacctatgtatacatgtgccatgttggtgtgctgcacccattaact

SEQ ID NO: 733031 - DNA, 470 bp, Homo sapiens
cttgagcttgcagacaaaaatccagccgtggcccatgcttgattgtaggtttgtgagactcctagtgaatgacccagctaatccttggttgaatttctgatcctcagaaaatgtggttttaaagatctaagtatgttttaatttattatgcattacagtagtctccccttatctgtggagtctatgttccaagactcccagtggatgcctgaaaccatgaatggtacaccctatatattgttagcctttaatgccctttttatcttaactgagaactgcagctgtaactwttgcagtttgatgtatgacagcaaaactaccataaattaatttttccctcttcagaatttcagagttagaagatctgtttttaccttagaccttgacaacttcagcatgtgatttttttctttccttattaagacaagaactttcaccttttcaattaaagaaagcactttacggctgct

SEQ ID NO: 733032 - DNA, 501 bp, Homo sapiens
aagatgagagtaatatatccattggctaatcacaatatgcaattgaaattgtgtaaagatcatggactttgacaagttagagatttgaacttaaagcctggtttcaaaaagtacaaggtgtttgatcttggcaaagtaatttaaccggtttctcatttttgtcatcttgtaaatgtgcatagtatttataatataaaaccrttaggaaaacgtagtgatgaaaaatatcaagcaagcacagttcttgtcacttagtaggtggtcaaacactgctagatctcttctctttccccctttatctttgtgtatcataggatgtcaaacagataatgaatagcatcaattatagctatgacatctccaggacgttactaatgagagtcatacatcaaaacattaggcttatgtgttatgcaactatttgctgaagctgttcctactttaatttttaagacagtaacttcagagctttctaacataacaaaatctatatttactttg

SEQ ID NO: 733033 - DNA, 612 bp, Homo sapiens
ccacaatggaaattaagattcctgcatgagctttggtggggaacactcaaaccatagcactgtgcgataaaattgagcactcattgaatgctatttattaactccactatagacataaaatactcattttttaacttatagtgaaagctttttgatggragaaatccaaatatcattattactaagtcatgctttaaagtataggtctaagagtacatttgatattcaacacgtttatttagtgttcagtgaatgattactcttctctctgcacaacactttctaatcttctgctttctcttatgttttttattacaaaaagaaatttacataaatgatcacttctcagaattaaattgacagtgtaaatgacatgatttattactgcctaaaatatctgaattcaaatcctggctttgccactcaaacaatttttgagtaaattgcttagcttctctttatctctttgttaatttaaaactattcttttctccattactcatctgtagaatggaggtacgaatagttttctcagggagttttcaaatggccaaatgatttaaggtatgtgaaatacataacacagtgctgtgcttagcacaaaatagttga

SEQ ID NO: 733034 - DNA, 612 bp, Homo sapiens
tttcaaaattatttccttgacattttgaagtaagtgtgtctgtctgtattgcatgtattggagtaaataagccacatatgacaacaagagtacaaagagaatgtagatagaaaaacatagaatatagatagagaatatagatagataatcacaatagtggcataggaagatacattatgattagtccaccataaaactacaaaaagagaacttaggtgtatttgatatattgtaacagactagtggacattatatccaataagggtgttattggtcagattaataagagggtattattcctcagaggctgctgaaatcaacccccattcattaatattctataaaataaattagactacttgagcttctaaacatctgggatcaggtgtaactttgatggtccaagarcaagtgatctgtcaagaggcctgaggtttgtactgaaatctaatggcaaaaatgaactgaaacactttggagaagaaacagcctgtagttttaatttgattctcactgtcttccaaggaaaaattttcctggattgctgaactttagacattctctgccttctgaaaatctcatccatgctatgaataaaattctcattttatg

SEQ ID NO: 733035 - DNA, 592 bp, Homo sapiens
tcaggtggtccacccgccttggcttcccaaagtgctgggattacagccgtgagccactgcacctggccgagaatattctctgtatatgtattcttccgcatttaagaagttacactaagtcattttaactctttgcagccttcccctctcacagagaggtgagccaggtttcttcccaatcactagaactaatacttcattgaaycttgacaaggtattctgctgcacttagcgacccacaaagcatagttacacctgggatttcatcacactacacacattccaatatttatcagattatatgagattttaaaaaaactgtttccatctttaaagggctctaaggagacagctgagttccctgttccaaagcaagctaaagccctctagctgtgttaataccttgtggccccctctttccaccacctgggttctgctatttttactttggttggttgaatgattcccaagtaacctgccaaggtaaataagtaccaactctactcatgaatatttaagcccaagtggatatactgggtagctttgtggctagcattggatttccatataaaccataaggaagctgttgtga

SEQ ID NO: 733036 - DNA, 592 bp, Homo sapiens
tcaggtggtccacccgccttggcttcccaaagtgctgggattacagccgtgagccactgcacctggccgagaatattctctgtatatgtattcttccgcatttaagaagttacactaagtcattttaactctttgcagccttcccctctcacagagaggtgagccaggtttcttcccaatcactagaactaatacttcattgaatcttgacaaggtattctgctgcacttagcgacccacaaagcatagttacacctgggatttcatcacactacacacattccaatatttatcagattatatgagattttaaaaaaactgtttccatctttaaagggctctaaggagacagctsagttccctgttccaaagcaagctaaagccctctagctgtgttaataccttgtggccccctctttccaccacctgggttctgctatttttactttggttggttgaatgattcccaagtaacctgccaaggtaaataagtaccaactctactcatgaatatttaagcccaagtggatatactgggtagctttgtggctagcattggatttccatataaaccataaggaagctgttgtga

SEQ ID NO: 733037 - DNA, 623 bp, Homo sapiens
ctctaaacggtgaattacaatacacactgaaagaaaccaatggaaaaatgttccatgcttatggattggaagaatcaatatcattaaaatggacatactgcccaaagcaatctataaattcactgctgttcctatcaagctaccaatgtcattttttcacagaatggaacagaatagagaattcagaaataaagctgcacaactagagccatctggtctttgacaaagttgatgaaaattgcaatggagaaaacactcactagtcaataagtggtactggaataactggctagctgtaagcagaagaatgaaactcaagatggattaaagaaagatttaattgtaagatctcagaytataaggatcctagaagaaaacctagaatacactattctggatatcagccttgggaaaacatttatgcctaagtcctcaaaagcaattgcaacaaaaataaaaattgacaagtgagacaaacagtttctgcaagcaaaactatcaacagagtaaacagacaatccacagaatgggagaaaataatcacaaactatgcacctgacaaaggtctaatatgcagaatctataaggaacttagttcaacaagtcaaaaataaccccattga

SEQ ID NO: 733038 - DNA, 571 bp, Homo sapiens
aaactatggcacaaatcttcagctatgtggatccctcagccacttccttttctttctccagtaacccactgtgtgcaatgatatgttcctgcttgcacaaatatctttagtatttcagaatcttacctgcatatccatatcacttcatgtcagtgagaaactatgagttttctgataaacaccttcctgtgccttttgtattttaagctaaaaaatgatgttaaaggaacaccaatatycactcctcattgataagtctaacttatatttcctaattgttttcaattcagctcagcctccagtgatgtgcttgtttgtagaagggcctcatatacagaaccattcctaagttgccaacactttggtttcatgaagtcatcgccttatctatagtatatgtgtagggaggcaaagctggcaatagtgtaactcattctgattctgttcattccttcatttgtcttaaaagccctcttttcttggttccaatatcttttaagttcacccatatctcttttctgccactttgtgattcattctccctagtatctagccagtttattatagtgag

SEQ ID NO: 733039 - DNA, 562 bp, Homo sapiens
tcaacgaaagtagcatatatctaggactttgaatggcaagcagcttagagcaaaaaaccaagtgctgaagatatagtttaaaaaaaaggtagaaacatgcttagcaaagagtcccccacaaaacttgtaatctgcataaattgtcaaggcacagctgtggaggtgacaagggcatttcctgattcccaagacatcarcaaagtcctttaatcaacacatacattattctgttctgtatgtaatattgttcttgaatattaagcagccagtgattcagtaccatctggcacttcctggttaagcacagctctgatacagtaagaatgtgtcaagagtccaggaaagcagtttccaatgaggacaatgcaacagagtgaatcagacaggctaggtaggagtgggagaaaagacacactcttccttcacccaggatgaatggaaaaaagaggaggtggtagggcatcaaatgctttgtgccactgaccttctttttccatgcggactataaagatgcactttctgagtgctatggggggatttttgtttttgttttttatccctc

SEQ ID NO: 733040 - DNA, 613 bp, Homo sapiens
atgtagcgtcgtgctgatactatcttaagcgatgtatctgtatcactaatgtcaggtgaaattttttcttttacgtaagttgtccctgttaaaatttaaaacaaccatttttacacatctagcatgttttaacattttgagtcatatgttggcaaaaatggctctttcagaaattgctataatttgatagagctttagtaactgtattaatttytgatgggaaaattacaaatgtaaataaattataatagactgctttactattcaggagaaattctttacattcaaacagtaactttataatgtcaaaataaccagtagttattaatcagtatctggactatgtaaatatttgcttgtttccatagtgattggcaagcccagatacagaaaaaaaaaaaaaacccacacatgttatcacttcctaataatatgatcataaaaacacgactcaggccagactgagaggagaataaacagtattaattaaaagatttataaaatggaggaggtgacaagtgaagtattgagtgtaaaaattcacaaaggaggtaaaatatatctttttcaattctgaaagaaacttgagcaacccttaattatctttcaaaat

SEQ ID NO: 733041 - DNA, 561 bp, Homo sapiens
ataatcacaatgagacgcctagtgaaaaagtcacaccgtgactgccctggccctgcctcagcttaaacaataaaatatgaattgcagaacatgacccaataacaggaaacaggaccagcgcagagggtgctttggtaaacagcagcagtttctcccaccaagatcttgattaatgcccttcccaaatctagagaaaggaataaartttccatgtcagaagggctgaccacacactcatgtaatgtctatctctgacatctctttccaagccgtgcacttgtgccagaatcatataccctgtcctaggacaggtaatgaaatgtaatgacagtctttcctggctccacttccagctgcttcacaatggctgctaataaagacatatggctatatgttgtccatctgtgttccaaaagcaaacatgcaattgtgttttcctcttaggtctgctctcagcctagaggaatgtagcctgagaaagatgagtcaatcttgagctgacctctcactgcttcctaggctacacttcaatacttccgacaatgcttccagatctcttgc

SEQ ID NO: 733042 - DNA, 631 bp, Homo sapiens
ccaggaacacaggatccaaggatagggcaggaaaattccacctcaatccctctcccaaagttccctatttctcctcccctatattctaaccgtaggcctgctgaggccccaggggtgggatactgcacttaaagcctttaaacccatcaagattaaggtgttttttttttgctggtcagctgaatttttcttattctgtttattgggtggggggtgggggaaagaggctgttttctaaaggaatgaaggaataaaagaacaagagtgggtatgggagagtaaggataatttcactgttgtctcagagagttgagtctcagggctggtaaattctcarattcgacactgtattatgacatagatcagctgttattttttcagtctcagaggaaaccttgaggaatctcattcctgcaattgtattaaattatctgccaatattgtcttttccactcaaagtactttcattgaaacatttggcatggagtgcagaaacagcaaaatctctttaaaagctattgtttctttgaatgtttggtttaccttttggttccacagtaaaataacttaataaatgaaggatgagtggaattgttactatagcaatccccatagtaacatcaaaatgcca

SEQ ID NO: 733043 - DNA, 631 bp, Homo sapiens
ccaggaacacaggatccaaggatagggcaggaaaattccacctcaatccctctcccaaagttccctatttctcctcccctatattctaaccgtaggcctgctgaggccccaggggtgggatactgcacttaaagcctttaaacccatcaagattaaggtgttttttttttgctggtcagctgaatttttcttattctgtttattgggtggggggtgggggaaagaggctgttttctaaaggaatgaaggaataaaagaacaagagtgggtatgggagagtaaggataatttcactgttgtctcagagagttgagtctcagggctggtaaattctcagattcracactgtattatgacatagatcagctgttattttttcagtctcagaggaaaccttgaggaatctcattcctgcaattgtattaaattatctgccaatattgtcttttccactcaaagtactttcattgaaacatttggcatggagtgcagaaacagcaaaatctctttaaaagctattgtttctttgaatgtttggtttaccttttggttccacagtaaaataacttaataaatgaaggatgagtggaattgttactatagcaatccccatagtaacatcaaaatgcca

SEQ ID NO: 733044 - DNA, 517 bp, Homo sapiens
gccctaccctccagccatgcagaaacaaaacagatgctattgttctgctgtgttcttccttagagaatgtggccagtggaaacagggcagactgggaattggagtgaacttccttgaaagagagtcatgggtcaagaaggtcaagccaaaggatgtagtagaaagcttttccctagaaatctttgggaatgaagcaggcttcaagcactcccatccctgcccctgccgccacccctaccacattggtttagactgggtagggccagaagtcgsggggggggtggttggggggaggaaaaaagccatcagtttgcccacggcccaggctgcttccccagctgctcctgtcctagcccgggcctgggtgccatgcttacactctcacactcgtgtgcacgcccacacacacatcacacacctttctagtcacacagtcacagcctggcctctgctcctgtgggccagtggctggacaccccctgggatggctcaaaggagtcagggctgggaagtgggg

SEQ ID NO: 733045 - DNA, 517 bp, Homo sapiens
gccctaccctccagccatgcagaaacaaaacagatgctattgttctgctgtgttcttccttagagaatgtggccagtggaaacagggcagactgggaattggagtgaacttccttgaaagagagtcatgggtcaagaaggtcaagccaaaggatgtagtagaaagcttttccctagaaatctttgggaatgaagcaggcttcaagcactcccatccctgcccctgccgccacccctaccacattggtttagactgggtagggccagaagtcgcgsggggggtggttggggggaggaaaaaagccatcagtttgcccacggcccaggctgcttccccagctgctcctgtcctagcccgggcctgggtgccatgcttacactctcacactcgtgtgcacgcccacacacacatcacacacctttctagtcacacagtcacagcctggcctctgctcctgtgggccagtggctggacaccccctgggatggctcaaaggagtcagggctgggaagtgggg

SEQ ID NO: 733046 - DNA, 617 bp, Homo sapiens
tagtaaatgttatgttctagcagtgggtagatcgtgggagaggctatgtccatatgggagcagggaattaatgagaaccgtctttactctctgatcaagtgtgttgtgaatgtaaaacttctaaaaaaataaaatctatttgaatggaaaaagcagaaaaaaggaaatatctttctaaagcttatgattactgtgccatttacagatgaggacaatgtgggttagtgaggctaaataacttgcccaaattcacccatttggtaactgggggaactgggattcaaatatgactagtctggcttaagacattgaagtaacaaaatgtttaagaaagkcagacacaacaaaacaaattaaggctcagaaacctgtgtagtatttgcaaaagctacacagcttgtaagatgcgagtcagcatcagaatccaattagtctggctcctgggcctgcacctccaacccctttccaataacactacaggtgcacctagacacagtcacacatgcagacacaaaacctcagcgatatcagaggccattacctctccttccaggtaggtgcacataagcataaacacagatatgcacaagagtacacatatgtacatcgaatacata

SEQ ID NO: 733047 - DNA, 610 bp, Homo sapiens
caccttagtttgcactgagagaccattttcggtagaacccaaaagtttgcaagaggaacacagcatgcagcaagtgagcaagccagggacagtggcagcagtgtcaaggaccatggtgctgctggcaccacctccacaggcatggaagcagcgctcccactccctcctcagactccacagtgtcccaggagattttgctgacaattccagtttctgaatgaaacatttcagcaatggtgagggcttcaatcccatctctgatttcctgtcaaccgtgaatggatggatgtgatgcctgcaaggggagctcccaccaccagccaaaggaggcagtgagtgattgtgtaamcccacccaagaaaccacactttccccacagatctttccagcccatggatcaggagatccccttgtgagcccacaccagcagggccttgggtctgaagcacagagctgtgtagactctgggcagccactcaggcatgcacaaagatgtgggagtttttgcatactccacccagggaattccagtgaggcaggagacccttccattcctgtaggaagggggctgaagccagggagccaagtggagtcattcagtgggtcccac

SEQ ID NO: 733048 - DNA, 620 bp, Homo sapiens
cagacacctgtaatcccagctactcaggaggctgaggcaggagaatcacttgaacccaagaggcggaggttacagtgagccaaaatcgtgccattgcactccagcctaggtggcaagagcaagtctccacctaaaaagaaaggaaggagtggaggggaggggaggggaggggagtcctggtttgcttgggactgttccagctttagccctgaaagccctttgtcccaggaaactcctcagktccaggcaaactgggactgtcggtcaccataagttaggataattcttccttccccaggaatgtgaagagcatgctcagtggaagcctgtgttgagactgcttctgtagctgaagaaaggttttgcctttatgtgcctgatttccttccttcctgcctgccttccttccttatttccttccttccttccttctcccttccattcccttcgactgttggtcactctgatcctagaggtgagggtgggcgggctgaagtctctctgttgcagaatggaatgcacttcagccagttctagtgagtatataagggaacgaccttcatcattccacaagaattcactgagcacctatgatgtgccaggtgcttggcaataacagt

SEQ ID NO: 733049 - DNA, 626 bp, Homo sapiens
tacctctgaacttaaaagttaaaaataataataatacctgtaatctcagcactttgggaggccaaggcaggcagatcacgaggtcaggagatcgagaccatcctggctaacaaggtgaaaccccgtctctactaaaaatacaaaaaaaaaaaaaaaagaattagctgggcgcagtggcagacacctgtagtcccagctactcrggaggctgaggcaggagaatggtgtgaacccaggaggcagagcttgcagtgagccgagatcacgccactgcactccagcctgggctacagagcaagactccatctcaaaataataataataataataataaattagccaggcgtggtggttcacgcctgtagtgccagctactggggaggctgcagcaggagaatcacttgagcccaggaggtcgaggctgacgttgagctgtgattgtgccactgcactccagcctgggtaacagagcaagacctatctcaaaatagtagtaatataaaagttcctagatgttaccaggtaaaggaatacaggcttatttgccacctgtacttacaagaggctaatccccagaagcaccaagtgagagctatgttagttccaagtgttcctagattcttgac

SEQ ID NO: 733050 - DNA, 655 bp, Homo sapiens
ttttccctttgcatcctcatagcttagctcctacttatgagtgagaacattcaatgtttggttttccattcctcagttacttcacctagaataatggaaagcagctaattctaagaaaaatacccaggagacagtacaaagtgacccagataatatgaagggggtttgtattagtttgttttcaccctgctgataaagataatatgaaggggggttgtattagtttgttttcaccctgctgataaaggcatacccaagactgggcaatttagaaaataaagaggttaaaaggacttacagttccacatggctggggagrcctcacaatcatggcagaagttgaaaggcacatctcacatggcggcagacaagagagcttctgcagggaaactcccctttataaaaccatcagatctcatgagacttatttacaatcatgagaacagcacaggacagacctgcacccatgattcaattacctcccaccaagtccctccctgaacacataggaattcaagatgagatttgggtggggacacagccaaaccatatcaagagttaagaatttcaggaaacaaaataagaagacccattatatatcaaataagtccaagaaaaaaactggatactacatacaaaagaatggaattggacc

SEQ ID NO: 733051 - DNA, 655 bp, Homo sapiens
ttttccctttgcatcctcatagcttagctcctacttatgagtgagaacattcaatgtttggttttccattcctcagttacttcacctagaataatggaaagcagctaattctaagaaaaatacccaggagacagtacaaagtgacccagataatatgaagggggtttgtattagtttgttttcaccctgctgataaagataatatgaaggggggttgtattagtttgttttcaccctgctgataaaggcatacccaagactgggcaatttagaaaataaagaggttaaaaggacttacagttccacatggctggggagacctcacaatcatggcagaagttgaaaggcacatctcacrtggcggcagacaagagagcttctgcagggaaactcccctttataaaaccatcagatctcatgagacttatttacaatcatgagaacagcacaggacagacctgcacccatgattcaattacctcccaccaagtccctccctgaacacataggaattcaagatgagatttgggtggggacacagccaaaccatatcaagagttaagaatttcaggaaacaaaataagaagacccattatatatcaaataagtccaagaaaaaaactggatactacatacaaaagaatggaattggacc

SEQ ID NO: 733052 - DNA, 598 bp, Homo sapiens
ggatcctgttgatctgtgaccttacccccaaccctgtgctctctgaaacatgtgctgtgtccactcagggttaaatggattaagggcggtgcaagatgtgctttgttaaacagatgcttgaaggcagcatgctcgttttaagagtcatcaccactccctaacctcaagtacccagggacacaaacactgcggaaggccgcagggttctctgcctaggaaaaccagagacctttgttcacttgtttttctgctgaccttccctccactattgtcctgtgaccctgccaaatacccctctgcragaaacacccaagaatgatcaataaaaaaattaattaattaattaattaaaaaaaagaaaatctgagcagaataatttatagaaacataaaaaaaagagtcaagacccatcagtgtgctgtattcaggaaacccatctcacgggcagagacacacacaggctcaaaataaagggatggagatctaccgagcaaatggaaaacaaacaaacaaaaaaagcagggcttgcaatcttagtctctgataaaacagactttaaaccaacaaagatcaaaagagacaaagaaggccattacat

SEQ ID NO: 733053 - DNA, 640 bp, Homo sapiens
atttgccattctgtatgttttattaatttatatttggaaactcatctaccactagattctaagtccttgtagaagcttttacttccagccaaggtggagtagcagggaccaaatttgctctcccctctgaagaaaacatcaacttagagaaaagagaatatgaaatagtgattttgcaagrctctgaacatgagtccataaagctgtaaatgaataaagtagcatgatctttgacaggttggaaacaaatttgaagagacctacaacagccccagctactgtgtggaaagaatgattccaggatgtcatgcaggtccaggaggttgtctgttgtctctctgggttgaggcagagcagtcttgaaaggccaagctggccatagtccttagagaagactggtggagaggagagcactgcacagaaacgatgttccagagatctaagaagaaaccctccggaatgttcagtggagaactgattcgggagtgtttgaggaaactatctgaggcaggtaaataactactgaaatgattaaaaggaacaattcctgaagctcgcatagagctcaaactatctgctgcttattcccacaatccagagagaaaagtctcataattcatggggcatgggatagagtttg

SEQ ID NO: 733054 - DNA, 609 bp, Homo sapiens
agttggccagtcagcaactagttttcttcagatcttttcaaaggctgcttgttgtcgctttatccaaaggagttgatagatgtgtatgaagcattctggctgacccatggcaatttgtgtttggaagaatgagatttagagccagggttagtacaccatgtggattgccatgggcattatttaggtgtagataagcttatctgaaattgcatctggattacctgactaatccaaaaaaggaaagaaaagtagagacctgctatggaaatagtcatgaaacaaaggagcgctaggggagaggtgggtaactaaatgctagtttttaaataatgttatatcagacttaaaagatacatggaagataagacaggcctaagagtttgctagcagctggatcagattrcaaggaagaatctcagtctatcctttattactcaagccagagcacaagactagtttccacattttataaatatagagtcttttttggagactgtgaaatttggatagaatgttttatttctcattactgtttacagattcgttatgaccttggcctgtatacactttcatgacaggttaagtgaacagaggttaaaggaggcaaac

SEQ ID NO: 733055 - DNA, 609 bp, Homo sapiens
agttggccagtcagcaactagttttcttcagatcttttcaaaggctgcttgttgtcgctttatccaaaggagttgatagatgtgtatgaagcattctggctgacccatggcaatttgtgtttggaagaatgagatttagagccagggttagtacaccatgtggattgccatgggcattatttaggtgtagataagcttatctgaaattgcatctggattacctgactaatccaaaaaaggaaagaaaagtagagacctgctatggaaatagtcatgaaacaaaggagcgctaggggagaggtgggtaactaaatgctagtttttaaataatgttatatcagacttaaaagatacatggaagataagacaggcctaagagtttgctagcagctggatcagattgcraggaagaatctcagtctatcctttattactcaagccagagcacaagactagtttccacattttataaatatagagtcttttttggagactgtgaaatttggatagaatgttttatttctcattactgtttacagattcgttatgaccttggcctgtatacactttcatgacaggttaagtgaacagaggttaaaggaggcaaac

SEQ ID NO: 733056 - DNA, 623 bp, Homo sapiens
ccctggcaaaaaatcaagtagctctttgctgctgacgcactaggcagtaagcaccgcctggtatgaaattctattaagcagaaagatccttttacttgcacttcgcactttgtcagatcttggtcagtgaagcctaagtgaaatcaaattattaagtggcaaagcagaaaggctcacgcttctccaacattagtctgactttcgtttctctgtgtcaccttttccccttttcttgtcccattcatccacgcccctccactgtcactagggtgacatgatccaggggactgcacattaaagtgtaagggacctcatgtcccttctaaaagaggatgcagagaaagcgcaatgttgaatgaaaggaaaaagttgctaaggatgaaactgtgggaatcaattatatacatatgtgtgtgtgtataacgaggtataaatcagtgcctgtrttaagaataagactgtgccagcctttatacccgcttctttggtagggggggtagagtggtagagggtattgatctaattgcctattccataattttcctaagactggcactgcatattcataattacgactagggatactgaactattttttgagtattcatagatattacgctcag

SEQ ID NO: 733057 - DNA, 589 bp, Homo sapiens
ggtttgatgaacatacacatgcatgtgtctttatggtagaatgatttatacttctttgagtatatacctaataatgggattgctgggtcaaatggtagagaattaagatttttcctaagcagtgtgcattcctgatcattgtttaaatgcttgaaatatttaacactattttttaaatttagattttaaaaatttcagaatattatcttgcagactttaatacctacacaaccatggtttgtgattaattaaatagaaaaggtgtcagatgagaaacagcatagtrttctgcaaatatatttgctattaacattattttgttactactttaggtattaccaacaaatgaatatagattcatatattgttattgatatttttccattgtagtttagcatcagaatctaaacaaggaagggttacattttactaatcatattatttatgactcacttccttgtttacagacctgtggaaattgtatttgaagagctgcctataaacatctgatctctttaataattccatttgtaaattatttagcatctgcatcctgccattatgtaaggaccatgtagttgtgctagct

SEQ ID NO: 733058 - DNA, 539 bp, Homo sapiens
tctactacatagcgttggcttctgttaacattttgatgtatctcttcacagcttataatcttttatataggcaaggcattatacgtataatttggtgatctacattttaaaacttaacattacatcataagtacattctcatgttagtaaaactatattttaaaataattttgtgtatgtaatttttcatcacaaagacatgctattctgcaatttgaggaagccattacatttttatttacttatagagttacctagtcaccttactgaactctcaataatttcagattcacatattacttggaaaaaataatttgagttatttaaaattattgtttaagccagtttggcaccattatcaattccctcyctactatattgcatctaggagaatctcacaaggcttcatctcccacccttttcctatgatatctctcgtttcatccagttgccttttttctgttttctccttctcccctaaatcccttagaagaaatgctttctgttggtctgtttgcatgtctacttatgttttatca

SEQ ID NO: 733059 - DNA, 561 bp, Homo sapiens
attattctttactctttacttgcatcgacttacttattcctctcaatatccacttttcagtcaagaaacctgagatacagacagttgttataactttgcaatgtgaaccaaccaataaattttggagcccagatagtctgtctgacttcagagatcatcttgaattaagtggaagaaatattgatatgtaaccctttacatgttaaaatgtgtgtgtgtgtgtgtatgtgtatgtgtgcttactggggtgtctgagtacatactggtaaaagagtcacartcttactttaaaattgatgcttataggaccacaacctttccatttctgaacaacaggtgatccagatatgtgcaatgcattttgataactgagcgactattatctttaacaataatcatcaggggaggaccttccatgtcaacggataggaaatactgttaaatggactcctttcctgattttctataatcctctatcttgtttacttgctgtttctttgttcttcacctgcattaaaacaaaacctgcagctatttttgtatttgcataaattaacacat

SEQ ID NO: 733060 - DNA, 529 bp, Homo sapiens
tagtttaaatattagtcagtaggaatgttaagataaatattctgctgggttgttttttaaaaaatattttcacttttttttttccagggctttgaaggaaatttggaaaagcagaattaaattacttgttacatatacttaaaggtaaatggtccggggaataatttagtagaaamtttatctaacatcataatattaactatttattaaaagagatactttataataaaacatctctttagcacattgaggctcatcaagttaaaattctgtttaattccccaatgtccaataagcacaactactacctgccaggtactccagggaatttaaacgcttatgggttaatatatttcctttcagtgtgtgtttaacactgaagataattaaccttttctgactatactaaaaattccagcttggtgttgctatcttttgagctagaaaataataatgtagcacacaatttgagtgtcaaagaacctgcaaaggcttttctgataaggacaacactttctgaatttgccta

SEQ ID NO: 733061 - DNA, 602 bp, Homo sapiens
gttccttgatgccttttggccactagaatggtgctttttccaggcccacccatggctgcccatggaccaatcagcacacacttcctaaattctgagcccataaaaaccctggactcagccagactcagggactcactgggactacctgcctgcagataggagctactcacttcaggtctccactgagagctggtctgtcactcaataaagttcctttctgccttgatcaccctacaattgtccacataacccattcttcctggatgtgagacaagaacttgggacctgccagatggcragactaagacagctgtaacacaaatgggataacaccccaccaccacaggcaatgaaaaggagagaagacctgcagcccttcaggtagcccggtaatacccctctttggggctctgtggttcctggcggtctctgcactttcaggtgccactgcattcccctcatccagagacattggtgcccacagtggaagccacttgtggtacatctggtccagccacagcctcacatggggccggtacctgtgcgggcacctggagctgccctccccactgcagcagccgttaagcctggctgtgtgcagt

SEQ ID NO: 733062 - DNA, 578 bp, Homo sapiens
actgatggagtaaagggaaacaattcaaataatcactgaataagctcatgaataaagtaaccatgatgacagatatggaaggtatttatcaactcagaaattcagactttaactcacctaggccaacctgcatatggtcaatgctgagtgcccaatctgccagcagcagagaccaacactgagtcccatatatagcaccatgccccagggtgagcagcccactatttggtggcaggttgactacactggactatttccatcatgaaagggacagtgttttcttcttattgaaatagacactctgcatacagattttccttccctgcatgcaatgcttttgccatgggcttatgraatgctttatccattgtcatggtatccctatatcattgcttattgatcaaggaactcatttcacagcaaaagatgtatggcaacaggcacatgcttacatatttcaatgatcttactatgttccccaccattctgaagcagctggtttgctagaagggtggaacagtcttttggctagtttgccctacttaggtggcaataacttgcatggctggagcaagctc

SEQ ID NO: 733063 - DNA, 622 bp, Homo sapiens
tatatatatccacaaaatgttcacaagtgtctactgatcaccaatatttcgttgggcaaataaccatgagtcccctcacaggccagcagcaaagactccagctaagaatagtttattcttttacgtcactctctttgggccaagagttatcacacctgtggggtctggtccataaaaagtcactcatctggaattataggtggcaggagaaagrtaaaggaggccttttttcttccacttctgctagtattgccagtgcttttgttttaaaagcctagacatcaagtttggttaatttaggtggcctcttgcagtttgggaaatagaagaaatctcagtgtgccaggggagaatcagaggagaagcttccagcatcaggtgatcaccaaagaacccagaacatttgccactgagattctactacaagagacgggctgttagcccatacccatgttcaggcttcctatgcctttgggcacatgtggggacagggacagctaatgaaaatggcatcaagccagttggtgggccagcaagttggctggcagggtggaggccatccaagcagctcccagccacgcccagttggggtttaccagaattgagtcagccaggacagcag

SEQ ID NO: 733064 - DNA, 637 bp, Homo sapiens
tgcggtatatgaaaaatataatactttgaggagtgtttgcatatgaagagactccctacaaatcctggagtacagagtacacaatgatagtgcaacaacctggaactcatagtggcctagctgtagtcacacctgagaccagagagatgatggaatggagcagctgctggaacccagcagagagccactgctatgattaattttatgtgtcaactgsgctgggccatggtacccagttttttatcagacaccagtccaaatgtcactatgaaggtgttgttcagatgaaattaacatttaaagcagtagctttgggtaaagcagatgacccttcataatgtgggtgctcctccaatcagctgaaggccttaaaagtaaagactgaggctccccaaggcagaagaaattctgcctccacatagccttcagatgtgagactgcaagatcaagtctccctaggccaccagcctgccagcctgccctgcagatttcagacccgaatgcccccacattcacataaaccaattccttacaatgaattagtctctctcttcctcctctctctctgtttatataatatacactataatatctatatcattatatagtgtgttatatattaatatattatatataa

SEQ ID NO: 733065 - DNA, 569 bp, Homo sapiens
ggccactcctgcacagtggatccaccctcccgaaagtggcagatgacaagcacactcttcctggaaaccgcctcgaacgtgctggctactgcattgttaacacaacttcaaccaagaaggtgaacgggtgctttaagaaaaagtattttttttaagcaagtgaaaattgatgaaccgattcccctccacccgtaactggatttttccacaaatctctctttattattgtttgattaaacaaaaatacacttttaactgctaaactgcgctgactacgggagagctaagggccctattactatgcagttataatagaagacacacaattaaagtcagatcatgattcctgacaacatccgtggggtgggggctcccctgaggccccygaggctgccgctcactggggaagggccttgaggatggcgttcacctcctcagccacggctgtcagcgcgaactcaaactgctcctgcagggcgagaaacgagagaagtgccaatgagagcggcgtccccccgactcctgccacagcgtcggctccctgcagatgaaagcggcgtccccccttc

SEQ ID NO: 733066 - DNA, 495 bp, Homo sapiens
gcgaagagggcacattttacagcgcaggtgggttccctcggcttcgcggccccctcccaccttcccagtgttaacgcactgaagttagctccgtgcgggtgtgtgtgcttagtgttatttaggggcttgagcgtcaaataattttttaaaaggttacaatccaaaactatcctactttctgtcttttgcatgtccatgttacataaaccctcaaaaaaaggaaccagagaaaaattacacttttcaacaaaagcagcgacacgactacatgttctgctcagtggttccactctaagtgagactccrtcgcagctgcgcacacccgggtctagagcaggaaaagcaaaaggctcacggagtcgcgctgatgtgaaccccagcgcaggcacttccgggcctaagcatttctgcaggaaccccaaggccacagctgtgtggtttaaggttcacacttgagcctctaactcgcttcctactgtggagctttggcattct

SEQ ID NO: 733067 - DNA, 634 bp, Homo sapiens
tccaaaggattaaaacacagtatcctgttaataatattaaatgtatacgcagtattatatcatataagaaatacaattattaaacctttaacattcagaattgaggtaacatgttcgtattacttttatataaccattcattttgtygaaatttcaaatttaaaataaaacttattgtggagataatgtctgttcattaaagaaaccgtaggtaatttaaggaatagcaatatgcagtctttacagcagtaacattaaattttttaagattaaaagttaatgcttctcaaaaacatttaactctaggtggctattatcttactttaaaatgtggaattcagcccgacaccgtggctcacacctgtaatcccagcactttgggaggccaaggcaggcggctcacgatgtcaagagtttgagaccagcctggccagcatggtgaaaccccatctctactaaaaatacaacaattagccatgtgtggtggcggatgcctgtaatcccagctatttgggaggctgaggcagaagaattgcttgaacccaggaggcagaggttttactgagctgagattgcatcgctgcactccagcctgggtgacaaagcaagactctgtctcgaaaaaaaaaaaaaa

SEQ ID NO: 733068 - DNA, 634 bp, Homo sapiens
tccaaaggattaaaacacagtatcctgttaataatattaaatgtatacgcagtattatatcatataagaaatacaattattaaacctttaacattcagaattgaggtaacatgttcgtattacttttatataaccattcattttgtcgaaatttcaaatttaaaataaaacttattgtggagataatgtctgttcattaaagaaacygtaggtaatttaaggaatagcaatatgcagtctttacagcagtaacattaaattttttaagattaaaagttaatgcttctcaaaaacatttaactctaggtggctattatcttactttaaaatgtggaattcagcccgacaccgtggctcacacctgtaatcccagcactttgggaggccaaggcaggcggctcacgatgtcaagagtttgagaccagcctggccagcatggtgaaaccccatctctactaaaaatacaacaattagccatgtgtggtggcggatgcctgtaatcccagctatttgggaggctgaggcagaagaattgcttgaacccaggaggcagaggttttactgagctgagattgcatcgctgcactccagcctgggtgacaaagcaagactctgtctcgaaaaaaaaaaaaaa

SEQ ID NO: 733069 - DNA, 624 bp, Homo sapiens
aaaaacatttaactctaggtggctattatcttactttaaaatgtggaattcagcccgacaccgtggctcacacctgtaatcccagcactttgggaggccaaggcaggcggctcacgatgtcaagagtttgagaccagcctggccagcakggtgaaaccccatctctactaaaaatacaacaattagccatgtgtggtggcggatgcctgtaatcccagctatttgggaggctgaggcagaagaattgcttgaacccaggaggcagaggttttactgagctgagattgcatcgctgcactccagcctgggtgacaaagcaagactctgtctcgaaaaaaaaaaaaaaaaagtggaattcgtgtttgaactaaaatgagtattatttcttcttcatgtgaaagtttataatattacctaatttagtaataatctatttgaattttaagctcttcttaataaggaaagagataaaaagaaaatcaacacatctataagttaaaacctatatgttattacatatttgaaaagtatttattgtatacctacaattcaagattgaaggaattttcattagcacatttttgttatgccttacagattttacttaatccaatttcatgagtg

SEQ ID NO: 733070 - DNA, 540 bp, Homo sapiens
tatgctttaaatgtgacccctcaagttcatgtgttggaaacttaactcttgatgcaacagtgttgggaggtggcacctttaagaggtgtgaggttatgagagtagagccctcatgaatggattaatgtcattatcagaggagtaggttagttaycgtgtgagtaggtttgttgtaaaagcaaattcagccccctcttgctcacttgtgcattttctcaccatgtgatgccttttgccatgttatggcacagcaagaaggccttcagcaaatgtgatccccttgttcttggactttacagcctccagagtttctattgtttataaattacccagtctgtggtgttctgttatgacaacacaaaacacacttaaacagttgttatgtgttttataagatttaaagacctttttgatggagagccataacacggtaatacttgaatagatgaaaggcagaacttttctgttacttacagctccaaatgagagaaggctgccaggcagacccactttgggagttgcactttggatagagtaaca

SEQ ID NO: 733071 - DNA, 540 bp, Homo sapiens
tatgctttaaatgtgacccctcaagttcatgtgttggaaacttaactcttgatgcaacagtgttgggaggtggcacctttaagaggtgtgaggttatgagagtagagccctcatgaatggattaatgtcattatcagaggagtaggttagttatygtgtgagtaggtttgttgtaaaagcaaattcagccccctcttgctcacttgtgcattttctcaccatgtgatgccttttgccatgttatggcacagcaagaaggccttcagcaaatgtgatccccttgttcttggactttacagcctccagagtttctattgtttataaattacccagtctgtggtgttctgttatgacaacacaaaacacacttaaacagttgttatgtgttttataagatttaaagacctttttgatggagagccataacacggtaatacttgaatagatgaaaggcagaacttttctgttacttacagctccaaatgagagaaggctgccaggcagacccactttgggagttgcactttggatagagtaaca

SEQ ID NO: 733072 - DNA, 540 bp, Homo sapiens
tatgctttaaatgtgacccctcaagttcatgtgttggaaacttaactcttgatgcaacagtgttgggaggtggcacctttaagaggtgtgaggttatgagagtagagccctcatgaatggattaatgtcattatcagaggagtaggttagttatcgtgtgagtaggtttgttgtaaaagcaaattcagccccctcttgctcacttgtgcattttctcaccatgtgatgccttttgccatgttatggcacagcaagaaggccttcagcaaatgtgatccccttgttcttggactttacagcctccagagtttctattgtttataaattacccagtctgtggtgttctgttatgacaayacaaaacacacttaaacagttgttatgtgttttataagatttaaagacctttttgatggagagccataacacggtaatacttgaatagatgaaaggcagaacttttctgttacttacagctccaaatgagagaaggctgccaggcagacccactttgggagttgcactttggatagagtaaca

SEQ ID NO: 733073 - DNA, 557 bp, Homo sapiens
gaattgcgaccttttattccatacatttccactaaaaggataattctaaaggccaatttcacgaagagaaaatcacgttaagagtctcacataactttttatcttactctttcttaaaaaggtaaaccgaatatggcatacaagaggtgtgagggcatcatctcatggagagctggtatatatttacacacaatttctggggatcagttgtggtgctaagtgatactttaacactcgaacacttcctagtaacccagcaccattcaagaatattgctaaagaggaataatggggtgctacaggctcgaggggagcatccttcaccatttcatmtacataaactggtgctctccaggctgaggggacagatctgacagtccgtggaaagctgctcttgcctacactacctctgagggtacattcagcctccacatctttcatccagccaggggctaaagagagcagatcaattacaagagctttaggagagttccctgaggacaggcagtcaacaagaacagatcaacctcaggacaccaggacctggcttgacactg

SEQ ID NO: 733074 - DNA, 590 bp, Homo sapiens
catgggcaagtaatgccgttgactcgagagtctagaatcaaaagcaatatcaaaactacagataattataaatacctacattttatgagtcttgtggctcaccttcatttttgtcagcatccaataaattctgaaattctgtgtggaaaatttccaagtgtttttcaatgaggacttgttcacatttccttgctaattcatcttgtgtgctttcatgaaggtaaacctgaactcttcgttgttcctcaagcagacgagcctctgcctggagaaaattaattcaagtgaatggttttgattcattggtaaagaactgttacaattctttaatatgtaaattaaaggaaactgaaaaatggcaaattaaattcacatgccagctctaataaaatgcgattaagaaaataagggagggctgggcatgatggctcakccactttgggtggctgaagcaggaggattgctcgaggccaggattttgagaccagcctgggcaacacagtgcgaccctgtctctaaaaaaaaaattagccaggtgtggcacgcgcctgtagtccttcctagctactcaggaggctgaggcgggagga

SEQ ID NO: 733075 - DNA, 588 bp, Homo sapiens
ctagctttcactattcttttaagaaattcccttttttgggccggcgcggtggctcacgcctgtaatcccagcactttggaaggccgaggcgggcggatcacgaggtcaggaaatcgataccatcctggctaacatggtgaaaccccgtctctaataaaatacaaaaaaaaaaattagccaggcgtggtggcgggcgcctgtagtcccagctaagtagtcccagctactcaggaggcggaggcaggagaatggtgtgaacctggccggtggagcttgcagtgagccgagattgtgccactgcactccagcctgggcaacagagcgagactgcctctcaaaaaaaaaaaaaaaaaaaaawaaataaataaataaattcccttttgcttaactagagttggcttggattatttataataaaaatggaaaaatacagagaagcaaaattagataatggaagtatccataatatattttgtagccttgttttcattattattttccgtgattaataaataatatatgttgcagaaaataaattttaatggttacctagcatatatttacatggatgtactgtatagtacacta

SEQ ID NO: 733076 - DNA, 649 bp, Homo sapiens
ccaagtttactacactagcaaccaaaattgctttagaattccctgacagccagaaactccagatgatcccaaactagggagaacataattctctaaaagagacttattaattaagggtaaaatattgctgtgaattttctgtaaatgttattcgttatctccccaatgatcctcccaaggtagtaagatttctttttgtctgatagtcactaaataaaggccataaaatgacaaagtaatctaaaacataaaaatgtgttattattagtatatttaaaattacacttattattattagctaatcctcactgaargctttcaatatgccagttactgttttctatgaattgattcagtgaatcctcaaagtctccttatgatataggtattacagttatccctattatacagatgaggaaactgagacatagacatatcaagtaatatgcccaaagtcacaattcagtacaaagagaaactggcacatttatttctcagttgtttccttatcataaaacagaaaatatcattgaaatttgtacaatttaaagtaatgcctacatttactgtgccattttttgctgttactgaaaccaacagagctggtgctataatgggggatctgttatgttgagatgtggatcagaat

SEQ ID NO: 733077 - DNA, 480 bp, Homo sapiens
ttatatagttataagtcactacaattttgtttcaatggagttatcaaggacctattcctgatgccaatgctagattaaacaaggagtgaatgtatcattaatgcatgcatgtataagagcaatgatatagtcttcagtagtctgttttccttctacgctgctgggttcatgaaaaccaatgagaatttctttgaccaaggaaaatgtgtaacaaatgtgattccatactcaataccaacagatatgctggatacttatttaagtttctaacaatggcaggatttttcacatcatggacacacttctactgcaycctttctgaacatatttgaaaacttcattaaaggatatactgagtgaacaaataacccaactaagaaatcaaataatcccattaaaaagtgggcaaatgacatgaacagacatttctcaaaagaagacatgcaaatggccaaaaggtatatgaaaaaatgttcaaca

SEQ ID NO: 733078 - DNA, 542 bp, Homo sapiens
gcagaaaaaaagaaataaccaaagtcagagctgaactgaatgaaattgagacacaaggtcgggtgcagtggctcacgcctgtaatcccagcactttgggaggctgaggtgggtggatcacgaggtcaggggtttgagaacagcctgaccaacatggtgaaaccccgtctctactaaaaatacaaaaactagctgagtgtgttggtgggcgcctgtaatcccagctactcaggaggctgagaaaggagaattgcttgaatccgggaggtggaggttgcagtgagccaagatcacactactgcactccagcctgggtgacagagtgagactccatcmcaaaaaaaaaaaaaaaaaaaaaagaaattgagacacaaaaaaccatacaaaagatcaacaaaaccaaaagttggtctttgaaagaataagatcgataaactgctaggtagactaataaagaaaaaaggagagaagatccaaataaacacaatcagaaatgataaagaagacatttaccactggccccagagaaagacaaaataaccc

SEQ ID NO: 733079 - DNA, 560 bp, Homo sapiens
ggctgctttcacagtctggcgtcgagtgtctgcagcttttccaggtggatggtgcaagctgtcagtggatctaccattctggggtctggaggacagtggccctcttcccacagctctactaggtggtacaccagtagggacactgtgttggggctccaaccccacatttcccttgtgcaccaccctagcaggggttctccatgaggactcygcccctgcacaaacttctgcctgggcatccaggcatttccatgtatcctctcaaatctaggtggcagttcccaaaccccagttcttgacttctgtgcactcgcaggctcaacaccatgtggaagctgccaaggcttggggcttgcactctctgaagccacagcctgagctgtatcttggccctttttaatcatggctggagaggctgggatgcagagcaccaagtccctagactgcacacagcagagggaccctgggtctttcccacaaaaccatttttccttcctacgtctccaaacctgtgagatgactggtgctgcaaaggtctctgacatgccctagagacattt

SEQ ID NO: 733080 - DNA, 615 bp, Homo sapiens
tatcttggccctttttaatcatggctggagaggctgggatgcagagcaccaagtccctagactgcacacagcagagggaccctgggtctttcccacaaaaccatttttccttcctacgtctccaaacctgtgagatgactggtgctgcaaaggtctctgacatgccctagagacattttccccattgttttggtggttaacatttggctcctcattacttgtgtaaatttctgcagctggcttgaatttcttctaagaaaataggattttctattgtcaggctgcaaattttccaaacttttatgcatttcccttttaaaactgaatgcttttaacagcacccaagtcaccccttgaatgctttgctgcttaraaatttcttctgccagatattgtaaataatctctctcaagttcaaagttccacaaatctctagggcaggggtaaaatgctaccagtctctttgctaaaacataacaagagtcacctttcctccagttcccaactagttcctcatctccatctcagaccaccttggactggatttcattgtctatataattatcatcattttgttcaaagtcattcaaaagtctctaggaagttccaaacttt

SEQ ID NO: 733081 - DNA, 607 bp, Homo sapiens
tctcttatctctctgtgcccctattcaatcacaatgcctgcactaccccctctcagaactaaccactggcatgaatggacagttatcattcttctcacacagttctttatatcatgactagattatccctaaacaatacagagcactattttacatgctttaaacttaacataaaaatgataaaagaataaaaatgatacattactggagatctggacatgatattcagtaatttgtggattttttttttttttttttgagacagagtctcgctctgttgccgtctggaatgcagtggtgtgatctcgactcactgcaacctccgcctcccgggttcaagcgattctcctgcctcagcctctccagtagctgggattacaggcacatgctgccacacacagctaattttttttttttcaatttttagtagagaccatgttggccaggatgttctccatctcctgacctcrtgatctgcccacctcgccctcccaaagtgctggaattgcaggagtgagccacctcgcctggccaatttgtggaatttttgcatacacttttgttttacgtaattgcataaattatatttatgaaccccatcataaat

SEQ ID NO: 733082 - DNA, 585 bp, Homo sapiens
tgcacccatatgttcactgcagcactactgacaacagcaaagacatagaatcaactcaagggcccatcaacaacggattgtatttatttatttatttatttaatttttttttagatggagtctcgctcttgtcgcccaggctggagtgcaatggcacgatctcggcgcactgcaacctccacctccctgggttcaatcaattctcctgcctcagcctctcgagtagctaggattacaggcatgcaccaccatgcccagctaatttttgtatttttagtagagacggggtttcactatgttagccaggctggtctcaaactgctgacctcaagtgatccacccrccttggccccccaaagtgctaggattacaggcatgagccaccgtgcccggccccagattggattttttaaatgtggttaacatataccacagaatactacacagctataaaaaaagaacaaaatcatgtcctctgcagcaccatggatggagctggaggccatcatcctaaacgaactaacacagatatagaaaaccagataccacatgttctcatttataagtgcaagctaaacatcagaa

SEQ ID NO: 733083 - DNA, 668 bp, Homo sapiens
tcatactttggtcaccagggtttggatccagctcgagtcaacgtccctgtcattggtggccatgctgggaagaccatcatccccctgatctctcaggtacacgcatatgaccttgtgaggggcttcgaggtcaggattccctttaccagggcctgctttgaggtgatcccggtagactggagaaggcctggccaygtgccaggttttggaagggctcctgttgtaggcagccccgcccctctgctgcagggcggtgtcagtcctggagcgaatgtgggtggaagctgctcagggcccagctccagcacgcaaggagaaccactgttgggaacctcaccgggttactggttaggccggagcgggcgaggtgcttttttcaaaaatgagtccagggctggacacagtggctcatacctgtaatcccagcatttgggaggccaaagcgggaggattgcttgagcctgggaggttgaggctgcagcgagctatgatgcaccactgaagcctgggcgacagagccagaccctggcctcaaaaaacaaatgagtaggggactcaccacacttcccaacagagttgatttcacttcgtcttttttttttttatctttttattattatttttttgctgctccttgtggagcagggctaccccataggcagtgtgcc

SEQ ID NO: 733084 - DNA, 495 bp, Homo sapiens
tgcaatggcgcgatctcggctacctgcaaccttcgcctcccaggttcaagtgattctcctgcctcagcctccctagtagctgggatgacaggcgcccaccaccacgcccagctaattttttgtatttttagtagagacagggtttcacaatgctggcaaggctggtctcgaactcctgacctcaggcgatccacccaccttggcctcccaaagtgctgggattacaggcatgagccaccgtgcccagctcagtatcagatttttacagaaggactggctagaaaaagaacaatgaaacaagcaaaaggtgttacgttgtgmttaactgcttcctgagaaaaaagagcttatcagaatgactactaagatgtcttgttgtagaaactgaattgattgccctgaagggagtattaagggattaataaaaattaaaaaaataaaaataactgaattgagaaacccaaaaaatgggcactccagcccattttaataata

SEQ ID NO: 733085 - DNA, 495 bp, Homo sapiens
tgcaatggcgcgatctcggctacctgcaaccttcgcctcccaggttcaagtgattctcctgcctcagcctccctagtagctgggatgacaggcgcccaccaccacgcccagctaattttttgtatttttagtagagacagggtttcacaatgctggcaaggctggtctcgaactcctgacctcaggcgatccacccaccttggcctcccaaagtgctgggattacaggcatgagccaccgtgcccagctcagtatcagatttttacagaaggactggctagaaaaagaacaatgaaacaagcaaaaggtgttacgttgtgcttaastgcttcctgagaaaaaagagcttatcagaatgactactaagatgtcttgttgtagaaactgaattgattgccctgaagggagtattaagggattaataaaaattaaaaaaataaaaataactgaattgagaaacccaaaaaatgggcactccagcccattttaataata

SEQ ID NO: 733086 - DNA, 586 bp, Homo sapiens
atttctctagctgtgtagaattttagagctgaggatgatccttggtgaccagctccatattgctttgtggagaagaaacctgagtcctgggaggtcaagtaacccgttcagactcccacaaccagagcctgcggcatctgtactgcccagtcagtacagagctccggtaactaggtgcacttcagttatctagagtaggcgctaataacttatttcttgtcagaggccaggtaataaatattttttaggctttgcatgccaagaagtaaaatctaggatgttatatataaygagaggcaacaagtttccatgttttttgttgatgaaattcaaataaggctggttgcggtggttcacacctgtaatcccagcactttgggaggccaaggcgggagaattgcttgagcccaggtgtttgagaccagcctgggcaacttagccagaccctgtctctataatttgaaatatatatttttaaaagaaattcgagtaataactaataacagttgagtgcaagtttttaatacaggtttgttaataagaagaatggaatgatttttgtagggataacaattttgggccaggt

SEQ ID NO: 733087 - DNA, 492 bp, Homo sapiens
agtttttgggtattctgcctactttaccacaacttccttcttgcaacactgttttatttttttctataccaaggtaaatttttgttctgctcctacctctctgcacccattttaacaaggcctttgcttgcccatttttctctacttttctgttgaatgttgggatcttctaggctcagtctgggctctcctttccttttcattctgtagtcttctccagaccaactaaattgatgaatggcattaggccaaaacctgtcattcatgccagtgacccatgattatatctccagtccagttctctcctgacattcaraggaatatattctttatcttctagatattgtcacagatgttcagaagcacatcaaattcagctaagtccaaagctacacaatactacacccctaccttccttgtgtgttccattcttaaagaaagggacaggcatccatccgtttacaaaatcagaaaccgagaagtcattctgaa

SEQ ID NO: 733088 - DNA, 551 bp, Homo sapiens
atccattctccaacatggataggacaagcaccggatgtggagatgacaccatgaagagtacagcttgaccatgttaagtctgtcaagtcttactcgcatccccactgaagaggaaaaggctaggagaataaaattgagtttaaaaagtaatcctggctgggcgtgatggctcacacctgtaatcccagcactttgggaggccaaggtgggtgaattacctgaggtgaggagtttgagaccagactgcaacatggtgaaaccccgtctctactaaaaatacaaaaattagctgggcgtggtagtgcatgcctgtagtcctagctactctggaagctgaggcagaagaatcacttgaacccaggaggcagaggttgcagtgagawtatgccactgcactccagcctgggcgacagagcaagactctatcaaaaaaaaaaaaaaaaaaaaagaaggataggaaccatataaatgaacctgatagcaggccttggtttgtccatggcttgctttatttatttatttatttatttacttacttacttatttattta

SEQ ID NO: 733089 - DNA, 551 bp, Homo sapiens
atccattctccaacatggataggacaagcaccggatgtggagatgacaccatgaagagtacagcttgaccatgttaagtctgtcaagtcttactcgcatccccactgaagaggaaaaggctaggagaataaaattgagtttaaaaagtaatcctggctgggcgtgatggctcacacctgtaatcccagcactttgggaggccaaggtgggtgaattacctgaggtgaggagtttgagaccagactgcaacatggtgaaaccccgtctctactaaaaatacaaaaattagctgggcgtggtagtgcatgcctgtagtcctagctactctggaagctgaggcagaagaatcacttgaacccaggaggcagaggttgcagtgagaayatgccactgcactccagcctgggcgacagagcaagactctatcaaaaaaaaaaaaaaaaaaaaagaaggataggaaccatataaatgaacctgatagcaggccttggtttgtccatggcttgctttatttatttatttatttatttacttacttacttatttattta

SEQ ID NO: 733090 - DNA, 584 bp, Homo sapiens
taggacagggcaggatctatgcatggaggctaaagggctccaaggagcatgtcactaaagagccgccaacgtaggcatttcactctaccatctcactctaacactggcacattttagggccagagttctaagaatatctacattcacttgtgctgaccctcctccctcaaagactccaccccttttctatgtgagatctggcggcagaggtcaggctgtgtagtcaggaattgctgtgcaggcttcagttgggagggtgtttgggaaagttaagggttgacaactggaaaatgsaagtctggtttctctaaataaactattcagaggtgaaattataatctttaaaaccttaactctttcagttcattagacaaatttgcaatctaaagctgagggtttcatttagatatatctgtttgtacactgacaatgctgcatgaattttcagatgactaatcacttgttccagattgaaacactgtgtgattagctgtatagcctttagaacaagttaaacagtttgttagcaacacaacttttttttaagccatatatttagaatgttttaaaaattaggcatgtta

SEQ ID NO: 733091 - DNA, 531 bp, Homo sapiens
tcctttttcacgatccaattatcaagcctgctctttttcacctctttcactgctactctccacaccaccatcacatcctgcttggattattgcaactctagagtctatttgactcagagcaaatggagtgatattatttaaatttcaagtttaaaaaatatgttgctacccttcttaaagtcctcctgtggctaccactgctatttgaatgaaatctgatgctacctccctccrtaagaccctacatgatttgtccagttattgtctctctctctccccaaacttctctcatatgtactctcccttcaagtcactctctctagtaagatggtctcctttctgtcccttaaactcaccaatcttattctggctttagaacttctgcagtagctatttcttcgttaaactgaatcttttcatcatttagaaaccattcataaactacttcctcagagaggcctttcctgaccatcatatgtaaagtatagctcttccccataatcagtaacggcctatcccattttactttcc

SEQ ID NO: 733092 - DNA, 531 bp, Homo sapiens
tcctttttcacgatccaattatcaagcctgctctttttcacctctttcactgctactctccacaccaccatcacatcctgcttggattattgcaactctagagtctatttgactcagagcaaatggagtgatattatttaaatttcaagtttaaaaaatatgttgctacccttcttaaagtcctcctgtggctaccactgctatttgaatgaaatctgatgctacctccctccataagaccctacatgatttgtccagttattgtctctctctctccccaaacttytctcatatgtactctcccttcaagtcactctctctagtaagatggtctcctttctgtcccttaaactcaccaatcttattctggctttagaacttctgcagtagctatttcttcgttaaactgaatcttttcatcatttagaaaccattcataaactacttcctcagagaggcctttcctgaccatcatatgtaaagtatagctcttccccataatcagtaacggcctatcccattttactttcc

SEQ ID NO: 733093 - DNA, 531 bp, Homo sapiens
tcctttttcacgatccaattatcaagcctgctctttttcacctctttcactgctactctccacaccaccatcacatcctgcttggattattgcaactctagagtctatttgactcagagcaaatggagtgatattatttaaatttcaagtttaaaaaatatgttgctacccttcttaaagtcctcctgtggctaccactgctatttgaatgaaatctgatgctacctccctccataagaccctacatgatttgtccagttattgtctctctctctccccaaacttctctcatatgtactctcccttcaagtcactctctctagtaagatggtctcctttctgtcccttaaactyaccaatcttattctggctttagaacttctgcagtagctatttcttcgttaaactgaatcttttcatcatttagaaaccattcataaactacttcctcagagaggcctttcctgaccatcatatgtaaagtatagctcttccccataatcagtaacggcctatcccattttactttcc

SEQ ID NO: 733094 - DNA, 636 bp, Homo sapiens
aaaccagaactcttttcctgagcaggctctacagatattaaacagaatatgtatctgtgggtgttgattcaccactagtaatgtgacacatatacatacatatatatatatatatatatatatatatatatatatatatatatatatttttttttttttttttttttttttttttttttttgagacagagtctcgctctgtcgcccaggctggagtgcagtggcgcgatctcaaaactctgcctcccgggttcacaccattctcctgcctcagcctcccgagtagctgggactacaggcgcccaccaccatgcctggctaattttttgtatttttattagagacagggkttcaccatgttagctaggatggtctcggtctcctgacctcgtgatccgccctcctcggcctcccaaaatgctgggattacaggcgtgagccactgtgcctggcccgtgacctatattattttttaaaggccagaatatgccacaggagtgtttgcagcaacacctgtgttgtttctatagatcaccttgaatttctgcacaaaaaggacacacttccagaattgtatactgcttcactttgcaaatacagaattattctctacttgctagtatcaatccacttattt

SEQ ID NO: 733095 - DNA, 611 bp, Homo sapiens
actaaaggtttttgcacttggactccttctctgcccactcccctggagttggtgtcacctttccctagttggataggcacaagctgatcctggccagtggagcccagagtaaggaggacgctcagggaccatctggcatgacgcttcagtcccactgccctccattcctgatggccttaccccattcacagatcagttcattttgcttcagacattttctttctcacaaatcaatacacatcttcttcactccatttccgcttttaatccagcagtccttgtcaagataatcaagataacccttgcctatcatctatgcaaaattcttaatctaattccctaaactcttcaacttaaagtcagttttaagcattactattgaagctatacattttaaaaattaataaataatttgaacatttctgaaaaaattmtaaagaattctagattttagaattttaagttctagagaaaaaaatttatatataatatgtaaacatatatataatccacatgtaaaacaagacatttttaaattattttacttaatcatttatgttacaccaatactgtgctttatgagttttcattatttcagtcatttattggtt

SEQ ID NO: 733096 - DNA, 658 bp, Homo sapiens
gtaccactgcactctagcctgggtgatagaatgaaaccttgtctctaaaaaacaaaacaaaaacaagcaaaaacgcagatggctgagcccactccagagtctcggattcagtgggtctgaggtgaagcctgagaatttgcatttctaacatgtttccaggttactctgaaaccctccctatacactttataaaattagtcagggaagaaatgaagataaaccaagcttacagcacattcagcgttcatcataaaggcagtttgctctctgacctgcttcttcatagctgtttcctgtcataagattatagttccccctaactgctctatagataacaacttaagctttgtgaaatgttaagttttccctctgagatactctttcaggtcctgcrtaccagtgaaactactgacatcagctggtctgaaggactccacaaggagccgactcaccaaagaatgaattttccacagcctgatgatattattcccgctttccttgaccaatcaacaaccccaattctccagccccttgcctttcatgattcccttaaaatctcaagcccagaactccttggggagatggatttgagggttcttcctgtctcctcactcggcttctctgcactcattaaactctttctctgctgcaaactctg

SEQ ID NO: 733097 - DNA, 604 bp, Homo sapiens
caaaaaaaaaaaacctaagagtacatctaaccaaggaggtgaaaggtgaattataaacactgctgaaatagatcatagatgacacaaacaaaggaaaaatattccatgctcatggattaggagactcaaaatcattaaaatagtcatactgttcaaagcattttatagattcaacactattcttatcaaagtaccaacatcatttttcacagaactagaaaaaacarttctaaaataattcatatggaaccaaaaaaagagccctaatagccaaagcaatcctgagcaaaaagaagaaagccagaaaaatcacattacctgacttcaaactttactatggggctacagtaaccaaaacagcatggtactagtacagaaagagacacacaggccaatggaacagaatagagaactcagaaataaagccacacacctacagccgtctgattttcgacaaagtcatcaggaataagcaataggaaaaggactccctattcaataaattgtgctggatagctggatagccatatacagaagaatgaaactggacccctacctttatatataaaatatatatatatatttatacatacatatttatata

SEQ ID NO: 733098 - DNA, 600 bp, Homo sapiens
ccttagtcagccccagtgtgcgggggccttttgcctttactaagagcaaacccagacctggtgcactgactcacacctgtaatctctgcactttgaggggctgaggtgggaggatcacttgaggtcaggaattcaagaccagagtggggaacatagcaagaacctgtttctcaaaaatcagccaggtctagtggcctgtgcctgtggttcgagttactcagaaggctgaggtgaaaggattgcctgaggccaggagtttgaaacgaatctgggcaatatagcaagaccccgctctacmattttttttttaattagctggatgcagtggctcacacctgaaatcccagcagtttgagatgtgaaggtgggaagatctcttgaggctaggagttcaggcccagcctgggcaacatagcaagattccatctctacaaaaatcttttttaaaaaattagccaggcacggtgatgtgtacctgtagtctcagttactcaggaggctgaggtgggaggatcatttgagccccaggagtttgaggctgcagtgggtcatgattgcaccactgcactccagcctgggccacagagcaagaccccatct

SEQ ID NO: 733099 - DNA, 630 bp, Homo sapiens
gtttgtgtttctctaggggactcccagttgttgagttgaatatgatggagcatcagattttacctaatacagcagaactcctaaaaagttacagccatatgcaggacagcagtactcagcatggtcttatgcacaggaactaaaggaaaaagagatcgagtcacaaaaattcaggaagagggggtaaatgtggattgtatggaatgaaaaataaacattctcaaggatgtgtgactctgtgtctgtgtgtgtgtgtgtgtctttgtgtttgtgtgtgtgtgtgtstgtgtgtgtatgtttatccactttattcgggtgtcataatgaattgatcaatccacgtgctttattctcttcatggaaataaccagtctgcgttggagctgggcctctaaagttgtagagtgaatgggtgtgggatgtgttgggattcttcctacaggacagagtgggagaggtaaaagcaaaagacagcttagttggaggctgacttcgtcctatggaagcagagatagttcaaggaatggggttactgggtttccagggcccagtttgctgggacctccaaaatccttcattttgggtatcatcatacacagtagctaagcacaggatgatggaaatcttaaa

SEQ ID NO: 733100 - DNA, 654 bp, Homo sapiens
agggtttaaaatgactccaacctttttctgtttctccaattaaaataactttttaaggtttaatcttcagtaattttttgtagtaatatttttgaaggtatttgaccaggatgatttgcttatatacctacctgacgtctccctttcttctgaatacatattttattacccacctattagatctaagtttaagaagttggaatagggatttaaatctaaattctacatttgaatttacaggcgtcagtgagtccrggaagtgcctttatgcacagaccaatatctggcaatggcactaggggacaaataagctttaccagtctcaaagccctggctactacagtgaatccacccttctcctggatcttatctacttcagcaaaagaaggccacccactaaaccaggcccttgtactttgggtggaaactcctaagtcctctagtctcctcaaacagacagccaggctgccaatttccacaataataatttctatagcactgagtctttggtagccttgtaactatagctactgatgctacagtctggtccctgtatgataaaacaccagagcaacagaaacaaaaatattgactgaagccttctaaaatctctctaaatataccttcaataaatatggttttttttttacagaa

SEQ ID NO: 733101 - DNA, 699 bp, Homo sapiens
tactccaagtgtccaccatcacacctggctcctttttcttgttttttttttctgtttgtttgtttgtttgtttgtttttgtgaaaatggagtctcactatgttgtccaacctggtcttgaactcctcctggcttcaagtgatcttcctgtctcagcctcccaaagcactggaccyggcccctttcccaactgtgtctgcccacctgcaatgacaccaaatggtctaagcccaacaaatgaggtatctctccatccaaatgcttttattggctgggggaacaataaccaccataactggccaaactaacctctgagcaagaggatgtgatcttgaaataagccaatggaaaaatccctattttgcaggagctgtaaaaccaagtcatacaaggtctttggatggttagtcaagtcaagcattggttgtatgtcctgtaatcaacagacgtgtaacttccccttaactagggatagacacaaaggtagacagagagatagacatcaactaaaggaatctagaagaagttaacccaaggagacccaggaagccagataagggaagccctgccttcactgcatatgatgttgtccctgtaggcctagaaggtggccatcattattgctttctgtctcacttcttgcagactgggatccatctactcatcccagcctgtgagggggttattggaaagcaaattc

SEQ ID NO: 733102 - DNA, 624 bp, Homo sapiens
acaggaaaaacccgtccccatgattcaattacctcctgctgggtccctcccaggacatgtgggaattatagaagctacaatgcaagatgagatttgggtggggacacggccaaaccatatcaagaggcaagcgccctgccccaccatctctcacccttttccttgccacacaggggatcttggaggagtcccttagattccctgacagtttcaagtataaaagccrttgatctaacccctccctgtagtcccttccacagcatggtccacgattctgtctaaagcaccatgtaaacttccaagattcaaaaccatccaaaatcaaatccctcttttagaattgttttttcataccagctgagaccaatcgacctggaaaaaattaaatattatcagacatttcctccatgtattcacaggagagcctaaagtacagcagaaggttgctggaatgaactggcgctttctgtggtctatcctgggagttttaaaacacaaaaacagagtgtcagcttctgggagatgtacaacatgagggactgtcactccagtgacggagtactcctgggaacagtgctgcttcaaaaggcatcaggcaggtaatgatattgtgagttatttgtt

SEQ ID NO: 733103 - DNA, 624 bp, Homo sapiens
acaggaaaaacccgtccccatgattcaattacctcctgctgggtccctcccaggacatgtgggaattatagaagctacaatgcaagatgagatttgggtggggacacggccaaaccatatcaagaggcaagcgccctgccccaccatctctcacccttttccttgccacacaggggatcttggaggagtcccttagattccctgacagtttcaagtataaaagccgttgatctaacccctccctgtagtcccttccacagcatggtccacgattctstctaaagcaccatgtaaacttccaagattcaaaaccatccaaaatcaaatccctcttttagaattgttttttcataccagctgagaccaatcgacctggaaaaaattaaatattatcagacatttcctccatgtattcacaggagagcctaaagtacagcagaaggttgctggaatgaactggcgctttctgtggtctatcctgggagttttaaaacacaaaaacagagtgtcagcttctgggagatgtacaacatgagggactgtcactccagtgacggagtactcctgggaacagtgctgcttcaaaaggcatcaggcaggtaatgatattgtgagttatttgtt

SEQ ID NO: 733104 - DNA, 493 bp, Homo sapiens
atagaaaaccctttagaagtattttaacaaagaaatagcaaatggattaatttaacttacaattgaagtctgtcttaatagagccttatcaccagcgtaagaaataacttctgggcgggcgtaagtacacagtataaataaggtaaacttgtctggtgaaatagtcccttcttttgtcatttgtctgttccccttccccagccaaagggcctcacttgacagaatatttcttcttcataaaatcagtcactcatttagaattctgcagtgctgtatatagaaaagtaatgttttaaaactttttcatagttttttatattgggaatartatttctaattaacaaaatgttttaccgtattcattcattcttactgtaaactttatttataggcacacactactcacccaaattcagcagttcacggcatcactagatatcatttgcctgtatataattatcaggtaatttaagagggagtaaaatgatttact

SEQ ID NO: 733105 - DNA, 619 bp, Homo sapiens
atttataaagaaaagaggtttaattggctcatggttctgcaggctgtacaggaagcacggctggggaggcctcaggaaacttgcaatcatggtggaaggcaaaggggaagcaggcatgtcttacatggcagcaggaggaagagaaaagggggaggtgccacacacatttaaacaaccagatgtcatgagaactcactatcacaagaacagcaagggagaaatytgaccccatgatccaatcacctcccactaggcccttcttccaatattggggatgacaatgcaacaggagatttgcatggggacacaaatccaaaccatatcacaagccatggaatttatctggcgaaagagcactccagtcagagaaaatagcaagtgcaaaatccctgaggcatggcatgtttaaggaatagtaaagacagccgtatgcacagggcagagcaagtggtggcaggttgggaggagaagaggttagaggtcagattatgtagggccctcggatcattgtaagaacttcaacttttactctaaatgagatgggaaactgggagaggatttcaagcaaagtagttacatgatcttacctacattttaacaatattacacaggctgatgt

SEQ ID NO: 733106 - DNA, 630 bp, Homo sapiens
ttatgtctattttttaggggcatttcaagttaaaagcaagtagcaaatattttgagcactcattatgtgcaagatgctgcactggtttcagtgagaaacacaaagcataaaattgtgtttcctccttcctatatttttcatttagttttgaactaattgaaataaacattccattgattttacccaaataagtcattttcatcaaaaagtattattaaaatccaaatttaagtgtatgtgttagagcaagaaaatagaaattgcttcgtctttaatagctttgagacatgggggcaggcaaagatttcttagataggacccagaaaactttagccagaaaagaaaagaataataaatcagactttatcaaaatttaaaacttttgcctatcaaaagcactatyaagaaaatgggtgaaaatatttgcaaaacacatacctgaccacaggttgaaactacaaagcattcccataattcaataaaacagacaaacaatccagtaaaaagtaggcaaaatattttaacagagacttcaaaaacgaatatacaaatggccagtgataacctgcaaaaggactcaacattgttaatcatcagggaaatgcaaatgaataccacaataagatgact

SEQ ID NO: 733107 - DNA, 614 bp, Homo sapiens
ggagtttcttataaaagtaagcatatatttagcctatgacccagccatctcacttttacattatttccctaagcgaaataaaaatgtaagcccacaaaaaatttgcacaagaatgttcatagcagctttataacaatagcctgacagtagaaataacccagaagtcctttagtaggagaatggataaactgtgtaatattcatatcatgaaatactatttctcaataaaaagattgaaatattgataatgcaacataaataaatatcaaaacatgttgagtgaaagaaaacttacaaaaaagaacatgtatttattttctcatttacagtaagttctagagcttaagcctagtctataayggaaacaaataaggacagcagttgcctctgtgacagtggtagaggggattgactgggaaggagcatgagagaactttctggaatgatagtagtattctatattttgatagtggtttgggttctgcaggtatatgtgtgtcaaaaatcagggagtatgcacttaaaatatgtttttcattgtacatagaatttatcttgaaattaaaagactataaacaaatttgaattctagctaaaagatattcatgctgaag

SEQ ID NO: 733108 - DNA, 470 bp, Homo sapiens
ctggggctattctgttgcacaaaatcctccaggctctagagtccctctatctttgcttcactgtttgaagcctctatttccaagttacctcacagtctaaaaggctgctccaactccagccatcacatctgcttcccagacagcctgaaagagtacaggaggaaggagaaaaggacaaaggctcacgcaggctctctcttraggagattatttgcggcagctgcccaacacttgtatttacatctcactgatgagaactaagtgatgtagccacagttagctgcaggcagtccaggaaatgtattttttttttaaattttgggcagccaggtacccagctgagtcaagttttcaagcattctctcacaatgggagaaggaggggatgaatattggggtactcctgggagtctcggccagattagcaggatccccccacgttgcttccctttattttcttttaggcccccc

SEQ ID NO: 733109 - DNA, 470 bp, Homo sapiens
ctggggctattctgttgcacaaaatcctccaggctctagagtccctctatctttgcttcactgtttgaagcctctatttccaagttacctcacagtctaaaaggctgctccaactccagccatcacatctgcttcccagacagcctgaaagagtacaggaggaaggagaaaaggacaaaggctcacgcaggctctctcttgaggagattatttgcggcagctgcccaacacttgtatttacatctcactgatgagaactaagtgatgtagccacagttagctgcaggcagtccaggaaatgtatttttttttwaaattttgggcagccaggtacccagctgagtcaagttttcaagcattctctcacaatgggagaaggaggggatgaatattggggtactcctgggagtctcggccagattagcaggatccccccacgttgcttccctttattttcttttaggcccccc

SEQ ID NO: 733110 - DNA, 625 bp, Homo sapiens
ggatctcccaaggttggaggggcaccatcatcacccagtaacccaacctagaaaccttggtcattcttgatttctccctgtcctccacctgtttgctctcaaggggtgggaacggttggctctggaatggcctttgattacctcttccctctgtctcccagacctccagaggcccttgatggctctcccagtgtcctctctcctccaggaacgggctacctgtgcaggctgatggccaccgtgtccaccagtccccagatggcacgctgctcatttacaacktgcgggccagggatgagggctcctacacgtgcagtgcctaccaggggagccaggcagtcagccgcagcaccgaggtgaaggtggtctcaccaggtaggaaaggtctatatccggggatgggaaggacattccccagtagatttactggttctcaagggctggctctgcagtctgagggactctggtttgaatcctggctcaccctgccagttgctggtagtgtgacttggggcaaggggcttaccttcctgagcctcattttcctcccgtctacagtggggctgctccaccacctgagagggctgtagtggagatgaaggaaatgatgctctgctgggcccct

SEQ ID NO: 733111 - DNA, 627 bp, Homo sapiens
ctcctgacctcaagtgatccgcctgcctcgtcttcccagagtgttacagacatgagccaccacactcggcctctatattcttaattcatttcagtttttcagagattttttttttgagacagagtctcactgtcacccaggccggagtgcagtggcacgatctcggctcactacaacctccacctcctggattcaagcgattttcctgcctcagcctcccgagcagctaggactataggcgcacaccatcacacctggctaatttttgtatttttagtagagacaggttttttttttggggggggkggttaatacttttaattacatgattgtaattatacaatttccactcttcaatattttgtataaaaccagttacaactcacaagattttcaaatgagacaggattttaccaggctggccaggctggtcttgaactcctgacctcgtgagctgcccaccttagcctcccaaagtgctgggattacaggcgtgagccactgtgcccagtttttcagagttttaatcacaaataatgatattttacattatgactccatatataactgtattcatacaacactacttaccctgactatatacaacatgaattagaacttcctaat

SEQ ID NO: 733112 - DNA, 618 bp, Homo sapiens
agcactttgaacatgagaagttaagtgcttgatcatacttctcacatcctcataactcccctgtgaaatatatgatgttttttcatattcacgttaaagaaactgggatttacaatgatgaaacattggacaaattaaggtctcaggacaggaggtcacggagtgatgagccctgaattactctaggtgggtttaactccaaagcccatgcccttacccaggggaacacactgcttcttgagatctcattcaccatgttaatgaccaccccacagycccaccacctaacgctaggcatgctccatttgtgaatgagtgaatagatgactaatactttatatgcttatggtcatttacaattcacaaaacttgttgacagccatacttgatttccatatgatttccccaacatctctgaggcagctccataggaaatgttatctccatttcacagaggctgagagagttcagagtcctccagaagctcacattgctatttagtaacaggcatagacaggacttcagcctgtgtgttctgccttcaagttctgccagcctttcttcaaaaccttctgtgagtttaaaactcatcaacaatcagcaaaggcttaaagagtt

SEQ ID NO: 733113 - DNA, 550 bp, Homo sapiens
cagcaaaatatcgaacaggatgacctccaagtttccttccttctctaatgtcctctggttctctgttggccagtaggatttaaattttatttaaattatctcatattctgatggattcttgagccccttttcagttttagataatctccctgtggtttgctgaattggcrtatctggagtctaggatctctgttggcaaagaactgaatattgctcccatccaacagcttagctagcactgtctattttctttctgaaagagatctgggtaggagacaggtgcagagcatctttccacctcccacagaagggctagggaaagctttgttgtgcatgaaccatgaacaaaaggataattcaaaccagcaataatgtccttaataaaaaataataatcattttcccaaatgaaaatctacaattctaaccatttgatcacagtgatgtaagcaaacaagcctgcagctaaaggttatatatgggtcaaagatttaatggaaagtgatacatgggtggaatgacatcacctatttgtcagaatactaactcct

SEQ ID NO: 733114 - DNA, 606 bp, Homo sapiens
ctatacattgttcctttttaaaagtttgtttggttttaatgaattggttccctcaactgaagtttaatagccatttaaaggaagacaatttatcctaatgtttctgtatttttctaaactttctcatcctctctggcccaagccttaccatagtttttcaaataattggtgatcaaaaatgctgaactgtcacctgtttgcctatatactcttttccatttgtgagttcttcagtgtaatattccagagattgtgtttattcagatacattcatcttccaatcaatcaagataatgccagcttctgttgtgggttttgcagaaaggatttcctagactcctgaattcattttttctctctgtagtgtgagcatttttctgttttaaattattttctgaaaaaatgtgagtatttacrtactcgaaattttaactagaattgcttcccttctaaaaatgttagtttctcagaccaaatgcatcaatctgactccctcagaagtcaggcgcttcacaaagagggaatacttcaccttaggtggccaagaaaaaaaacatactggcccatataccaggaaaaatagtagaatgggtcagtgcaactcag

SEQ ID NO: 733115 - DNA, 614 bp, Homo sapiens
aattggttccctcaactgaagtttaatagccatttaaaggaagacaatttatcctaatgtttctgtatttttctaaactttctcatcctctctggcccaagccttaccatagtttttcaaataattggtgatcaaaaatgctgaactgtcacctgtttgcctatatactcttttccatttgtgagttcttcagtgtaatattccagagattgtgtttattcagatacattcatcttccaatcaatcaagataatgccagcttctgttgtgggttttgcagaaaggatttcctagactcctgaattcattttttctctctgtagtgtgagcatttttctgttttaaattattttctgaaaaaatgtgagtatttacgtactcgaaattttaactagaattgcttcccttctaaaaatgttagtttctcagaccaaatgcatcaatctgactccctcagaagtcaggcgsttcacaaagagggaatacttcaccttaggtggccaagaaaaaaaacatactggcccatataccaggaaaaatagtagaatgggtcagtgcaactcagccccacttcggtaaagttcttcagagcaggaaaggatgaaggaaagaag

SEQ ID NO: 733116 - DNA, 597 bp, Homo sapiens
tagatatgttttggatagcaagccatctaacattttcttgggctccagggatgatcctatcctggcctcccaagtagctaggactacaggtgtgtgccaccatgcctggctaatatttttgttttttgtggagataggggtcttgctatgttggccagctggtctcgaactcctggcctcaggcaatactactgcctctgcctcccaaagtgctgggattacaggtggaagccaccatgcccagcataattctttgaaggactcttgtcaaaatacattttggactagattttattcaaaatagaagacaattagtagcttgagatgcaaggacctcctccaaccacacacacacacacacacacacacayggacacgcacacacacacacgattctattaccttttccttaatgaaagatctacttttagaacaaatcgcaaataataatatatttgaacagaaaaatactatttcactaatgttttaatatctaatttcagcttcataatatcctaatgctatcaggttagtagggtaaacattataaatttatttttacatggaaaaaactgtccccaagatcacacagctatt

SEQ ID NO: 733117 - DNA, 646 bp, Homo sapiens
gcatccttgtggaagaaagcagcatttttactactaatttaatgctttaaattataatattagtatatttagatgttctcttcctatgttgatattgaaaatttatatttagaaaatcgttcagttagtctaagatttcaggttatttagcataacatgttcaaattcttctctcagaatttaaaaatcttcactagatctgaaatgatatctttttttatttctcatattgcctgtatgtgttaatgtgtgctttttaaattgatcgattttgccatgggcttgtctattttaacatccttttcaaaaatccatcctttgtattttgttagtaatttctccattctttctgtttgctattgtattactttgtgcttctycttgtatgcttttccccttcccactttcattagaggttctctgctattcctcctctaactgcttgggttgaaccttcttttatttagttccaaatgatctatttcctgatatgtacattcatttttggaaacttcaattgaagtgatcgctgtatgccacaagtttttatatatactatgttcactgatttagttacaaatattgtttgatagctatttaactttcttcattaactcatgaattacttagaagtccatttttaaat

SEQ ID NO: 733118 - DNA, 589 bp, Homo sapiens
attacttagaagtccatttttaaatttccagctatatggggaagttggggctattttttatagttggtgccacattttattaaacttatttcatggaattttgtgcttcttcttttgcagtcatctagagtaataataccaactaacatttttcaagtatttaccatgtgttaggcactattctaaacagttaatatgttttaacttgttaaagctcacaaacgcacaaggtactatgatgatcagtaatttacgaatgaagcatctgagccatagcaagataaagtaacttaaccaagtaacacagctggcaagcggcagtgctaagacaagcttagtcaaacccatagtctgctcctataaccaccacaaaaaaacctacctctgaatttagtgtgctcgagaaaatggmtatttgcgttttcagagcatgcagtcatacacgcatctgtcatatcagcttcagtgagttattgaagtcttctatattttttctaaatattttcatctaatttattaatttctgaggtaaggtgttaacatctcctatttggatagattcatctttttttgttaatgttttgctttg

SEQ ID NO: 733119 - DNA, 543 bp, Homo sapiens
caaaaaacaacagatgctggcaaagctgcagagaaaagggaaggcttgtacactgttggtgggaatgtaaattggttaggcactgtggaaagcagtttggaaatttctcaaagaacttaaaatagaactaccattcgacccagcartctcattgctcggtatatatacatccaaaagaaaatgaatcattctacgaaaaaaccacatatttaacacagcactattcacaatagcaaaggcatatgcaccatggaatactatgcagccacaaaaatgaatgaaatcatgtcctttgcagcaacctggatgcagctggaagccattatcctaagcaaattaacacaggaagagaaaaccaaatatcaaatgttctcatttctaagtaggagctaaactttgggtactcatggacataaagacagcaataacagaaaccggaggctactagagcggggagggcaaaggttgaaaaactattggctactatgctcagtacttggatgatgggatcatttgtacatcaaacctcagcatcatgcaata

SEQ ID NO: 733120 - DNA, 543 bp, Homo sapiens
caaaaaacaacagatgctggcaaagctgcagagaaaagggaaggcttgtacactgttggtgggaatgtaaattggttaggcactgtggaaagcagtttggaaatttctcaaagaacttaaaatagaactaccattcgacccagcagtctcattgctcggtatatatayatccaaaagaaaatgaatcattctacgaaaaaaccacatatttaacacagcactattcacaatagcaaaggcatatgcaccatggaatactatgcagccacaaaaatgaatgaaatcatgtcctttgcagcaacctggatgcagctggaagccattatcctaagcaaattaacacaggaagagaaaaccaaatatcaaatgttctcatttctaagtaggagctaaactttgggtactcatggacataaagacagcaataacagaaaccggaggctactagagcggggagggcaaaggttgaaaaactattggctactatgctcagtacttggatgatgggatcatttgtacatcaaacctcagcatcatgcaata

SEQ ID NO: 733121 - DNA, 488 bp, Homo sapiens
atttgtacttatgtctatattttaaaaaccatgaaaatccatacatgcgtgtacacacatgcacatgcatgcggacgcatacatacacacacacacacacacacacacaccctccttaaaaaagagttacctaaaaggtgcaragaaaattggatgtatatttaggccagggtgaaaacaagatttctttatgcaaataccatatgaaagtataacctgtgtaaagggagggaggttgtctcctactttaaggctaggaaaactaaaaagaggtatttttgtaataaactaggtttatgcctttcctccaaattccaaaattaaatatctttgattagcttgtcagagcaataatttttctcttaaaaaaataaaaaagcatcctatcttaaaaaggagccagagtcaatggaaccatgtgaatatttgccaaggaaactttagaccaaaacaaaatgtatgagtccaaactttcacacgtcaatttt

SEQ ID NO: 733122 - DNA, 488 bp, Homo sapiens
atttgtacttatgtctatattttaaaaaccatgaaaatccatacatgcgtgtacacacatgcacatgcatgcggacgcatacatacacacacacacacacacacacacaccctccttaaaaaagagttacctaaaaggtgcagaraaaattggatgtatatttaggccagggtgaaaacaagatttctttatgcaaataccatatgaaagtataacctgtgtaaagggagggaggttgtctcctactttaaggctaggaaaactaaaaagaggtatttttgtaataaactaggtttatgcctttcctccaaattccaaaattaaatatctttgattagcttgtcagagcaataatttttctcttaaaaaaataaaaaagcatcctatcttaaaaaggagccagagtcaatggaaccatgtgaatatttgccaaggaaactttagaccaaaacaaaatgtatgagtccaaactttcacacgtcaatttt

SEQ ID NO: 733123 - DNA, 629 bp, Homo sapiens
ggacatggtgtcctgcatcccagtcactccagttccagccatggctaaaagacagcaaggtacagctgaggccattgcttcagagggtgcaagccccaagtattggtggcttccacatagtattgggcctgcaggtgtgcaaaagacaagagttgaggtttgggaacctctgcatagaatttaaaggatgtatggaaatgtctggatgtccaggcagaagtctgctgcaggggcrgagccctcatggagaacctttactagggaaatgcagaagggagatgtagggttggagccccacacatagtccccactggggcactgcctagtggagctgtgagaaaagggtcaccatcctccagaccccagaatggtagatccaccaacagcttgcactgtgcacctggaaaagcttaaggcactcaacaccagccgtgaaagcaaccatagggactgaaccctgcagagccacagaggcagagctgcccaaggccataggagcccaccccttgcatcagcatgccctggatgtgagacatggagtcaaaagagattatttcagagctttaaatttaatggctgccctgctggtttctggacttgcatggggcctgtagcccctttgttttgga

SEQ ID NO: 733124 - DNA, 541 bp, Homo sapiens
aagcccagtaaatgtcagtgccctcctctgtgtgaacaagagcggtacccacctcatggggctagtggggggatgacgtggctggcacagccgaaatattttgtgaagtgtttggcacacacaaaattctcaatgcacatcagttattatcaaaaagtgtcaagttatggagccagctagctgctcttctacatgccttcaatgctcagagctcttacaaaaaggtggttagactcttccactaattatactatttcccagaaaggaaataacatgcttaagatgattattattatgcttataatgtaccaggacattgttctgagttataaatatttttaatcttcacatcaacccaagagatgtctcattgccatcctccttttttagawgagaaaatgtgaaaatagagagattaagtaatttgcccaaggtcacacagcttataagcagcacagtctcacacctaggcagtccagctccagaacctggaccctgactccactccactccacctccccaataacttctagcatttact

SEQ ID NO: 733125 - DNA, 665 bp, Homo sapiens
ttctaccagacattcaaagaagaattggtaccaaacctattgacactgttccacaagacagagaaagacagaaccctccctaaatcattctataaagccagtatcaccctaataccaaaaccaggaaaggacataaccaaaaaagaaaactatagaccaatatccctaataaacttagatactaacatccttaacaaaataccagctaaccaaatccaacaatatatcaaaaatataattcaccatgatcaagtgggtttcatatcaggtatgcagggatggtttaacatacagaagtcaacaaatgtgatacaccacataaacagaattaaaaacaaaaatcacatgatcatctcaataratgcagaaaaagcatttgacaaaatccagcatcgctttatgattaaaactctcaacaaaatcagcacacaaaagacgtaccttaatgtaataaaagccatctgtgacaaacccacagccaacataatactgaatggggaaaagttgaaagcattccttctaagaattggaacaagacaaggactcccactctccccactcttcttcaacatatttctggaagtcctaggcagagcaatcagacaagagaaagaaataaagggcacccaaatctttgtgtgacgacacaaagaggaaatcaaacc

SEQ ID NO: 733126 - DNA, 587 bp, Homo sapiens
tgttctcagttaaaagaatttgagacacttagaagcagtaagaagcacttagggaaagagaggttagagagctgctaagatggtaacacaagacctttccagactcttggtcccccttgaggactatgacctggaatccacgagttggtagaagactattttgcaaacagaagagtctgtatcccatgtcactgtagcctacagccaatttaccagtargtttctttcatccaggttctcctaaacattctctaaccctaatcaatacctcagactcccagataaagatattatatatttcaactataagctaaattattttagttagaattcaaaggcatttttatatcattctttcttatctgattgcatggaatgtgttttgaaggaaaaaagtttatgaaaaacaagaatattgctggaattgaatcggaattactataatggcaacccctccccaaagatttctcctatttatagtgacaaagacccttgtcaataatgtgagaataccacgcataacctcattcatgtaccgatcaggcctggtgcagtcttatctcatcatgatgtctcaacttaaaggc

SEQ ID NO: 733127 - DNA, 607 bp, Homo sapiens
ctgaaggtagaaaaacaatgcaactctgattacttgagttttttggctcctcagattctacataactgaatctcctttggtattggaggtcactttcagaaacatcaggtatagagatcgagacagaaagcagagggcaagagagagatgaaaatatgtgagcccaattctgctccgaacttgggtttaattgagattccaactgccactctcccctgcattcctttgtccctggctatgaccaagtttacggctgtatcgccccaagtaatccccgtaatgggctgcaatcctgggggagctgtttttgttcattaagtgaccaacctctgagccacatggagcgcggccagttacagcttcttgccctggcagatgggccacttttctgttttaaaaaaacagggatctttcaggagagaggagatagtaggcaggggttggggacacaatcagggayataaaggtgatgggtgctagaaatgaaggccagagtgaggggggcagtgggtgccccttccaggtcatgcagtcttctagggcagaattcactcacgtgctgtgtgttagctttctttgcaatggtaactatagttgtgtagggctt

SEQ ID NO: 733128 - DNA, 506 bp, Homo sapiens
actaaatgcaatgtacagaccttgtttggatcctgattcaaacaaacctattgtaaaaaaacaattttgagccgaactggacatggactattagatgttattaaataattattattttattctgtttgatatgttaataatggtagtgtttcaaaaaaggggggatcttctggttagagatatgtatgaacgtatttatgaatgaaatggtatgacatctaggatttgccttaaaatattatagtaaacaacataacaaaaagtgtgataaagggggtacagataaaacaagaatagcagaaagttgatcatttttgaagctggggatgggtacacagggttyattgtaacattctctgtactttagttagcttaaaaattttctataataaaaagaaaacctcaccaaatgcttccctggaaatatagctttttcctcattatcactacatatcataatatcattcataagttagaagcaacatgaatgagtactcagggaagag

SEQ ID NO: 733129 - DNA, 617 bp, Homo sapiens
tggcttgagcccaggaggttgaggctgcagtgagctgagattgtaccactgtactccaagcctgcagacagagccagaccccgtctcaaaacaagaacaaaaaagaaggtagcaagggagaatagaaagggtaagtgcctacctgttccttgactgctttgatggctatgtttccattttcttacttaattgtaaatataaaatgattccatctattcaacmtgcattcgtatagtcctattctgtaatatacagaagtaatataaagcacagtccctgagttcactacaagggccttacaatttagctgagaagacaagcataaataacaattgaagaacaaataaggttgttaggaaaggtgctaatggaagacaggaagaggagagctcaatgtcgttaaaaagagaaaagttgggagagaatataacaattcaagaaaaatgaaatgattagaagagaaaattagtcatacatgaaattaagaaaattcggctgggcgcagtggctcacacctgtaatctcagcacttttggtggatgaggtgggtggatcccttgagcccatgagtttgagaccagcctgggcaacataatgataccccatctctaatattt

SEQ ID NO: 733130 - DNA, 617 bp, Homo sapiens
tggcttgagcccaggaggttgaggctgcagtgagctgagattgtaccactgtactccaagcctgcagacagagccagaccccgtctcaaaacaagaacaaaaaagaaggtagcaagggagaatagaaagggtaagtgcctacctgttccttgactgctttgatggctatgtttccattttcttacttaattgtaaatataaaatgattccatctattcaacatgcattcgtatagtcctattctgtaatatacagaagtaatataaagcacagtccctgagttcactacaagggccttacaatttagctgagaagacaagcataaataacaattgaagaacaaataaggttgttaggaaaggtgctaatggaagacaggaagaggagagctcaatgtcgttaaaaaragaaaagttgggagagaatataacaattcaagaaaaatgaaatgattagaagagaaaattagtcatacatgaaattaagaaaattcggctgggcgcagtggctcacacctgtaatctcagcacttttggtggatgaggtgggtggatcccttgagcccatgagtttgagaccagcctgggcaacataatgataccccatctctaatattt

SEQ ID NO: 733131 - DNA, 500 bp, Homo sapiens
ttaatctgagaccaagaagttccacatttgttcttccataggaaatccccagagcctcaggtgtagatcccatagaatgatgacactacggaaagcctggatcagtgtcaggaaggcactttgtgaaagcctgagaatttgaatgttatcttgtaggacccaaggagacatagaactttgataagcaggagtatgctgagcayggtggctcatccctgtaatcccagcctgggcagcacagagcaatcccatctccacagaaaaaaaaaatatcaaaaaatgagccaggtgtggtggtgagtagtcccaggtacttgggaggctaaggtgggaggatcccttcagtccaggaggtcgaagctgaggtgggccaagttcacaccactgcactccagcctgagtgacagagtgagaccctgtctctaaaataaataaattaattaaaaaatatatatatatatatagcaggagtatgccatgattcactttgttttcaaaga

SEQ ID NO: 733132 - DNA, 632 bp, Homo sapiens
tataattcaaggtgagatttgggtggggacacagagccaaactatatcattctgcccctggttcctcccaaatctcatgtcctcacatttcaaaaccaattatgccttccactgcccctcaaagtcttaactcattccagcattaacccaaaagttcaaatccaaagtctcatctgagaaaaggcaagtccctttcacctatgatcctgtaaaatcaaaagcaacttagttacttcctagatacaaagtgggtacaggcaatggttaaatacattcwttccaaatgggagaaattggagaaaacaaagggggtttaggccccatgcaagtccaaaatccagtggggctgtcaaatcttaaagctccaaaatgatctcctttgacctcatgtctcacatccaggtcacagtgatgccaaaggtgggttcccatgatcttgggcagctccttccctgtgactttgcagggtacattccccctcctggctgttttcatgggcagacattgagtgtctgcagcttttccaggcacacagtgcaagctgttggtggatctactattctggggtctggaggatggtggccctcttctcacagctccactaggcagtttcccagtggggattctatgtg

SEQ ID NO: 733133 - DNA, 553 bp, Homo sapiens
atgccagcctgacgaagacacagcttttatccctaaacgtaagatatatgtatatagttggcttcgtttctctgacaagggcaagataatgagataaactgttttaggattgtaattcccaaatcctagtgtgcataacaatgacctcagaatatgttaattgttcagattcacagaatcttcctcagatattctagttcaataattctgagataggatctagcaatctatattttaaaatgaattgaaaatgaaaaatttcaaacgtatataaatgtgaactaatggctatcacccaacttcaatgataatcaatcttgcttgatttataccatcaycgctcaccacacctccaccattgttacattattttgaagcaagtgccagatggtatatcattttatctaaaagtatttcaagatatatggtcatgctttaaaattgatgctttgattattatctaacctaaaaatcaacagtaaatttttaaataccagttagtgctcttgttaccttagtggtcttataaatgatttgtaaatttgagttcatt

SEQ ID NO: 733134 - DNA, 666 bp, Homo sapiens
tgagttttctctgcttcttgggaacacttccagcatcactagtggcacttcatatgggttcgatgttgttcttcaaggtttatggcatttgcactaagcacaataaaaatatgagaaaaccatgatagtttaccttttactgctatatgcaatttactgtagacaggaactgctcaattgaaatgagtactgttacaagggcattttaagcagataaaacacttcagctcaaggcaatagcaacaggaggtgactataaaattattacagcaatagagtaagtactatagttaattttatgcagttatgctttactattgcatctgtaycttcatttgcatttctctgaactgtaatagagccatgaataatccatttgtatgtataagttttgataaattttaactttttgtaatagacttgtgatatttttagtggtaaatgataaagcagactagtatatacatgtattttgtgcaacatgacatacctttttcttaatttttgatattttttgacctatattttatatatatttgtcttcaagttttttcaaattgtccaaagtctccccaaatgtttcttatatagttattgaaaaaatactgtgcataagtgacctgtgcagtccaaatctgtgttgttcaagggtcaatagtacacata

SEQ ID NO: 733135 - DNA, 613 bp, Homo sapiens
aaggatataactttcaactttattaggcatcactgaattgatctaaaaaatggttgtgtgaaccattatggaaagtagcgtggaggttcttcaaaaacttaaaaatagaactaccatatgatccagcaatcccactactgggtatatatccaaaggaaatgaaattagtatgtcaaaaggatatttgcactgctatgtttattaaagcatcaatcacaatagccaagatatggaatcaaacctaagtgtccatcagtggatgaatggaaaaagaaaatgtggaacatatacacaatgggatataatttagccataagaaaaggaaatgctgtcatttgtgacaatatggatgaacctggaggacattatgctaagtgaaataagtcaggcacaaaaatgcaaatatcttctcattcwcgtgtggaatctaaaaatgttgatctcatagaagtatagagtagaatggtacttatcaggggctggggcagttgcatggggttggggagatggttaaaggatacagaatttcagataggagaaagttcaagagatgtattgtacaacaagtgactatcattaacaatatattgtggaggagccaagatggccgaat

SEQ ID NO: 733136 - DNA, 519 bp, Homo sapiens
tagcaaaattgacatatctgtcttttaatataggtagaaacagagttagataaaaaaaggacttgtctcggagcatgatttctgaaaatagtggaatcgagtttgaatctagtaagtacatataaataaatgtcttaaaactcctcttatgttagctaattaagaaatattattgtaatagacattagaaaatattttaataaattgagtgcatttcacacgctaaggaaatgatcttacttgatagttgaattagatacatatatacctataggtastttaaaatatttctaataaccttatatacttttaaaaagcattgatatatgtttgcactatctggtctatagagtacacataccaaacatgattatagctcttctgctataaacttcaaatgtctaattaatacaaaaatctagaatgagaagagttctttgcaattttttttttttaccaaatagaatataggaaagatagctgcaaatatacctgacacacttatctgtgagtatggtg

SEQ ID NO: 733137 - DNA, 519 bp, Homo sapiens
tagcaaaattgacatatctgtcttttaatataggtagaaacagagttagataaaaaaaggacttgtctcggagcatgatttctgaaaatagtggaatcgagtttgaatctagtaagtacatataaataaatgtcttaaaactcctcttatgttagctaattaagaaatattattgtaatagacattagaaaatattttaataaattgagtgcatttcacacgctaaggaaatgatcttacttgatagttgaattagatacatatatacctataggtagtttaaaatatttctaataaccttatatacttttaaaaagcattgatatatgtttgcactatctggtctatagagtacacatascaaacatgattatagctcttctgctataaacttcaaatgtctaattaatacaaaaatctagaatgagaagagttctttgcaattttttttttttaccaaatagaatataggaaagatagctgcaaatatacctgacacacttatctgtgagtatggtg

SEQ ID NO: 733138 - DNA, 448 bp, Homo sapiens
caagagatctggccaccttggcctcccaaagtgctgggattatagttttggggcaccgcgatcagctcagccttaaaaaaggcagactagagatctttatctatgtatatctatctataaaataaacatgtgttccttatataaaaatatgttattatataaaattttttttcaaggtagaaatatataaagagggtgcatgtagagcctggggcattgtgtagtgaagctcaaggcctctgaagaaatgcccmttgcctcttttgtctgggctagaatccgagaagggaaagcagcagatgcactggttcccaggttcttcgcatcctacagagagaaacttgtttgagctagggtagtgtttaacacccttgttcttactcttctgttttatgtagtaagcagagactagcttcatgagaacagacagtgacagtcaaggctgtct

SEQ ID NO: 733139 - DNA, 551 bp, Homo sapiens
aaagttttattattctttccaggagagagactgccaacttttgaacctaactagaacaagtatattgcttcttcatatttttattaaggcaaagagagtctagttaaaaataattcaaattgtgttggaaatgctataaattgctgtgaagagagttgctggctgtggcttgtcagagcaaacatattgtacaaatcttaggggagaattagtgcttgtgcattaaaatcaaatcatcttgcagyacaccgagaaaaaggttagatttttaaaataatttcaaagtcatgaaaagagcaaatatgctccacaaagagcctagcaaccctcaatgaccaatgccccttttatgtagtttggtatctgaattagaatcctagaatctacaaattcctctgggtgtgggtgctgcatcttgaggattttataacactgccatcaccaagctctcttttgatattcactttaaggagataatttatgggcaaccagagagcataaaccaaagtagatatctatctggatagctagatacatctccatatcattga

SEQ ID NO: 733140 - DNA, 629 bp, Homo sapiens
cctgccttatgaacttttgtgttcaaaatataaattttagatttaaggaggcatgtgggtgtgtattgctcactctctgatatacaacatggttattttatgtttggtagtagtagttaaaataaaactatattaattgccttcttactaatgtactaaaggctaaatgaaagaaatttttcatcaaatgttataaattttgtttgattgtatcaatttgagatacggttcagtattttagaaccaatgtcttaaggtaggcttccatagttscaattaagcttcataagaaatataattaagttgaagcttggcattgtttggtaggtgtctggctggcaccacgttttccaaaaataagatttgtttgaaggggcttgggtttttcccttaatttcaaggttatgtcttggatggggcttgggaaagggcagtgggttctgactacacgtcaaagatgttaaagacattcactggcttgacatcatgtggacagtggcttgcttattcttcgtttcctagtatcaattaaaataataaatggtcaggttttgctcacactatttttaaaatgaagtttatgatccataattttgtgaaataaacttgagttgtattcagtacacata

SEQ ID NO: 733141 - DNA, 643 bp, Homo sapiens
aggggcagggcaagatggcagaatagaaggctccactaattgtcgcctcctaatcccccaggaaagacaccaatttacaagcatctacacacaaaaaccgccttcataggaaccaaaaatcaagtaagcactcatagtacctggttttaacttcatatcacagaaagaggcactgaagtggtatgaaaaacagtctagaattatcagtgctacctatattagtctgttttcatgctgctgataaatacatacytgagactgggcaatttacaaaagaaagaggtttacaaaagaaagagaattacagttccacatggctggggaagcctcacaatcatgccagaaggtgaaaggcacatctcacgttgtggcagacaaaagaagaagacagcttgtgcagggaaactcccctttttaaaatcatcagctcttgtgatacttattcactatcatgagaacagcacaggaaagacttgcccccatgattcagttatctccctctgcgcccctcccactggaattcaagatgagatttgggtagagacacagccaaaccatatcactacctctaccccatcccctggcagcagtggcatggtgcaaagagtgttcctctgctctgggagagggagggcacagcaac

SEQ ID NO: 733142 - DNA, 643 bp, Homo sapiens
aggggcagggcaagatggcagaatagaaggctccactaattgtcgcctcctaatcccccaggaaagacaccaatttacaagcatctacacacaaaaaccgccttcataggaaccaaaaatcaagtaagcactcatagtacctggttttaacttcatatcacagaaagaggcactgaagtggtatgaaaaacagtctagaattatcagtgctacctatattagtctgttttcatgctgctgataaatacatacctgagactgggcaatttacaaaagaaagaggtttacaaaagaaagagaattacagttccacatggctggggaagcctcacaatcatgccagaaggtgaaaggcacatctcacgttgtggcagacaaaagaagaagacagcttgtgcagggaaactcccctttttaaaatcatcagctcttgtgatacttattcactatcatgagaacagcacaggaaagacttgcccccatgattcagttatctccctctgcgcccctcccactggaattcaagatgagatttgggtagagacacagccaaaccatatcactacctctaccccatcccctggcagcagtggcrtggtgcaaagagtgttcctctgctctgggagagggagggcacagcaac

SEQ ID NO: 733143 - DNA, 610 bp, Homo sapiens
caatcttaattcttgggattctcagccactcttaaaatattatttcttcccatgtttgcatttctattcttctgaaactcggagtagatgtgtgcaactttttctcattatagcctccatgtgttctaacatgtcttctattttccttctctttgtgtctctttgctgaatctaaataaatttcttyaaatctatccttcagtttcagggatttttttctgaatatcctggtttgttcttcagatttgttttgttattttaaatcttattacttgtttatgttgtggcttcatgaactttccattcataaattattttgtaatctctttctgatcttgagactatctgagtcattggggtctaaatttgctaggtttcttctaccgactcttgttcatagtagcttatgtcctcttgtgttttgaaatgataaattgttaggtcatttttcctcctggcctgcatctaagaaaattgggttggactgtagatgaggatgtattatttcaataaaaagttcttgtcagcctatctttctcataacaaatctttcatacttttctatcccttaactcttcgtgttagtcactcagtaatttccttatatcta

SEQ ID NO: 733144 - DNA, 610 bp, Homo sapiens
caatcttaattcttgggattctcagccactcttaaaatattatttcttcccatgtttgcatttctattcttctgaaactcggagtagatgtgtgcaactttttctcattatagcctccatgtgttctaacatgtcttctattttccttctctttgtgtctctttgctgaatctaaataaatttctttaaatctatccttcagtttcagggatttttttctgaatatcctggtttgttcttcagatttgttttgttattttaaatcttattacttgtttatgttgtggcttcatgaactttccattcataaattattttgtaatcyctttctgatcttgagactatctgagtcattggggtctaaatttgctaggtttcttctaccgactcttgttcatagtagcttatgtcctcttgtgttttgaaatgataaattgttaggtcatttttcctcctggcctgcatctaagaaaattgggttggactgtagatgaggatgtattatttcaataaaaagttcttgtcagcctatctttctcataacaaatctttcatacttttctatcccttaactcttcgtgttagtcactcagtaatttccttatatcta

SEQ ID NO: 733145 - DNA, 632 bp, Homo sapiens
tctaggagaagaaaagtctattttaccaacatctcacctgcagtaagcttgtaagaccaaaagcggtggtgaaaaagagtcctagacaaactaaacattataacaaaggggttgtcttttgtataatcttgtcattgagaaaatctgacagtaccatcctgtcagaaaaaaaggcaaaggaagtaaaaaataggagatcctggtatgcaaaaattaatagagcaacaagtctatgtttcatcatatagaaaaataaattataatgatgaataaattcagaaagatgtaaaagaaaaaaaaaacaatgaaaaggaataaaaatgattgttgctggaaatagatggagttccaaggcgaattccttaaatagaatcagagagcattaaaaaggaaagtgatgttacagaattgtaaatcatygattatgataccatttaaccttgactcctgagaatttatgatgtgcatatgttaaggagttagaactagcattaaaaatgttttaaacaattgaatattttaaaaagtaaaaaaaaaattgaaatcctttaaaatataatgtgtgatttatttgattgatggtcttacataagtatttatccaataaaccttaatacttccattgtttgtca

SEQ ID NO: 733146 - DNA, 496 bp, Homo sapiens
ggtgtgacccagcatagtcccagtggcggtggccacagaagtacttacatcacccctcttccaactccaggcagctcagcacagaaagagagagactctgtttgttgggagaaaagtaaggaaagagaacaagagactctggtaatcaagggaattcttaatcttactcaagactaccaaggtggtacctctacaagtctgcaagaaccacagtgtaactgggcttggggaaaccccctaatacacatatggctgcagtggccaaagatgtggatcrcaacacttaatttcctttgaatatctggaaagccttcccaagaaggatggatacaaagaagcccagactgcaaagatttgaattaatacctaggtcttgaatgccaagacattgacaaatatccacaagcatcaagaccatccaggaaaacaggacctcaccaaacaaactaaataaggcaccagtaacaaatctcagagtgacagagatatatgacca

SEQ ID NO: 733147 - DNA, 647 bp, Homo sapiens
cattgacaaatatccacaagcatcaagaccatccaggaaaacaggacctcaccaaacaaactaaataaggcaccagtaacaaatctcagagtgacagagatatatgaccattcagacagggagttcaaaacagctgttttgagggaagctcaatgaaattcaagataacacagagaagggattcagaatcctatcagataaatttaacaaagggagaaataattttgaaaaagaaatttgggagctgaaaaagtcaactgacaaactgaagaatggattagagtctctcaacagcagaagtgatcaagcagaagaaagaatcagtgagcttgaagacaggctgtttgaaaatatacagtcagaggagataaaacaaaaaataataaaaaagaatgaagattgcctacaagatctagaaaacagcctccaaagaacaaaatctaagagttattggccttaaggagsagatagataaattaggatagaaagtctactcaaagacataataacagagaactttcacttcctgttagaagatgtcaatactcaagtacaagaaagttatagcacaccaagcagattcaattcaagtaagagtacctcaagacatttagtaatcatactccctaaggtcaagaataaagaaa

SEQ ID NO: 733148 - DNA, 636 bp, Homo sapiens
cagtcctcttaaattagagcaaaaacgagatgaattttttccttgcaaatcgatgtggatggtcagttgctacaggcttcatcttcaacatcatctcatcccctttcaaaacgagttatccatgagtaggagtacctattcttatatcagattaaacagactttaaagcaacagtaaaaagaaaagagaaagaaagtcattacatattgataaaaggatcaatcaagaagatatattataattctaaatatataggcatctaactctggagctcccagatgcataaaacgatttctactagccctaagaaaagagatagacagcaacactataatgcagggaaggggcttcaactctccagtgacagcactagacggatcactgaggcagaaagtcaacaaagaaacactggacttaactgcrctctggaacaaatgaacctgacagatatttacagaacgttctacctaagaattgcagaatatgcattcttttcaacagcacatggagcattctccaagatagactacatgatagatcacaaaacaagtctcaataaattttttaaaattgaaatcatatgaagtttattcttagaccacagtgaaataaaatgagatatcaattccaaaagga

SEQ ID NO: 733149 - DNA, 530 bp, Homo sapiens
agtcattgttcaggtacaacaggtatctattttctatatcttgtatgcatatgttattctcataggcagccttgactcatttgatatttttaactggaaggaaggaactcctattacttggaaaacagaatgcccagcccaccttgcctccagcaaatactccctgtactcacttcatggaggtgtaaaaatccagwgtgctaggtcacttatggaagtaataatgtatattcctggggctgagtacaggctgtgtaacttattctacatactggtactcaacatatcttacttatttacaatgtataagaacataggacccaaaatcagttactagatttgtatcctttatttactagatttgtgagcaggaccaagttacataaactctctcaaactctgttatccaagtatagcacaaagtatgaaatagcaagcactcagtaaatgctgtctcttattactgttgttggtgttgttacatatgtacatcatgcatacagaaattaaaattacattaaagaagagat

SEQ ID NO: 733150 - DNA, 546 bp, Homo sapiens
gtaaggcttaacatgtccaaaacatatatcctgattatccacaaaatcctggcccacaaactttttgcccaacatctttccattttagtacagagcacatataattttccagaacttataatggatccttatttactcacttttcttcatctccacacacgaaaattaacacatctaacttctcgatttctcatcctctccagtgatactaacactagtacacactaccatcatttctcccttgggttttggatatagattactcactgctagttctgcttcttatttgcatttatttaataatcttccaaataacaaatagagtgatcttttytaaacacaaagtaggtcattttactctttaactcaaagtcaccaagggcttcccactgtacttagaaacaatgtcaaattattttccataaagccctatttcatctggtcctgtctaccccttcaaccttaccttttaatcctccttcctctctagtgttcagaaatgccaacaaataactcagttctgtagtaacctcattagagaggtag

SEQ ID NO: 733151 - DNA, 507 bp, Homo sapiens
ttactatatcgtatattgcctctctgcaattgacatatatataacataatatgtttgtatacatacatacacagaggcatatattacacatatgtataaacatatgtcaaacttggcacttagtatactgtgtagcacatggaaaccatgtaaaaatggcagctattattactatattaatacttttttatcctttgtaatcatgtttatgtatgtaacatgtatattcttcttagacctacatcttatatattcttctaatactcaaatgctygtaagaatatgacaacaacagaacaatggtgaagttgagcgctcaactggctctctagatcctatataacttcaggatgacttatcgaaactgtgaagggtaaactaagtattcgttcatttattcagcagtatttattgagaatctatcatgtcccgaaagctggggattctataataaaccaagataaacaaagtgccaccctagtggagtatatattttagagcagcact

SEQ ID NO: 733152 - DNA, 651 bp, Homo sapiens
tgacttggggctataaaccaaaaataaaattccaaggcccccctctaccatctgaatggacactcctctcagtcaagggcattccaaagttaacctgaaaaactagttcaggccatcatgggaagagggagccatacttgtctcattctactctctttccttttggaattactgatagaacacactctttaagtctgaaaggaaatatttacaatctattctctctgaagcctgctacctggagacttcatctgcatgacaaaaccttggtctccacaaccctcactcattgatatatcccttctctcttagtctccttttaaactagtgtgggytgttttttggtttgtttgttttctgatctttttctattcccgtcttgcaagtagctcattatttctgtaatgacttttatacaatgagttcaatttttaatttattgagttcttcttaaatgtaaggaactagggatacaaagataaacaaggcatgtcttcgctcttaagtagctcaaagagcaggcagaggacacagctgttgtggcagattgaataatggccccagagatgtctgctccccaatctctcctgtatatatgctaccttacatggcaaaagggactttgtagatgtaactaaactgaaggacttt

SEQ ID NO: 733153 - DNA, 651 bp, Homo sapiens
tgacttggggctataaaccaaaaataaaattccaaggcccccctctaccatctgaatggacactcctctcagtcaagggcattccaaagttaacctgaaaaactagttcaggccatcatgggaagagggagccatacttgtctcattctactctctttccttttggaattactgatagaacacactctttaagtctgaaaggaaatatttacaatctattctctctgaagcctgctacctggagacttcatctgcatgacaaaaccttggtctccacaaccctcactcattgatatatcccttctctcttagtctccttttaaactagtgtgggttgttttttggtttgtttgttttctgatctttttctattcccrtcttgcaagtagctcattatttctgtaatgacttttatacaatgagttcaatttttaatttattgagttcttcttaaatgtaaggaactagggatacaaagataaacaaggcatgtcttcgctcttaagtagctcaaagagcaggcagaggacacagctgttgtggcagattgaataatggccccagagatgtctgctccccaatctctcctgtatatatgctaccttacatggcaaaagggactttgtagatgtaactaaactgaaggacttt

SEQ ID NO: 733154 - DNA, 651 bp, Homo sapiens
tgacttggggctataaaccaaaaataaaattccaaggcccccctctaccatctgaatggacactcctctcagtcaagggcattccaaagttaacctgaaaaactagttcaggccatcatgggaagagggagccatacttgtctcattctactctctttccttttggaattactgatagaacacactctttaagtctgaaaggaaatatttacaatctattctctctgaagcctgctacctggagacttcatctgcatgacaaaaccttggtctccacaaccctcactcattgatatatcccttctctcttagtctccttttaaactagtgtgggttgttttttggtttgtttgttttctgatctttttctattcccgtcttgcaagtagctcattatttctgtaatgacttttatacaatgagttcaatttttaatttattgagttcttcttaaatgtaaggaactagggatacaaagataaacaaggcatgtcttcgctcytaagtagctcaaagagcaggcagaggacacagctgttgtggcagattgaataatggccccagagatgtctgctccccaatctctcctgtatatatgctaccttacatggcaaaagggactttgtagatgtaactaaactgaaggacttt

SEQ ID NO: 733155 - DNA, 606 bp, Homo sapiens
taagtgaaagaaggattccctaaaacccaaaatatttccctcaccacctgaaactctgctactagatattaattcttttgaaaacatgaaagtttttgatcctcatgaaaccacattaaaaatgtttatttccctgaaagcctaagtgagacttcattggctaatacttttgtggggattagaaagacaggacttctttcatttacactggatttgatttacaatcaaattaatatttggaayaaaaaatatttccactttctgtacacatttcctcccattctgttcacagaaggcaccactatgatcacatgcaattgcccactatcaaaggaaaactctttaagttacaaaaaaaaaaaaagtaaaatgaaggactgtctttatattacaattatagttttaaaagagcagctcttgcaggacactaaaaacgtgatacaactttctaacgtcatattgtcttatcgtagaaatacacctactataagaaagcataggacagctgtaacaataaagccacattgtcctaataaggttcctttaattatggaactcctcatttgctaaatccctttttattgtttggtactctggagtgccttg

SEQ ID NO: 733156 - DNA, 630 bp, Homo sapiens
cctactgtgcaatagaacacctgaacttattcctcctatctataactttgtacctgttgaccaacctctcctcatcctccctgcccccatcctccccagcctctggtagacactactgtattctctacttctatgagatcagcttttttagatttcacatatgagtgagaacatgcaatatttatctttctgtacctggcttattttacgtaacgacctccagttccattcttgttgctgcaaatgacagcggcaaggattttattctttttttgtggctcaatagtattccattgtgtatatataacatatttcctttatcttttcatctattgatggacacaagttgattccatatcttagctattgtgaatastgctgcaataaacatgtagttctgaatatatattcaagaaactaattattaatttaggaacagaatcatagactataaggaattggcaaggtttcctagggtttcgttttgtcacttttctagatatatgctttcttgtgaatttaaatattttgttttcatcaatgtacaagtaacctatgtagtgtagcgattcaggatgaaatcttattttaaagattttttcacgcctgtaatcccagcactttgggagg

SEQ ID NO: 733157 - DNA, 630 bp, Homo sapiens
cctactgtgcaatagaacacctgaacttattcctcctatctataactttgtacctgttgaccaacctctcctcatcctccctgcccccatcctccccagcctctggtagacactactgtattctctacttctatgagatcagcttttttagatttcacatatgagtgagaacatgcaatatttatctttctgtacctggcttattttacgtaacgacctccagttccattcttgttgctgcaaatgacagcggcaaggattttattctttttttgtggctcaatagtattccattgtgtatatataacatatttcctttatcttttcatctattgatggacacaagttgattccatatcttagctattgtgaatactgctgcaataaacatgtagttctgaatatatattcaagaaactaattattaatttaggaacagaatcatagactataaggaattggcaaggtttcctagggtttcgttttgycacttttctagatatatgctttcttgtgaatttaaatattttgttttcatcaatgtacaagtaacctatgtagtgtagcgattcaggatgaaatcttattttaaagattttttcacgcctgtaatcccagcactttgggagg

SEQ ID NO: 733158 - DNA, 624 bp, Homo sapiens
tcaccctctgtgtgctgcccccactgtctaaccagtcccagtgagatgagccaggtacctcagttggaaatgcagaaatcaccagccttctgcattgatctcactgggagctgcagaccagagctgttcctattcagccatcttgccagcctgcaatcctatataagctttctataaatttgattttatagtatgggaaactaataatattctgcactttgatattcttacttttcgtaaggtttatttaacttattcttaaattcatttgaagatgtgttgaaagctgtattttctgcygcagttgctgaggttggccatgacaataaggaaattcaggatgctatagctatggagggtcagttcaatcttttaaaccagcaggattgtccacttggacacagccagtttgtaggtctgatgctggttatctaccccgagactgtgaattctatctacacatggataatataaatgctaatggagaagtaggacaccagggctggacagcaagaaaaggaatcttttcccttcctgtttgagttcatgccttcccaaggttcctttgtcatctcataggtaataatagaggtaattatttataacacactacttatttctaag

SEQ ID NO: 733159 - DNA, 527 bp, Homo sapiens
tcacactacaagtgataaatacagagagacagggttgcctttatgacagttgactctgctagagacaaggatgtctcgaatgctgtctttgctggccatctgcacgatgcagtctccttgtcctcctgagtgtttagtggtttgtgtgtttagatgtcagtttgcctttaactactccgatgcctccgttggtgctccctgtatcctcgaggtaggtttctgccagggtcccttacttttaccttcatgttatccttagcaatcttgtccacttctaagaccttagtcatagaatctccaattctctagtccacagtctcagccctgtctcttagatccaggtgkaacttcatatctactttctacagttttccatatgctagccatttcagaaccaaatccatcaaaatacaccttagccacatctgcttttcactcttggctttcctttctccactcacccctcaggctcaggattctttttgtgttctgacctctgtgcttcctgaacaccctcatccagtctg

SEQ ID NO: 733160 - DNA, 585 bp, Homo sapiens
ggcgggagcagccctggtggcactgagtgcacgagggattgacggctccttccccagagcaggagggagggaaacaccgcggtggccatggtcagtcgtgctcggaaaggtcagcctttgctggggagagtgaggagggggccacggaagtcctggggccaagcatcgtcatctggacatgtcaaggtcagcactgcttagctctggcacccgagcccgcctggcctgtgggacacacaggggccattgtttccccaaacacacggcccccgaactctgaacaccccctgcatccttaggacatgttaaactggccctgttccctttcatcattttaccaygcaaacatcatttttcatcattgtccagctctactcaagataagtgtcaccttctggtgaactcggcccctgtgcagccacaccccccatcggcttcatcagtgcagcctgtgatgcaacagttaaggctgagaacaagaaaagctccccattccctggccagtgttactgtcactagaaaaatccaagttttatagcactttgataacactctctacacacaagcatccacacagacatccgg

SEQ ID NO: 733161 - DNA, 628 bp, Homo sapiens
ggaacgcctttgaggcgagtctggtttggggggttcttagggcacagaggatccgctggatggaagtaagtcccgggtttctgccagagatgtggaatggtagattttccccctgtccgtttccaagactagctcacaattatgaccgaggtcatgtgtattttgaacatccaaaaggaatttaattttctctgtttgtggttgaatccgaatctcccattccacatggttgacccccaccctggagcgggcactgtgtctcatcctkctgcatctggggatctttttcagaggatctgtgctgggagctgtttgaaattcgaatgagtctttcagagaagtttatttaacttgtaaaacttcaggtcctttcacaccatttcagcgttggatcacagacagctcttcctttatatcccagcaacttgagtttatttttcaaataaaagtctgttttcccataaaatgccaaaggttttgtgctttgtgtggaggaatgagcccaagcttttaagactttaatttagagcctctgagtcttgcatttccatcccaagggctcccggggctgaggagcaccccactccagcttgccccgcagaacaaacgccaggcagtggttcagcga

SEQ ID NO: 733162 - DNA, 634 bp, Homo sapiens
tttatcatggccctgaactcccagaattgttgttgccatcgaggggcagaggtaaaccctaggtttgagattccagatcgtctttgaaaggatgcaaccaatacttttgtttccaccacgagacgcttatttccctttcatctgcagctttccttcctcttctcttcctcctccgtggagaatcgtaccaattaatcactggaggcagacaaccactagagctcacgatccctgcctctcccttcatgatrtgaatgaggagagctcctggagctgggaacggcaccatggaaacgagctctggggcagaggcggcagtctggacaccgtcccagcctccccaacccgtctcactggcacctgacacccagagggcctgccggggtggcgtcagatgatgtgttgagtcaacagaaccccaggagagccctggttggagtcccatggcagccggctgcagccagcaccccaggaagggagtgtctgccaccggctgcagccgccacctggcctcctgggagacctggcgggaaggggaaagccgggcaggaaccacactcacagacggtctccccatccccgcctctgccgccttctcctgcttcgctgtacgtggctctccaaagtggaggtt

SEQ ID NO: 733163 - DNA, 465 bp, Homo sapiens
tgtctctctctctctctcatttttgcatcattatattgtgccatcagtgtgggtttttggttttgatgttatgaagtgaatttctggggacaatctctgttgggtggtgttgacaaggatccagtccctgtttggtaatacatgacagctaagctgctctgtgagtcttttttattgtctatttattgtcctgagaataatggtatttcctgatatttgagactgcagcaatgatgagttgttcatatcttgtctttccaatgtttgttaaaaattttayaggcccaatagttgtcaatatctgcaagagtggcatctctattacaagagtgatcttactactcaatgtccccctcccacccaactttgttccataggagctcttggctttaacaaatttactatatctaaaagacatcttagcacaggaagaacactaaatctgtagcatgtaaggagcagttt

SEQ ID NO: 733164 - DNA, 465 bp, Homo sapiens
tgtctctctctctctctcatttttgcatcattatattgtgccatcagtgtgggtttttggttttgatgttatgaagtgaatttctggggacaatctctgttgggtggtgttgacaaggatccagtccctgtttggtaatacatgacagctaagctgctctgtgagtcttttttattgtctatttattgtcctgagaataatggtatttcctgatatttgagactgcagcaatgatgagttgttcatatcttgtctttccaatgtttgttaaaaattttacrggcccaatagttgtcaatatctgcaagagtggcatctctattacaagagtgatcttactactcaatgtccccctcccacccaactttgttccataggagctcttggctttaacaaatttactatatctaaaagacatcttagcacaggaagaacactaaatctgtagcatgtaaggagcagttt

SEQ ID NO: 733165 - DNA, 620 bp, Homo sapiens
atgaaatggaatgatgaaatgaaatgaaaagatcaaacggtgaagtgaagaaatgatatgaaatgatgaaatgaaatgaaatgaggaaatgaagttaaatgattaaatgatgaaataatgaaatgaaatgaaatgatgaaatgatgaattgatgaaatgatcaaatgaaatgacgagatgaaaagatgaaatgaaatgatgaaatgtaatgacgagatgaaaagatgaaatgagatgaaatsatgagatgaaatgaaatcatgagatgatgaaatgatgagatgaagtgaaatgatgaaatgatgagatgaaatgaaatgatgaaatgaaatgaaatgttgagatgaaatgatgaaatgaaatgaaagaatgaaatgaaatgatgaaatgagatgaaatgaaatcatgagatgaaatgatgaaatgatgagatgaaatgaaatgatgaaatgatgaaatgtaatgaaatgatgaaatggaatgatgaaatgaaatgatgaaatgaaatggtgaaatgaaatgaggaaatgaaatgaaatgatgaaatgaaatgaagtgaaatgatgaaatgatgaaatgatgaaatgaaatgagaagatcaaatggtgaaatgaagaaat

SEQ ID NO: 733166 - DNA, 622 bp, Homo sapiens
aatggtgaaatgaaatgaggaaatgaaatgaaatgatgaaatgaaatgaagtgaaatgatgaaatgatgaaatgatgaaatgaaatgagaagatcaaatggtgaaatgaagaaatgatatgaaatgatgaaatgaaatgaagtgatgaaatgaagttgaatgattaaatgatgaaataatgaaatgaaatgatgaaatgatgaattgatgaaatgatcaaatgaaatgagatgaaaagatgagatgaaatgaaatgatgaaatgaaatgacgagatgaaaagatgaaatgagatgaaatgaaatcgtgagatgatgaaatgatgagatgaagtgaaatgatgaaatgatgaaatgtgatgaaatggaatgatgaaatgaaatgatgaaatgaaattgtgaaatgaaatgaggaaatgaaatggaatgatgaaatgaaatgaaaagatcaaayggtgaagtgaagaaatgatatgaaatgatgaaatgaaatgaaatgaggaaatgaagttaaatgattaaatgatgaaataatgaaatgaaatgaaatgatgaaatgatgaattgatgaaatgatcaaatgaaatgacgagatgaaaagatgaaatgaaatgatgaaatgta

SEQ ID NO: 733167 - DNA, 554 bp, Homo sapiens
gtacaataaaaattattgcgatttttaatcttttctgtggagaaaacacaggtgtgatttctagtgtagctgaacatcgtttatttgacagtattgcacttgtgtgtgggtgtgtgcgtgtgtagctactttttaatttggttctcacaaaatgattagatactaacaattaattcagtaaaatgtatgttttgcaatatttctccatgttattatgctttaaattagtttaatcatgcccctataatgtgtacattttaacctttgactataggtctcaatcttactttggttcctgtatttgaatttatgctaataaagtcccacagcttaataagattacataaattttttgtataatttttactagcattctgatgtcattttaaattatgtaatgaaatcmaattttaatttggattattgttatctgagttaaggatataaatttttaattttcttataaatattacttaattatttctgaaccatacattgactaatctgccctttatatgatgtgtattataagagcttaggattgtttcatttgc

SEQ ID NO: 733168 - DNA, 619 bp, Homo sapiens
tcctcagagagaatagaaagaaaatgtttctttcagacctttggagacttagcctctcagttaacctttcctagatccagacaagggggcagacctcagagaaaacctggctgcatcagggcagattctctaccgatgcaaatctccccaagacagctttgcagctaacattgcwtttccagcccttctcaatagccattttgaaatatatcaaggaaatatatttaggggtaaaatatattagtttccttcatacagctataaaacatacaggaataatttttgtcaatgtctactacaaatccaatatagcagtaactatgaaacccaccagatattgatgaaaaaatatgtagagtacctcaattacaaatgttgatactaaaatgccaaataaaatacaaataatatccaacaatatttgaaacagtaagacaagaaattggcaaaaaaaaaaaaaaaaacaaatatccaccttcgggatgaaagtgtgtttccaaatttggtaatccagtaatattaataatcgtattgattagcccaaattaaaaataaataggggattctcagtacatgctaaaatatgtttgttaaaaggcaatattcatgtctttaaagg

SEQ ID NO: 733169 - DNA, 619 bp, Homo sapiens
tcctcagagagaatagaaagaaaatgtttctttcagacctttggagacttagcctctcagttaacctttcctagatccagacaagggggcagacctcagagaaaacctggctgcatcagggcagattctctaccgatgcaaatctccccaagacagctttgcagctaacattgcttttccagcccttctcaatagccattttgaaatatatcaaggaaatatatttaggggtaaaatatattagtttccttcatacagctataaaacatacaggaataatttttgtcaatgtctactacaaatccaatatagcagtaactatgaaacccaccagatattgatgaaaaaatatgtagagtacctcaattacaaatgttgatactaaaatgccaaataaaatacaaataatatccaacaatatttgaaacartaagacaagaaattggcaaaaaaaaaaaaaaaaacaaatatccaccttcgggatgaaagtgtgtttccaaatttggtaatccagtaatattaataatcgtattgattagcccaaattaaaaataaataggggattctcagtacatgctaaaatatgtttgttaaaaggcaatattcatgtctttaaagg

SEQ ID NO: 733170 - DNA, 619 bp, Homo sapiens
tcctcagagagaatagaaagaaaatgtttctttcagacctttggagacttagcctctcagttaacctttcctagatccagacaagggggcagacctcagagaaaacctggctgcatcagggcagattctctaccgatgcaaatctccccaagacagctttgcagctaacattgcttttccagcccttctcaatagccattttgaaatatatcaaggaaatatatttaggggtaaaatatattagtttccttcatacagctataaaacatacaggaataatttttgtcaatgtctactacaaatccaatatagcagtaactatgaaacccaccagatattgatgaaaaaatatgtagagtacctcaattacaaatgttgatactaaaatgccaaataaaatacaaataatatccaacaatatttgaaacagtwagacaagaaattggcaaaaaaaaaaaaaaaaacaaatatccaccttcgggatgaaagtgtgtttccaaatttggtaatccagtaatattaataatcgtattgattagcccaaattaaaaataaataggggattctcagtacatgctaaaatatgtttgttaaaaggcaatattcatgtctttaaagg

SEQ ID NO: 733171 - DNA, 528 bp, Homo sapiens
ttggccaaaacaaaggggctacaggccccatgcaagttcaaaatccagcatggcagtcaaatcttaaaactccaaaatgatctcctttgactccatgtctcatatccaggtcatgctgatgcaagaggtgagttcccatgatcttgggcaactccacccctgtggctttgcagagtatagcctttctcctggctgctttcatgggctggcattgagtgtctgcggcttttccaggtgcaaggtgcaagccgtcagtggatctaccattctgggatctggaagatggtggccctcttctcacagctccgctaggtggtgccccagktgggactctgtgtgggggctcccacccgacatttccctttcacactgcctagcagaggttctccatgaggacctcacccctacagaaaacttctgcctgggtatccaggcatttccatacatcttctgaaatctaggcagaggtttccaaacttcagttcttgacttctgtgtactcacaggctcaacaccacatggaatttg

SEQ ID NO: 733172 - DNA, 531 bp, Homo sapiens
tcaaagagagagcttgtgcagagaaattcttgtttttaaaaccatcagatctcgtgagacccattcactatcataagaacagcatgggaaagaccctcccccatgatttgatcatctcccactgggtccctcccacgtgggaattatgggagctacaagatgagatttggatggggacacagagccaaaccatatcacctagctatttttttttttttttttgtagagacgggggtctcactatgttgcccagcctggttgcaaactcctgkcctcaagcaatcctcctgcctcgggcctcccaaaatgctgggattatagggatcagccatcacacccagccagtctctctgtacctttaacactctcttctcctcatagggtaagtgagggggctgccagcagctccagtctcagcacataccacacccagcagaaaggcagtcaccctcaacagctgtggcagagaagacctaggaaggacagattagctggctggggttattacccccccacaaccaattgctgcca

SEQ ID NO: 733173 - DNA, 606 bp, Homo sapiens
cctccctgggctcatgcccatggtggggttagctgtgcctcactcaccacatctggtggtcttagagtgtcagaaaggtgagggtttttttgctgaaaagcacaaggagagggaaactgtaggaggtggaaagaagggagctcatacttattgagcatctcacctgtgccagacacttcatatgtattatctcctttggccccataacaacagtgggaagtgggttttgttctcccaggtttacagataaggagatcaaggccaagtgtgtgctttagggtaatggagctgagagttcaccccagagcagctttttgcactttctggttgtctgtatttctttgcactatgcattttttttttttttgagacagagtctcactctgtcacctaggctggagcgcagtggcatgatcttggctcactgcaacctcccscttccaggttcaagcgattctcccacctcagcctctcgagtcactgggactacaggtgcgtacgatcccacatggctaatttttgtgtttttttggtagaaatgggatttcaccatgtaggccaggctggtctcaaactcctgacctcaagttatccacccacctcgcc

SEQ ID NO: 733174 - DNA, 552 bp, Homo sapiens
gcattccaagtgccctgttctgcacctttaaaaattttttaacaatctaggacatagattattttattttatttttttgagatggagtttcactcttgttgcccaggctggaatgcagtggagcaatcttggctcaccacaacctccactggcttccaggttcaagtgatcctcccacctcagcctcccgagtagctgggattacaggcatgtgctaccacgcccagctaatttttttgtattttttagtagagatggggtttcaccatgttggccaggctgatcttgaactcctgatctcaggtgatccacccaycttggcctcccaaagtgctgggattacaagccactgcgcccagcctaggacatagattagatctggcctgtttttaacagatgcatagcatttcattgtgtggacataccatgatttatttaatttcacctctttttttcaatacaagatctcactctgtcacccaggctggagtgcagtggcgtgtcatagcttactgcagccttgaactcctgggctcaagtgatcctctgact

SEQ ID NO: 733175 - DNA, 600 bp, Homo sapiens
ccgggggggaggccaggatgagatatttgtgagtgggtttgttctgatgtagcaaaaactctctcgttgctgtgggctgggaagtggctgactggctgcgtggtcagagtttgcaaagcttttgcagatccttttgctagaggggctttaaaagctgcaagcgctcagcagttcctatcagctgggatttttttcctccagattgaatcctgtcagggttttactggctcatctgttcccagaatgacaccatgtcccctcacctgagcagcacggccttgccacccacggtactccctgctaccagacggctcccggaaggaattcttcaccagccctattttttgtcccctgaacccctctcctgactctctcaaaaccctctggtttctcccagaatttggagccragcccatcagggacaaaggaatgctgggaccttgtttggatctcagatttggtggtttgctccccttcctggtgtcatggtttgaagcattttcgaaggagcccccgaaaagcaaggacagtgtggagaggctgatgcccagaggcgatgcggtgtgtctgggaaaccagaggggaccctgcctgcaagtt

SEQ ID NO: 733176 - DNA, 617 bp, Homo sapiens
ggaacaaaattcaaaaagtaccaaggagaatataaggaaaagtaagtccctgtcacctcactcttgcttctctcctcttctccctagaggcatctactattagcaatagaccaaaaaaaaaatattttgaacagaatatttaggtcataaatagcattgaaaatcatgcaacaaatggaaagaaatcaatctgccagacccagaatgaaaggctagttgtggctaagcaaacctctcaraccctgggtggccaattaggctgttatttatcagacactgcctcaacaatatgcacattaagataatttatgaaaggctcagggaaatgtttttctagtcaataataattggtcaggtgatcattcttaactcacacacccaaaacaaagtttcttgtggacttgcaagtcactttcgttttcctggtgatttttaatgaacaaaaaccttcaaagaagatgtacaatttttctaaacaaaatgtttttggcctctactgcttgctgttatccctccttattttccaatgcccttctccttttcttcttccatacctctgatggcttactactaatatagaaaaggaacaagttctaggtctggaagcacggggtttc

SEQ ID NO: 733177 - DNA, 617 bp, Homo sapiens
ggaacaaaattcaaaaagtaccaaggagaatataaggaaaagtaagtccctgtcacctcactcttgcttctctcctcttctccctagaggcatctactattagcaatagaccaaaaaaaaaatattttgaacagaatatttaggtcataaatagcattgaaaatcatgcaacaaatggaaagaaatcaatctgccagacccagaatgaaaggctagttgtggctaagcaaacctctcagaccctgggtggccaattaggctgttatttatcaracactgcctcaacaatatgcacattaagataatttatgaaaggctcagggaaatgtttttctagtcaataataattggtcaggtgatcattcttaactcacacacccaaaacaaagtttcttgtggacttgcaagtcactttcgttttcctggtgatttttaatgaacaaaaaccttcaaagaagatgtacaatttttctaaacaaaatgtttttggcctctactgcttgctgttatccctccttattttccaatgcccttctccttttcttcttccatacctctgatggcttactactaatatagaaaaggaacaagttctaggtctggaagcacggggtttc

SEQ ID NO: 733178 - DNA, 583 bp, Homo sapiens
tacaggcaacaaataattaccacaactagccacctactatgtgaggcttggagaagagctttaaatgtgttctcatgcaaccttcccagcaactcagagaaataggaagtattacaatgatcactgtatagatgaagaaactgattcttaggacaggtaagataatctaccaaaggtatatacaactagcgagtgayagaactcacagttcaatcaaatctatcttcaaagttagttttgatgcttaaatgtactcccaccccaatctcaatgaaatcaaagttttaagaaaataatgtaaaaagttagtcaaagtatggacatcccaaccaagcctgcattgcctccaactgttccagtatttttctgagaatgtaacagccactgttatttacagagcaaacatgccaagcatagtgctaagggctttagatatgaacccaggtaatcttcacaacaaacctacaagactcaaagagaagaaaatctttccccctagaactgtgtatccagctaactaccttttgagatgaagggcaaaagaaagacatctatgataaacaaaaaagagcatttactacca

SEQ ID NO: 733179 - DNA, 579 bp, Homo sapiens
gtgagacccagttgaagaaattgagatttttaagtctgatacttgggggatatgagaactgtctttaaaaaaaatctcaagggcttcaagtgtgaaagaagaaattagatttattcaatatgaccccagagagtaaaacaagaaccaataggttctacaaamccacaaagagaaatattttcccctaaattaaagcaggaactatctaacaaaaacagaactgttcaaagaggtttatttgccaaggcaggccatttcatgtaagcaaaggtgggacagccattttgaagagatgtaacaatgtgtgtgcaaaacccctgcgggcgggctggctaagaggatctctagcttccttgaacactgggattgtacaaaactaagtggctggggttttgtcacaatgaagaagagtgaggctttaagcagtgataaaccacccaccactcgcacaagacacattcataggtaacaatttattttgcaaagaattaatagagggcactatacaatttcatttgagtggggaaagagcaaagtttggggaaagtccaccctactgtaacaggtagaaataatggc

SEQ ID NO: 733180 - DNA, 610 bp, Homo sapiens
atgaagaagagtgaggctttaagcagtgataaaccacccaccactcgcacaagacacattcataggtaacaatttattttgcaaagaattaatagagggcactatacaatttcatttgagtggggaaagagcaaagtttggggaaagtccaccctactgtaacaggtagaaataatggctccccaaagatgtccatgtccatttaattcctggaacctgtgaatatgttactacacatagcaaaggggaattaaggttggagatggaattaaggatgctaaccagcagatcttaaaataaggggattatcctggattgtcagggtgggcccaatgtaatcaagggttcttaaaagtrgaagaggaagatgtaactatggaaaagagaaacaaagagatggcattttaagaagggctcaatctgctgttgctggctttgaagatgaagggaagagccatacacctaggagttcagggaagcctctagatgctggaaaaagatgaggtcatagaatttgtcccagagcctccacgaggaacacagccccctgacacctcgattttagcccaatgagatccatgttggacttctagcctacaaaaatgtaaga

SEQ ID NO: 733181 - DNA, 596 bp, Homo sapiens
ctgaggcaagaggattgcttgagcccaggagttcaaggctgcaatgagctgtaattgcaccactgtactccagccttggtgacagagtgagacccatctctaaaaaaacaaaaagtgggcaaaggatctgaatacatatttctcaaaagaagacatgtaaataaatggtcaacaggtatatgaaaagatgctcaacaccactaatcatcagggaaatgcmaattaaagccacagtgtgtgaaatataatatcaccccagttagaatggctatgatgaaaaagacaaaaaataacaaatgctgggttggggggatgtggagaaaagggaattcttatatgctgttggtgagaatgtaaattaatatagccattatggaaaacagtatggaggtttttaaaaaaacttaaaatagaactactatatgatccagcaatccaactactgggtatttattcaaaagaaaagaaatcagtatatcaaagggatacctgcacccctatgtgtattgcagcactattcacaatagccaagatacggaatcaactgaagtgtccatcaacagatgaatagataaaggaaatgtggcatatatatg

SEQ ID NO: 733182 - DNA, 539 bp, Homo sapiens
agcacacactgccatcagcctttccatgtttgtctgaggagataaaccctgcactgcctgaggcaacagtgatggcctcccctgaggcagttgccaggcaagataatgttgtttctccttaggagccacccacaacaccaacacccctgtttatttctatrcctataactagactaaagtcctggtgggccccttgaggtgaagttcagtgtgtgacccatgaggaggtgcactgcacttgaaaagagaactgcttgagttttctaatttatataagcagaaatctggagaacaggcgtgcgaagtgatattaagagtttgggataatggtggaaagaacatagagctggatcaggctgaatttattgatttgggcccactaagcagagattctgcatttaatcttggagcctggggagtcaaaaaacgttctaatagtttatttgcttggttagctgaaatatggattaaaagatggcccacttgagccagctggaaaatgccttatctcctttggtttaatgtagtggaagggatcc

SEQ ID NO: 733183 - DNA, 501 bp, Homo sapiens
attcccaactgtatgggctggggtaaggaactcaggggtctaccaattttgcacatagacttctagccaattgttttctgacctgtgtctcagccttatctttttcagcataggatctgaacagcaagtatgcctcactcacagctagtatttctcttctctcggcactttcagttgtaccttattttgcctgctaagtcaaacttcatagaatgaattcaaatgaattcagatttcttgtctgttatgagttattctgttttttctttgtggcggggggtggggagtragtgagtagctttatgtctttaaagtatttttcttggggtttcaagtggaagggaagataaatgcttgtggtcaatctgcctcatttagtctgtacttcatgcatgattttttagaccttatccttatgccaattttctcaaagtgtgtttagtggggtgttaatagttgtgataaaaaaaataaggaaaagtcattctgtggtcaaaaatg

SEQ ID NO: 733184 - DNA, 501 bp, Homo sapiens
aaattagaacattaaaccttaatgtaggaaatggtaatcaaaatagttcaaactctggcttagcttggttcttaaaggctagtaataaactccctgacatgggggtttattgcaaagaacatgaaggagtttatgagtcagcatctcttttttagtcacactgacattctaggtttcagtattgaaaaggctgggtagtatagctgccttatggagtcataatagtagttcaacataagttactttcactgtttgttgaccctccatttaattatccttcttaagagagagaccttgatttaattggtgttacaaccattcaatatagggtactccctttgaaacaggattttgtrtcaagtcatctcagaaaaggctgggctccctcatgaccagtgaatttattctcactgggcactgatctctaatctaatcagctagtagcagaggatagaattcacttacagatgattgaatgagcactaatcattttacacagaa

SEQ ID NO: 733185 - DNA, 489 bp, Homo sapiens
ttcttttcttttctgagacttctatttagtgctgaggctaatttactatcttctataagaactggccagagacccctactgttttcattgatgaatatccaattacaggaaaaaccaatgatactacttcaaagactatttttaaaataaagcaatcatttggaaatcatcttcaaaaagaccactctttcccaaaggactcatgatagtgataatttttttktgtggattcagcatgaacctgacaaaaggaaatccttttaatatagcctttaaaggtgtatgtaaaattggtggggtaagggaacttaaagcacaatctcttttttttactttcatgaaggttgctcaatattatatagtgccttacgggtctttttccagcagggatccttataggaatcatgaaattcacctagcccagaggaaatgtgcttacctgtgttaagaaatgtactccatccactggcagatgaaatccaattccca

SEQ ID NO: 733186 - DNA, 505 bp, Homo sapiens
actttattattttaaactagactttaagtacttaatgataaattataagttgttctttaaataaaatctggataaaactcagtcacatccatagtaacttttttgacttagaatactaatgacaattattgttgcagacatttacctcttcaaaactttgtgaataatttgcaggtgattggaattaagccactgaacaccaccaacaaccaatacagtctggccagtattctctaggggacgtgatctgaaattcagaaagaraaacaacacatgttgccctaaaacagaaggtaaacattgtaactgcactgcctcacatttcactgtatctggcatcttgatcataagactccttgtactttccaacttgttttctgctgccttacttggtatctaaccttttgagcacatttgatgtacagtgagtagttgagcagtgacgactgctagcagaacatcagtactttgtgggttttgtgtctttcattatagtttcattgta

SEQ ID NO: 733187 - DNA, 581 bp, Homo sapiens
aaatgatgggggtagtatctcgcttctgtttcatgtcacgctggtattgaagagagcagaaaagagattatcttttgtttgataccttaagaatgatgcagaacatatgcttaatgtccatgttttaagaataatctgaagcagtgtagcacaaaaatggtctattatttcaggcctaatattttttaatatgtatttctatttgtgaaatattatttaaggacattgctttaaaattattcagtattagactgtcttctctgacttagtagagatctttttaatttcctccgcagcactgaacaattgaaaatatgtataatattcctaamtttttttgcaagactttatttttctgatatgttattgtacaatatttaattctaaatttatttcaatttctcccccttcagtttaatgagtggtgttaagaataatgttggaagagggatcaatgttgccttggcaaatggtaagaacaattattttagcttatggatgtaatcattgggtatttttctgtcccaaagtaaaatgcactatcagaggatcaggttagaaagtactgctcttgatgataa

SEQ ID NO: 733188 - DNA, 620 bp, Homo sapiens
aggacagctaagtcagtatatttagagcaatactagcatacgtttttcttaattgttatcagcattgaccaagtggtttggaaggaggcatgctttaatatcacaataattttgatttgtaaaccaagaaattaatcctgtgtttatctaacttcataatagcaattattgcccgaagctatagtggcatatttacaaaagttcytattactgggcggactgataacatttaaaaaataattgtgtttgaccccaaatgactttatacccaattctacataaaaatatagaagatctatctttttttgttaccttcagatgttcactaaataactcagtttttaagcagaagttttcagggcattaaatatatgttgtgtatgaagtatctcaaactggaacataaatttagtgatcaaactgccattcacagtgtaaggcagcacttaaatttcgaacctaaagtttagatgcattgtataaaaaaacctaaaagcagtatctgttatttagctgtaaaccaagttggaagctattcggataatttcttaaatattgatgaactttggagtactgtttcttccttcaaactgaatgtaattaattcatgaataaatgca

SEQ ID NO: 733189 - DNA, 619 bp, Homo sapiens
cactgtgcctaaagtgtttgtgtaaatgatgtggcttatggtgaacactgctttccttctgggaggccggaagtttgatgtgggctaagcagaagatgcacacatgaccagcaccacccccactgtcccccaaccagccatctagtagaaacccagtctcaagtctctaagaagcttccctggtagacagcatttccacgtgctgtcacagttcacgctgggggaatgaagcatgtctgtgtaactccaccgggagaggcccattggaagcttgctcctggcttcctccagactttgccctaagcaccttttcccttagctaattttgctaagtgtcctttcactgtaataagtcataccacgagtatawctagatgctgagtcttgtgagtcctcctagcaaattgttgaacctaggggtgatcttggagatcctgacttattagagtgtgaaagacatatatatataaaacattcatcataaaatagtgactaccattgcctccaccaccacctactatttatttgttatctactaaattctgggaaccattctaagcacttaaaatacattttctgatttaatcctgaacacaaactccgcaaggtagagattata

SEQ ID NO: 733190 - DNA, 595 bp, Homo sapiens
cagcattcccatatatcccctgtccccacacacgcacagcctccccaactaccaacgttccacataagagtggcatatttgtcacacttgatgagcctaccctggcacatcattattacccaaagtgcatacttcccatcagtggttactgttagtgttgtatattctgtgggttttgacaaatgtataataacatgtagccaccatcatagtatcatattaaagaatttcattggccaggcgtggtggctcacgcctgtaatcccagcactttgggaggccgaggcgggtggatcacaaggtcaggagatygagaccatcctggctaacatggtgaaaccctgtctctactaaaaatacaaaaaattagccagacgtggtggcgggcacctgtagtcccagctactcgggaggctgaggcagtagaatcgcgagaacccaggaagtggagcttgcagtgggccgagattgcgccactgcactccagcctgggtgacagagcaagactccatttcaaaaaaaaaaaaaaaaagaatatcattgccctaaaaatcctctgtgatcctcctattcatccttccccgctaaatcttca

SEQ ID NO: 733191 - DNA, 595 bp, Homo sapiens
cagcattcccatatatcccctgtccccacacacgcacagcctccccaactaccaacgttccacataagagtggcatatttgtcacacttgatgagcctaccctggcacatcattattacccaaagtgcatacttcccatcagtggttactgttagtgttgtatattctgtgggttttgacaaatgtataataacatgtagccaccatcatagtatcatattaaagaatttcattggccaggcgtggtggctcacgcctgtaatcccagcactttgggaggccgaggcgggtggatcacaaggtcaggagatcgagaccatcctggctaacatggtgaaaccctgtctctactaaaaatacaaaaaattagccagaygtggtggcgggcacctgtagtcccagctactcgggaggctgaggcagtagaatcgcgagaacccaggaagtggagcttgcagtgggccgagattgcgccactgcactccagcctgggtgacagagcaagactccatttcaaaaaaaaaaaaaaaaagaatatcattgccctaaaaatcctctgtgatcctcctattcatccttccccgctaaatcttca

SEQ ID NO: 733192 - DNA, 595 bp, Homo sapiens
cagcattcccatatatcccctgtccccacacacgcacagcctccccaactaccaacgttccacataagagtggcatatttgtcacacttgatgagcctaccctggcacatcattattacccaaagtgcatacttcccatcagtggttactgttagtgttgtatattctgtgggttttgacaaatgtataataacatgtagccaccatcatagtatcatattaaagaatttcattggccaggcgtggtggctcacgcctgtaatcccagcactttgggaggccgaggcgggtggatcacaaggtcaggagatcgagaccatcctggctaacatggtgaaaccctgtctctactaaaaatacaaaaaattagccagacgtggtggcgggcacctgtagtcccagctactcgggaggctgaggcagtagaatsgcgagaacccaggaagtggagcttgcagtgggccgagattgcgccactgcactccagcctgggtgacagagcaagactccatttcaaaaaaaaaaaaaaaaagaatatcattgccctaaaaatcctctgtgatcctcctattcatccttccccgctaaatcttca

SEQ ID NO: 733193 - DNA, 629 bp, Homo sapiens
ggtaatttgcagaaagactttgagaagttattgaagtacataggagagaggcatattttctaaactcctgtacccatcaatgataacctctttgcatcacaatttgtttccttcaaagttctatagatgtagctggcagtggtagcacgcatctgtagttcccagctacttgggaggctgaggcaggaggatcacttgagctcaggactttaakgctgcagagagttataatcacatcagtgcactccagcctgggtaatagggtgagactccatttaaaaaaaaaaaaaaagaaagttctataaatggttaagcagaatgtaaagagtttagggggatcacactgggtttgaatttcagctccattatttacaatctgtgagacaatgaataagtccctgtaccccctgttaaaataggacttcataagacgttggttaagcaaataaaagtgcttcgattcaattaagtgctcagtaaatgttagtgattgtgatgatgtgatgactaaatgacaacatcagtccttttccttctggcatttagttccctagaggacaagatctgtagccaacatgagtttagttcatttgaaggtgatttgctttccccaattcactgtttatagg

SEQ ID NO: 733194 - DNA, 621 bp, Homo sapiens
catggagctgggggtctggtggatcctgtcaatcatatgtctgtgggcagcacctgacacataatttttgaatccagtgctaactgaaaatgcagggcctcttgtttaaaaggcaagggaaaagtgccaccgaagataataaatagaaagttttttctctcttgcaaagtcartctcttgacttgtcatggtatgttttatttgctatttaatgtcactttaaatagcaaaaaattaaaatgttacattattagcattaattttactgttcatctttacatcctgcactgctagttttaaatgtaaatataagatcacttaacttgtatgtgaaatcactcaaatcccataatttgtatgtcatggcccgtacatacatatgtattttgttcttaccagaacgtggatacactgtacaaaacaagctcaaccacctttatttcacttcttgatgtgcacacgttctgccaactctctgctttctgtttacttgtgatgaggaaagatggaaaagaaaaagaactatgggccgccctatctttctcttgccttctatgtcatcattttcagtgtatgtggttgcctaacacaggggcctaatgcaggtaagatagggttctt

SEQ ID NO: 733195 - DNA, 612 bp, Homo sapiens
gtggggggtgaggctgcagagaatagggagagttatttcatgcaaacttttactcagaatgagcaaaggaagtgttcatttggcctttgaccagacctgcttctgtaaaatagtaatagtaccttgtctgagagtttatagcacaaagattagaaagcaacattcttatgcttgtctgttggtgtttggtgtaggagctctggacagaaagcctggagaaccagattctagtcctggctggactattaaatagttggaagagctttgggggtctgaaatccctcatctggaagacagagatgggtggagtggactggacaaagtctaacattcttttcaactatgaaatttttagcgtttcacatcaattttgctctttggagtaattgcaagtgcagggtgatacatttctctatatatttgtctaaggatttttaaattacgcaatttcaaacatatacgaaagtatrtttacctaattgttaagatcttgctttatttgcttcatctattcagtcctgtctccctcttttcggttgaattattttaaaagactgacttcatgtcatttttacctctacgtgcttcagtgttctgaattatgcagacatt

SEQ ID NO: 733196 - DNA, 463 bp, Homo sapiens
ataaaatttaggcacgatccttctgccagcaggatagagaataaatttgtgtactactaaggagtgcttgcatgtctaaattaagtatggaaggaaggcgtgatggttaatactgagtgtccacttgattggattgaaggatgcaaagtattgatcctgggtgcatctgtgagggtgttgccaaaggagattaacattgagtcagtgggctgggaaaggcagacccacccttaatctgggtggrcaccatctaatcagctgccagcgcagccaggatataaaacagccaggaaaacatgaaaaggttagattggcctagcctcccagcctatgtctttctcctatgctgatgcttcctgctctcgaatatcagactccaggtttttcagttttgggactcaaactggctctccttgctcctcagcttgcagacggcgtattgtgggactttgtgatcatgtga

SEQ ID NO: 733197 - DNA, 517 bp, Homo sapiens
aataggattgatataaatatctagttttgcctccctgtggccaatttcttactttctaaaactttatggatacaatccaaaatatacacatgtacatacatatttaacttaatgttattgcagataagaatttgagaaatgtggacctgattaatgttaatgggattttatagtattttttgcacaagtgttcaaaaataaaatttaaatatatgcaaagaaaaacacacatttaatttacattggcagtaaaagtggaataaaataaatatagttttagaataaaaatcaggcamccttgctaataagagaataataaatagctcaaaagaacagttgcttttttatgattccaatatttccatttggaatgctataatgtggctcaaatgtataaattaaacagtgttattctagtacctaatgatagcaagaataaacataaggcttcatcctgttttctttatctacaagtcttctattaaagatgtgagcctggtctcaggggaaaaataaa

SEQ ID NO: 733198 - DNA, 670 bp, Homo sapiens
ataatgtggctcaaatgtataaattaaacagtgttattctagtacctaatgatagcaagaataaacataaggcttcatcctgttttctttatctacaagtcttctattaaagatgtgagcctggtctcaggggaaaaataaatgagagtcctggcaatttttgcgtgtgaccagaacayagaagaatatcatggtttaaccatccaccaaactattatttaaataaatgaagatttataagaaaagaaaatgaatgtatatatttggctctgtctcaatcatagacttatagtacaagaggatatgtgaaaaatccatctaatgacaggtatgtggaaaaatgttcttcacaagtaagcaatttccatttatagtagatatttcattttctcccttttcatctcctctttcaaatgctaataccccattgattagggtggaggatggaaggaaaagcactttcttagcctgctggtgggagtatttgttgattcttttctggagtacagttaggcaatggttatggagaaccacaaacttgttcctatctctttcacctaggaaatctcaaaagcaatgagaggcatgcataaagatgaatgtttttgtaagtccataaaaagagaagccacataaatatccaataattgtggactagtagataaattat

SEQ ID NO: 733199 - DNA, 637 bp, Homo sapiens
tatacatatacttcttagctgtgcctagcaccctgcgagcagtaatgtgccagtcactgtgagcgtaactaaagcccagatcttggtttctaaatatcattctccactaaaagaagccatccctactcagacagagctgtttcagggctgtcacacaaaacagtgacatggtcctggaacatcacgctttaccagaaaggaggaaagtgcccaaagaatgatataaacatgttcaaacgacagaggcacttgaaggggctcctgctggccaaactggggacaattagaccatcaaagtaaattattatagtaatgattacaacccacagaatgggtaggaatccatgaatcaatattgatataaatagataaatgaataaattgtaggaagaaaaagaaaagttcctatactagaacacaaactaataaaggtaaaagaggcgatgagactagaaaatcaccgtttgactcccartgaagtaataaatgttgcaggcaagaagtatcagtggatgctaaaatttgggactaaacatctgatgagaaattggatatttacacagaaacaaagtacctccacaagacacctattatttacaaatggagagcaataaattctcaatggacaaatctaaca

SEQ ID NO: 733200 - DNA, 413 bp, Homo sapiens
aacagattacttttttgtaatgaaaattaataaccctctgaattgcctccagcaataagattgaatggcacagttaaaagtaataaagagaaacttaaatgtatattactaagtgaaatgtatattactgagtgaagccaatmtgagaaggccacatactgtatgattccaattataagacattctggaaaaagcaaaactatggagacagtataaagattagtggttgccaggggtttgaagggagggaggaatgaataggaagaacacaaaggatttttagggcaatgtaactactgagtgtgatacaataatggtggatacctatcaaaacaaatgtgcccaaactcatagaagtacaacagcaagagtgaaccctaatgtaaactatggactctgggtgttaatgatgt

SEQ ID NO: 733201 - DNA, 545 bp, Homo sapiens
tccttatcctgcagacttgctctgtccttcataaacaagctactcctggtacaaatacttgggatgcataatgtgccatcacacattcagctaaatgatgtctaaccttgaaagtacagtgcacgttcaacctcttcttgaagttaatgccaatcgtcctggcttgcactgatttcttgttgatatgaatgcctactgcatttacacacagaaccaacaagtttactagcaaggtgtttcctacttgtcttgggtatgggcttataaccctcaaactcatattttagctcagttcaatctttaagcatttctttagtgcctggtcatccaagggtctccactgtacggtggtggtacaaaggtggaaagacatcgcagcatgactktaagaagtagacagtctattctgggaatcacttgagcatagagagcacttatctgaaacaagtgaaaagcaaagatgagaggggcataggcaactcaactaactacccaatccttgtgttttcatactgcaaaaaggaaaacagtgatggagaaactag

SEQ ID NO: 733202 - DNA, 605 bp, Homo sapiens
aatgggcagtgatgagcttttctgagagatttacctgagagcaaatgtggccttcaccagaagagataatgaaggttattgttggccggtctccctagtgccagaagatcacttgtaattaaacctaattttgaatcaaccaaattagatggtacaggagattaatataaaactctccataactgacatgtttccatacaccctacaggccagaaggcttcaagacagtaatgccttcgatgccaaatgctcatgtttctaagtcactgtctggtctttcctctgcctcatcccccactcttaacagtagcatcttaatgacatgattgcattgaggagattattattttctcctgacatctcctttataagttctttctgcgttgtaaggtaaaccattagcaatgccscagaaacagatgaaacttcaaaaggcttgaaacgacattaaaaattacatattgagtttttcagaataagcagtaatgttcagacacaactttgtaccgtaagcaggggcattgttaaaagtaggaaaaggaaattggtaattatcttccaaacctgactcccatttcatgaaaatgaaattgggatgggactag

SEQ ID NO: 733203 - DNA, 572 bp, Homo sapiens
cagtagcatcttaatgacatgattgcattgaggagattattattttctcctgacatctcctttataagttctttctgcgttgtaaggtaaaccattagcaatgccccagaaacagatgaaacttcaaaaggcttgaaacgacattaaaaattacatattgagtttttcagaataagcagtaatgttcagacacaactttgtaccgtaagcaggggcattgttaaaagtaggaaaaggaaattggtaattatcttccaaacctgactcccatttcatgaaaatgaaaytgggatgggactagaagcaagaaacaaaacacctgtggtgctctggaagatttttccaccataaatggcaagaaggaagaacagacaaacacaatcttagattagcagccaataaagtcctcccatcctagtaccagatcatggctcctatgactaaataaagcactatttgtgaagcttcagtaatcgccctctttttaaaaaaaaaatataaagaggtaggttcaccgttgattaaaattgctcattttcaatacatctggcactctggacttcacaaacatg

SEQ ID NO: 733204 - DNA, 583 bp, Homo sapiens
agtggaagaaagggtatctgtgactgaagatcaaattaatgaaatgaagtgagaagacaaggttagagaaaaaagagtaaaaagaaatgaacaaagcctccaagaaatatgggactatgtgaaaagaccaaatctacktttgattggtgtacctgaaagtgatggggagaatggaaccaagttggaaaactctctgcgggatattaaacaggagaacttccccaacctagaaaggcaggccaacattcaaattcaggaaatacagagaacgccacaaagatactcctcgagaagagcaaccccaagacacataattgtcagattcaccaaagttgaaatgaaggaaaaaatgttaagggcagacagagagaaaggtcgggttacctacaaagggagcccatcagactaacagcagacctctcagcagaaaccctacaagccaaaatagagtggaggccaatattcaaccttcttaaagaaaagacttttcaacccagaatttcatatccagccaaactaagcttcataagtgaaggagaaataaaatcctttacagacaagcaaatgctgagagattttgtca

SEQ ID NO: 733205 - DNA, 633 bp, Homo sapiens
gcacattcaaagaaaaattgctaccaatccatttgacactattccacaacctagagaaagaaggaaccctccctaattcattctatgaagccaacatcaccctaataccaaaaccagtaaaggacataaccaaaaaagaaaactacaggccaatatcctggatgagcatagatgctaaaatccttaacaaaatacttgctaaccgaatccaacgacatatcaaaaagataatccaccatcgtcaagtgtgttttataccagggatgcaggaatggattaacatacacaagtcagaaaatgtgatacaccacataaacagaattaaatacgaaaatcacatgatcatttcaatagatgcagaaaaagcattcgacaaaatcaagcrtccctttatgattaaaactctcagtaaaatcggcatacaacggacataccttattgtccgtctatgacaaacccacagccaacataatactgaatggggaatagttgaaagcattccctttgataactggaacaagacaaggatgcccactctcaccactcctcttcaacatagtactggaagtcctagccagaacaatcagccaagagaaagaaatacagggcaaccaaatcagtaaagagggagtc

SEQ ID NO: 733206 - DNA, 512 bp, Homo sapiens
cacgtgatcctccctgcttggcctcccagagtgtggggatcccaggcggggtccaccctggccttgtcctcattttaaagacgaggggactgtggaagcacagggaaggcgcctcttcttccctgagctgcaccccttccacaggcacccatgctgcccgtgcagtggcgggtgcagcacagtcccactgctgagcggcttggcctgcagcgaggccccctcccacctgccatgctctcttgctggccgtggggcgggcgtggggtgacagggttgcctgtggtggccacagggccatgtgtgctttgagtctggcgccgtcatgctrtgcatggtgtccatctccattcagagacaaacacctcccaggctggccagaccactcacaccacttccacctccgtaggcctgagggagccgggtcccaggggagggctgtgggagtggcaggagaagtagcgatgtgtcttggggacgtaggccccagtcatcccaggggcctacggtgcatg

SEQ ID NO: 733207 - DNA, 569 bp, Homo sapiens
acaccggaggtttctcttcaaacataaggagttagaaattacaagtaggcatatgcttcctatattcagataaattcatttcgattaattaaattccagatagagagaagtaattttggaaaagaaatgatagctatattaaagcagatattcattacaataccatgtagagacataagcaatattttggcatcattctgtccgctcagtaggccgtgttccctctggtagggcctttggagagtaccatctatctaagatggaggaatgctgtgggaagggcgggatggaggtgcgttttctacgctgaaccccacacaggaaatctgcagcccacacagctgcctctgygccgccttccatgtgatcatcttggtcaatgaagtgaattgtcctatttctggggtagggggtgatggcgaatcggatactcaaatgttattttgtcaaatccgaatcatctctacgtgcttaggtttacatgatgtcaaaacacgtggttcattaagtgatcccgggaagaggggcagggccggtcggctggtttctcacttcccttccaggctcta

SEQ ID NO: 733208 - DNA, 569 bp, Homo sapiens
acaccggaggtttctcttcaaacataaggagttagaaattacaagtaggcatatgcttcctatattcagataaattcatttcgattaattaaattccagatagagagaagtaattttggaaaagaaatgatagctatattaaagcagatattcattacaataccatgtagagacataagcaatattttggcatcattctgtccgctcagtaggccgtgttccctctggtagggcctttggagagtaccatctatctaagatggaggaatgctgtgggaagggcgggatggaggtgcgttttctacgctgaaccccacacaggaaatctgcagcccacacagctgcctctgtgccgccttccatgtgatcatcytggtcaatgaagtgaattgtcctatttctggggtagggggtgatggcgaatcggatactcaaatgttattttgtcaaatccgaatcatctctacgtgcttaggtttacatgatgtcaaaacacgtggttcattaagtgatcccgggaagaggggcagggccggtcggctggtttctcacttcccttccaggctcta

SEQ ID NO: 733209 - DNA, 570 bp, Homo sapiens
ggccactcctgcacagtggatccaccctcccgaaagtggcagatgacaagcacactcttcctggaaaccgcctcgaacgtgctggctactgcattgttaacacaacttcaaccaagaaggtgaacgggtgctttaagaaaaagtattttttttaagcaagtgaaaattgatgaaccgattcccctccacccgtaactggatttttccacaaatctctctttattattgtttgattaaacaaaaatacacttttaactgctaaactgcgctgactacgggagagctaagggccctattactatgcagttataatagaagacacacaattaaagtcagatcatgattcctgacaacatccgtggggtgggggctcccctgaggccccygaggctgccgctcactggggaagggccttgaggatggcgttcacctcctcagccacggctgtcagcgcgaactcaaactgctcctgcagggcgagaaacgagagaagtgccaatgagagcggcgtccccccgactcctgccacagcgtcggctccctgcagatgaaagcggcgtccccccttcc

SEQ ID NO: 733210 - DNA, 625 bp, Homo sapiens
tgggtgtgtgcaggtgtgtgggtgtgcagtgtccctggctgcgtgtgggtgtgcgcagtgtgcaggtgtgtgggtgtacacagtgtgtgtggctgagtgtgccgcctctctggcggctcgtgtggtgtcaaagcccgcactgccgttcagcccctgggtgcctggacttctcttctaagatgatggagtttgtggtcggggactgagttgccaaatgctcaggtgggcgctggtgaaayattttctattcgacccaaattccagggaggaaacagctctcctgaggggcatcttttttaccacaacgatgatgttttgctgtcagggcctgcggtcatcctggtcatggtctccgggtgctcaccctcgacggctcgctctttccttgtcttcagttccaaaccaggcgacgtgacttcctccgttcaaaggagctgcaggcgcctcctcttggcttcgtagaagcaagcattcagattggacagcagcattttgcccaaataatttttctatctttgtgaaactgaacttgtaggggaagtttagtctcggggcgatgttgggcagcgcagtcacggattaagatgtgatggtgactttcgcatggttccatttccttatgcct

SEQ ID NO: 733211 - DNA, 632 bp, Homo sapiens
gggcctgcggtcatcctggtcatggtctccgggtgctcaccctcgacggctcgctctttccttgtcttcagttccaaaccaggcgacgtgacttcctccgttcaaaggagctgcaggcgcctcctcttggcttcgtagaagcaagcattcagattggacagcagcattttgcccaaataatttttctatctttgtgaaactgaacttstaggggaagtttagtctcggggcgatgttgggcagcgcagtcacggattaagatgtgatggtgactttcgcatggttccatttccttatgccttgaagttccaggagctgaatttatgtgcatgctccaagacagctcctgaacacacaccctgaggaagagggtgaactcctccggacgcccagtccaagaaggaagcagctaggaagctgactctgttatctggagtgcagaaaacggagcttcgggtcaccaagtgatctgggcaacagggctggggtgtgtatgtgttatcatcttgctatttatttatttatttatatttaagttctgggatacatgtgcaggacgggcagctttgttacataggtaaacgtatgccatggtggtttgccgcacccatgaatccatcaccgaggaatta

SEQ ID NO: 733212 - DNA, 561 bp, Homo sapiens
caatatctgacctgcctttcctccaaatttcttagctggaattctgtaaagacggattttcccttatccactgcttgggtcccagaggtacagtttctgcttcaaaaggccccgcacattcttgtttttcccgagtcccagtgtctagagccactggctggctccctggctcctccgaggascccgaggtgaccagcggctctgttagttccatcgtgagcccacaagctgtgatcgcacttgtggtgtttcacggttgaggccattgcccttggaagctcggatggccgcatcctggggcgacagactcctcggtgcctgcagttcgtgctggcctcagggcctcggctgctctgggtcctgcctggagaccccaaggctgcctctgtggacggagggagagagtattttttaaagagaaaattcatattaggatatataatataaagaatttatattaatatttccagttcaaatttaggattacagggttttcactatttagattttatatcagatttttttcttttactctgagaatttgaattttttttttttttt

SEQ ID NO: 733213 - DNA, 561 bp, Homo sapiens
caatatctgacctgcctttcctccaaatttcttagctggaattctgtaaagacggattttcccttatccactgcttgggtcccagaggtacagtttctgcttcaaaaggccccgcacattcttgtttttcccgagtcccagtgtctagagccactggctggctccctggctcctccgaggaccccgaggtgaccagcggctctgttagttccatcgtgagcccacaagctgtgatcgcacttgtggtgtttcacggttgaggccattgcccttggaagctcggatggccgcatcctggggcgacagactcctcggtgcctgcagttcgtgctggcctcagggcctcggctgctctgggtcctgcctggagaccccraggctgcctctgtggacggagggagagagtattttttaaagagaaaattcatattaggatatataatataaagaatttatattaatatttccagttcaaatttaggattacagggttttcactatttagattttatatcagatttttttcttttactctgagaatttgaattttttttttttttt

SEQ ID NO: 733214 - DNA, 609 bp, Homo sapiens
ccaccacgcccggctcactttgtatttttagtacagatgggattctaccatatcagccaggctggtctcaaactcctggtcttaggtgatccacccgcctcggcctcccacagtgctggaattacaggtgtgagcccaccacgtccagccagatttttagttcttaatacataacatagttacttatttgacatayagaaaatttgatatatagaaaatataataatttaaaaatttaaaaaaatttttaaaattcagagagagctcttcgatcctttttctctttctttctttcttttttttttttttttttttgagacggagtctcgctctgtcgcccaggctaaagtgcagtggtgcgatctcggctcactgcaacctccgcctcccagttcaagcgattctcctgcctcagcctcccgagtagctgggattacaggcatgcaccaccacgcccagctaatttttgtatttttagtagagacggagttttgccacgttggccaggctggtctcgaactcctgacctcaggtgatccacccgcctcggcctcccagtgctgggatgacaggggtgagcccccgcgcccggccccatggttgttctca

SEQ ID NO: 733215 - DNA, 609 bp, Homo sapiens
ccaccacgcccggctcactttgtatttttagtacagatgggattctaccatatcagccaggctggtctcaaactcctggtcttaggtgatccacccgcctcggcctcccacagtgctggaattacaggtgtgagcccaccacgtccagccagatttttagttcttaatacataacatagttacttatttgacatatagaaaatttgatatatagaaaatataataatttaaaaatttaaaaaaatttttaaaattcagagagagctcttygatcctttttctctttctttctttcttttttttttttttttttttgagacggagtctcgctctgtcgcccaggctaaagtgcagtggtgcgatctcggctcactgcaacctccgcctcccagttcaagcgattctcctgcctcagcctcccgagtagctgggattacaggcatgcaccaccacgcccagctaatttttgtatttttagtagagacggagttttgccacgttggccaggctggtctcgaactcctgacctcaggtgatccacccgcctcggcctcccagtgctgggatgacaggggtgagcccccgcgcccggccccatggttgttctca

SEQ ID NO: 733216 - DNA, 516 bp, Homo sapiens
gccgccactgagctggcagcttggcgcagctccataagaacacgggctttggtgcttggattccaggaagagtgactgtgtctttcctgtgacctcagcgaagcctgggggctttctagggtagtggtttttttttttttttaacaaaggaggggctgccgatgtcccagaaacgtcaccgcagacgctgcagcatcagctgccacctttcaggagcttcaccgcctgttggcatttctgatcgaaggagaggggcaaatgcagcaggggcrggaccctcggcctggccactcacacacctcagcctggttggcagttcacagggagagaccctctgaggtgaaatctctgatgctgtccaggttcctaccatcccctgacgccctgcaccaagcatggcagcttttggggtccccacgaagggtcaccgacctgagaggttctcgctgctgctgatggagccacaaggcacggagctaacgtgctgagtagggggtgcagacccggcccccgcct

SEQ ID NO: 733217 - DNA, 601 bp, Homo sapiens
tgtataagaagtaattaaaactcttaaataaaaacttacacttaatagcagttcaatataatgcctacagttcaaacactattctaatctctagggaattatactttttatagagagtaaactactcaattaatagtacaagtgaaaatttggagttaagttattgttttaggcaatttagagaagataaaaataacaaagttgtttattgagcacttactatgtgcaatgamctattttatgttctttacaaaggtgaatttacattcatcttaacttatggggtaggaacgacaattatcctgaaattactgattacaaaattaatatttagtaaggttgtgtaacttgtcaaaaggaatatgtttaaaagtggaaaaacaaaagttacagtcaaatattgctaaaaactgtattgtaacaaagacaaaaacaaaaatataaatgtgttaatttactctttcacccatttatatatccaacaaatatataatggcacagcagtaaaacaaaatcaaaacagtttcagtccttaatgaatttatagttgagttgagaaaataaacattggttaaacaatagctcttatacatgaaaagta

SEQ ID NO: 733218 - DNA, 544 bp, Homo sapiens
atcatccttgaaacaagtgataaataaaaatgttcagaaaaaaagtatataatgaagaacaaactgggaattcagaaataaaactatatgataaccaaattacagaactctgtgaatggacacaatagcaaaatggagatgacagagaagcaaatcagtggatgtgaagacatattcataagaagtttccaagctaaacaacagacaaaattatctgatttggttcaaatgtatgtatagaaaatacacataagaaaatcataacagaaagggagagaatwgttatggtaaggtgcttacattctattcaaagtggtgaagtattgatagtattagactgtgataagtaaaatatatattccccacgaaagaatttctcaatttagtatggatgacattttctgccagataactgttgtgtagaactgttctgcacattgtaaggcttctgacaatatgcctggcctctaacaaccagatagatgtcattagcaacccacttcccagttacaaatgaaaaacatctccaaatattatcaaatgt

SEQ ID NO: 733219 - DNA, 628 bp, Homo sapiens
atatagaccagtggaacagaatagagcccttggaaataataccatacacctacaaccatctgatcttcgaaaaacctgacaaaaacaagtaacagagtaaggattctctatttaataaatggtgctgggaatactggctggccatatgtagaaagctgaaactggatcccttccacacaccttatasaaaaattaattcaagatggattaaagacttaaatgttagacctaaaaccataaaaaccctagaagaaaacctaggcaaatccattcaggccataggcatgggcaaggacttcatgactaaaacaccaaaagcaatggcaacaaaagccaaaattgacaaatgggatctaattaaattaaagagtttctacatagcaaaagaaactaccatcacagtgaacaggcaacctatagaatgggagaaaatttttacaatcttctcatctgacaaagggctaatatccagagtctacaaagaacttaaacaaatttacaagaaaaaatcaaacaaccccatcaaatagtgggcaaagaatatgaacagacacttctcaaaagaagacatttatgcaaccaacagacacatgaaaaaatgttcatcatcactggccatcagagaaat

SEQ ID NO: 733220 - DNA, 633 bp, Homo sapiens
agcaagaaaggaagaaagttgtttttgtttttgtgtttttaatttgggggcagaaaacacagatgtggtcacaaataacagagcaattccaccttacttgcaaagttgggatccctgtaaatgcaaattaattttgatttccaaaagactccctctaagtttcatcaactgcttgcctactcctaggacgtgccagcacacatcctttccagtgcagagcaaatacatatctcatgggccagctcctgttcagcaagggcattgaattacattatgaagaaaaatgccaattstctgggtcaaggagtaaagagatcagcattgagcttgagctatttaccattaacagagtagagaggagacataaattagtaggttttttaaactctgtattcttctttccctagcctgccttacttccagaaaacccctgagctgtatcactcagtctgtcaacttcctaaaacagatattggctgtactctatacctgaatattttaatataatttctccaagaagattcccacaaggggaatactaatttgaatttctttggttgcacaacacttccccaaatttgcacttttgcaaagccattcatttcctacaaagcatcaagttcctagagaaaa

SEQ ID NO: 733221 - DNA, 408 bp, Homo sapiens
attacttttttgtaatgaaaattaataaccctctgaattgcctccagcaataagattgaatggcacagttaaaagtaataaagagaaacttaaatgtatattactaagtgaaatgtatattactgagtgaagccaatmtgagaaggccacatactgtatgattccaattataagacattctggaaaaagcaaaactatggagacagtataaagattagtggttgccaggggtttgaagggagggaggaatgaataggaagaacacaaaggatttttagggcaatgtaactactgagtgtgatacaataatggtggatacctatcaaaacaaatgtgcccaaactcatagaagtacaacagcaagagtgaaccctaatgtaaactatggactctgggtgttaatgatgt

SEQ ID NO: 733222 - DNA, 616 bp, Homo sapiens
cccaaactcccttggtttataccccatgtcactggccactcttttttagtttctattgttggctctaattctttgccttcattttgatctttggagtgttccaggactcacttcagagccccttctaactatctattcactctgtctttagataatctcatctagttccatgtcttcttatactattgatatgtccaagactacctaatctacatgtttatccctgatctcccctggaactctagcaccctttttctttctgcttggcctctgtaaatggatgtctactacggatcttaaactctacatgtctaaatcagaattcttgatcccctttcctccaaaacttggtttgccaccaggcattcttgtcawctgtttatcaaaccaagaatctaagatgtattctcgattcccctctttaatgttccaaatcctattcaccacagcagtcctttgaactctgtctcagaaacagcactttcttctctccatcccagcagcatccttcctagtccaaactatcagcatctcttcactagacttctgcagaattttcctagcaggctgccttaaaatccattcaccacagtaatcctttttgaatctttatcag

SEQ ID NO: 733223 - DNA, 529 bp, Homo sapiens
gaactgtgggccaattaaacctcttttctttataaattactcagtctcaggtagttctttatagcaatgcaagaaaagactaatacacttggcttagtcagcttgggctgctataacaaagtactgtgactgagtgggttacaaacaacagaaatttatttcttgcagttctagaggctggaagtccaagatgaggtttccagcacagttggcttccagggagggccctcttcctcttccaggttgcagactgctgacttcttgttgtgccctcttatggtaaaaacagascaagctagctctctggggtctctttcataaggtcgttaatcccatttgtgagggctccatcctcatgacctgattacctcccaaaggctccacctccaaacatcatcacattgtgtgggggttcagtcaggatggtgggaaaaattgtaaaataaaccttcttgaaaggccagaaggttttagcaaaagcctcaggatagagttatggctgaaggcagcctaatcctctttgagctat

SEQ ID NO: 733224 - DNA, 557 bp, Homo sapiens
ttgtaccatttataatagcaaaaattgctgtccaattaaaaagtgtttggaagagaagactccagtttaattatgaagggcatcattactataaagcaatgacagggtatgctcaggaatgaatccattatcacagaaggaccacttatgcgacaatgatgttttctcatctgcccccaatatctccatttcgtctagttcctcctacttatcctcaccacaaggtaaggtatctgaaagtgctgaacacaccgcctgatgtaaagcaggtatgcaatgatattcattcatttatttcaaatatwcactcatcccatcatccctctggaaccaatccatttgctacccaggatagaatttaaggtactttaagtatctaatcgcaagtaagccttactgctgtccactctggtctgtgggccatgagtctgtatcctttaataaattcctgcttcacacagtaagaactgtgctttcctatcccaatctctgcctaatagcccaacctaaatgcgttccagcagccccagccccatgcctggcctccagtatttcca

SEQ ID NO: 733225 - DNA, 634 bp, Homo sapiens
tctggttgggctttttctttattgtgggtagtgttttcttgctgcattgcatgcctggtaattttttattggatgccaaacattgtgaatttcaccttgttgggtgctggatatttttgtactctatgtatatccttgagctttattctgggatgcagttaaattactttgagacaytttgatcccttttatgtcttgcttttaagattgttagatagaaccagagcagcatataggctacagcttattattccccatgactaaagcaagacaaatatgagtcttttacctaattttctttaaataatgagatatataaatctggctagtgggaataggcacttttccctgacttgtgtgagcatcaggactgttccctctaatcctcttggatggttctgttctggcctcaggtagtttcctcattgcatgggttgctcagtgtagtagtttccctttacacacagaggatattttctaagactcccaggggatgtctaaaacctcagatagtgctgaaacctatatgtattacacacacatttcttttttcttcttcacaattgcattgatagaagatttcattcttagcatagatcttagcagcctcagtataattttttttctttcttta

SEQ ID NO: 733226 - DNA, 576 bp, Homo sapiens
ccaccatcgattatggcaaatacattttcttgaaacatggccacacttactcatttacctattgtccttggctgctctcatgctgcaacagctgagctgaatagttgcaaagagacaggcaaagccagaaatattttctctctggttctttacagtataacagtgctgcatccctatctaaaataatttaataatccctgggcatgtgtgttcaacaatatgccagtattacatgaaaaggtcaggggcctcttcacccagccttattttcaagtgttggatattttcttaccagtcttactaatggaagctttctttttagcctgcataaaaccaagaacacattytcactcaaatactggtacttattgaagccaaaagatcccaataataattggagtgagctgggcctccagggaatgtgtatgagggacaggatttactcttgtttactttatttgtgccaggcagtatgctaaatgctttgcatgcatcattttattaaatcttctaatagccccattatgaaggggctactattattgaaagtagacaacttcatcaaagattcattca

SEQ ID NO: 733227 - DNA, 568 bp, Homo sapiens
cttaccttagcagggaaagtgcttatatccttttcccatatgaaagggataactttgggactttagtttagaccttgttgctgtttcactgtgttggagacttgcagaagattaggaataccctccactgtgccttgtctagcttccactccacagtcaycaaactgactcatcttctcaatcatttcctcccattagctttccctgtcatcacaatcactcaaagaagctgctccttctgccaccaaaaaaaatgttaatggatagaagggctccccactgccatattctgatcacaacttgttgcctttacttattgacacttgaactctatgccttcctctctctttggttgcagtcacctgctcaactgactttttccttagtgacatcaacgtatggctcagagacctcaactccactcttcctccttgtctcctgtcaacttcaagttctaagagtatgactcttctaacactaaaccttagaatgtatcaatctccctaacttgagtgattacaatactaatattatactttctgctgttctattatactgtgctacttta

SEQ ID NO: 733228 - DNA, 568 bp, Homo sapiens
cttaccttagcagggaaagtgcttatatccttttcccatatgaaagggataactttgggactttagtttagaccttgttgctgtttcactgtgttggagacttgcagaagattaggaataccctccactgtgccttgtctagcttccactccacagtcatcaaactgactcatcttctcaatcatttcctcccattagctttccctgtcatcacaatcactcaaagaagctgctccttctgccaccaaaaaaaawgttaatggatagaagggctccccactgccatattctgatcacaacttgttgcctttacttattgacacttgaactctatgccttcctctctctttggttgcagtcacctgctcaactgactttttccttagtgacatcaacgtatggctcagagacctcaactccactcttcctccttgtctcctgtcaacttcaagttctaagagtatgactcttctaacactaaaccttagaatgtatcaatctccctaacttgagtgattacaatactaatattatactttctgctgttctattatactgtgctacttta

SEQ ID NO: 733229 - DNA, 616 bp, Homo sapiens
ttatattcctgccagcagtctataagttctcattcctccatgttcttgtcaaaactggttattgtctgtctttttattatagctatcctagtgggtatgaagtaatatctcattgtagtttttactttcacttccttaatgactaataatgtggaccatatttttatgtgwtttttagccatttgtgtaccatctttggagaaatgtttactcagatcctttgcccattttttattggattacttgttttcttaattgttgaattttaagagttctttacgtattctggaaacaagtcacttgtcagatatgatttgcagacattttatctcattctgtgagggttttttttcagtttcttgatggtgttatttgatacacaaaggtttttagttttgatgaagtctgctttgtccttattttttctattgtcatttaaacatgtggtgttgtaactaagaaactgttgcctaactcaaggtcacaaagacttacttttacgttttcttctaggagttttatagttctagctcttacatttaggtctataatccattttgagttaatctcatttacagtgtgagatctggatccaaatttattattttgtatgtga

SEQ ID NO: 733230 - DNA, 611 bp, Homo sapiens
cgggggtggcaaggcaattaaggggaactctctccatttggctgtccttctggggtattatggcagctgcagccaatattgaacagggagctgcagctgtttacagatgcattaggaaggcgaggctctggaactsagttgcacaatttctcctgtgcaaaagaaaagccaaaattgtcagagagggaggaagtctaggggatataagtaaatttaattttcagcgagagctcaatgtgctaatcctgagtattactgctgcaatcagtcagaatctaggtttctactggtcacaggaaaggtgatttatgttctgaatagtcaaatcactcctttatttcccaatatatatatcagctactcttatacatgtgtgccagtctatcttacatttagaatatttataaagctcattcatgctaaggaatttttagtgtttgaattgtctgtgggttgcaaggctgccaattttcagaagtttgcaccatgataaattcagaattgtaggtagggactaaaacatcaagtcttctggagctttggtaataaaaagcttttcattgaaaagcatagagcttcaaatgggaattatgagaattaaagggtctggg

SEQ ID NO: 733231 - DNA, 591 bp, Homo sapiens
gctccaggttggctttgtgccccacctggccaagtacatgctaagagcgaagagtgtagactacaagctacactatttcatggcatcattcagaaaattgagatttgttcctatggccgcccccccttggccccagccccaatgcttgtcagtctggggtattcatggggttctgctggtggtttgccttcttcacaggaaaatatattttttcctgccgaaaatttcagcctgggcattcaattcctcagtctggtggtcggcactatgtctgtaaaatattctataacatttctcggctttagtgaacagattatcacccatttttattttcgtaggaatcggcatagttgggacacttaactgaaatgattggaccacactgtgaaggacataaagagctatgaaaaatcccarctttgttgctctacagaacacagaaatatctgaatgaacaaattcagtaagccaccctgatatgttgtctctgcaacatgatccattcacctatatatagatatttaggtttctcattttcttcttgatgtttgatatcataaaaatatagacaacatccatggatcctgatga

SEQ ID NO: 733232 - DNA, 645 bp, Homo sapiens
taataaataaattcagcaaacttgtagaacacataatcaacatacaaaattcagttgtgcttatatagactgaaaacaagccattcaaaaagaaaattattaaaacaactacatttacaattgcatcagaaaagtaatagactcaagattaatcaaggagrtaaaagatttgtacactgaaaaaaacgaaatttgtaacaaatgaaattaaagtggatgtaaataaatggaaagacatcccatgttcatggattggaagacttaatattattaaatggtccacattatccaaaggaatctacagattcattcttatctcgccaaaatctcagtggcaagattttgagtggttttttacagaaacataaaaagtcctaaaatttgtgtataaccacaaactaaaaaatccagatagctaaagagattttgagccagaacaaagctgaagatatcaaattccttaatttcaattatgccacaattattcagtaaaacctgaagtatgggtgcagcataaagacaaacatatacaccaatagaacagaataaagagctaaaataataaatccacacatatttgtctttgacaaggacttcccgaatacagatgggaaaaagataatctcatcaataaattatgctgga

SEQ ID NO: 733233 - DNA, 632 bp, Homo sapiens
cacagctgggaaaagatctctaggcttgaggagctctgaagaaaaaacctccaaaactgaaaagccaaaaggaaaatgtctgaaaaaaaatgaacagaatatctaagaactgtgggacaactacaaaaggtgtaacatacgtgtaatgaaaatacaagcagaagtagaaacakataaatgaacagaatatatacgtgaaacaataatgagtgagaatgtcccccaaattaaggtcaaacagcaaactacaaatacacaaatctcagagaacaccaagcaggctaagggaaggaaggaaggaagggagggaaggaagggaaggaaagaaagagagagaaagacaagaaaactgcacctaggcatatcattctgaaactatagaccatcaaagacaaaaaaaatcaacttatttatcaagtaggaaagataagaattacatcttctcagaaaccatgccaacaataagagagtagactgatttgaaatgatgaaagaaaataaccttatgtattctgtactttgaaaaattatcattaaaaagcaaaggagaaacagactttctcaggcaaacaaaaattgagggaatttgttgccagtaacttgcccagaaagaaatgttaaaagaaatttct

SEQ ID NO: 733234 - DNA, 631 bp, Homo sapiens
cctcagggatataagtatgggagttaatagagaagcccagtactatgcactaggggatacatacacttaatgggagaaagaaggattggcacaggagaatcaaaactttccccaatacttcctgtttaataccacatttaatatttataattaacattaaatgactatattcttcatttgcctcataattttttctagttgaactgaataattcctaagactttcacatatgtgataatattgtacataataaacaaaaagttgtaattgccagatactttggtcattattagcatgatcaagtcgatttttcctttattatcagatccaaaaacatgtgatttcttttgtaaatggaatctctaagttaatatatttaggataaaatgtctaattgttaacaaagtacacaccaaaatggaagaatctttccccacattctggaatarctacttctccaaaagttcctttgcaaatactcctctaaggaggagggttttctaaaccaacagtggtcaattattttttcgacattctttcaaccacgctcacctgtgctgtgccttttaacctctgttgccatcttcctgtggatttctaggatccagttttctttctagggctttgacca

SEQ ID NO: 733235 - DNA, 556 bp, Homo sapiens
ctacataagccttttggattggctttgatggacatgtgttccacaaggaatcactgataagaccttttaaagctcagcccagccaagggtttgcatcctcaaataccagcaagttgggtgatcctctcctcctaaggccccaagataaacytggagctcctgcacctgtaagaaagtgacagtctttactgaccacagtcaggaaccctgttcaggactgtgtaggaaagggtatgaggccagtttccccattaactttagtctagttaaataaagtctatttaaacaactcagtcctatgaggttttattggctctatgagtcgagcttgactccttaaagggaagcatacccttccagtcaaagccttggtaaaataaccactttctccaatgtgtcctgttgcaaaacaaaaatggattcttaccgcactgatgcaaacaactatattgccataagaataagaatattcacagaggccaggggtggtggctcacgcccgtaatcccagcactttgggaggtggccagatcacctgaggtcaggagtttgagac

SEQ ID NO: 733236 - DNA, 567 bp, Homo sapiens
ccggagttacaagccatgccctcagggtgtaaaataagatggaggcttgatttcacaaccacaactttgcagaaaatataaacagtgctagttgggtcgggggtgagggggtcctgccctagtaaaacagcttctaggccgggcgtggtggctcacgcctgtaatcccagcactttgggaggctgaggcgggcagatcacgaggtcaggaaatcgagaccattctggctaatgcggtgaaaccccgtctctactaaaaatacaaaaaaattagccgggggtggtggcatgtgcctgtagtcccagctactcaagaggctgaggcaggagaatctcttgaacccgggaggccgaggttgcagtragctgagacggcgccactgcactccagcctggggacagagcgagactccatctcaaaacaaaacaaaacaaaacaaaatcttctagaaagaaaataaaattttaaaagttaacttgctgacagggtacagaaggggaaagaaaagaaacagtttaaaagtgcatggggaagaacctcttattgttatgcaagtggttcctccac

SEQ ID NO: 733237 - DNA, 607 bp, Homo sapiens
ttaatatactttggggttttttgagtaattttacattcccagaaaaactgggtagaacatacagtttccatacattattatccaaccctccccacttataatttcctgtgttattaaccatttgcattagcgtggtacatttataatattcttttaatatatacctttggtagcatttatattaataataatctatgcttaatagcagctgaaagtacatttttaaatggatattttacctttatgttaaagataaacataaagatctatacagagttacaactatatatttttatgagatataaatagtacataatccatcccatttttatgatactttataagattttaagcctaccttgatgctttttgaaacacamacacacacacacacacacacacacacgcacacacaaaactgcttgtttattttctgaggcctgcgtgggcactttacttcaaaatgtgctaattgctctgacttcggccagggctctttgctgggctgcacacctctgcctgctacatctgtgtttacataacttgtgggatcactcagagtcctgctgcaggtccctttagcttctttcaggaccaggcctcagtg

SEQ ID NO: 733238 - DNA, 595 bp, Homo sapiens
catatttattaggtgatgcaaaagtaattgctgtctttaccattaaaagtaatggccaggccgggcacagtggctcatgcctgtaaccccagcacttctggaggccagtggatcatgaggtcaggagactgagaccaccctgactcacatggtgaaaccccgtctctactaaaaatacaaaaattagccgggcgtggtggcgggcgcccgtagtcccagctactcagaggctgaggcaggagaattgcttgaacccgggaggcggaggctgcagtgagcagagatcatgccactgcactctagcctggtcaacagagccaaactccgtcttaaaaaaaaaaaaaaagtaatggtcaaaacggctattacttttgtaccaacctatatgaaatctaatatgaaaatgattgtatagtactgtagtattttggycactgtatagtgataagtttctttaatttttatgttatatgcatttaatcaaaaaattgatgtaggcttctgacagttttgtaaatcctgatttttttctaggtgagccacattatatcgtgattttcagaaagcattttctaaaagagcaacttctgagaag

SEQ ID NO: 733239 - DNA, 596 bp, Homo sapiens
gtatttgcacattttctcagctgggaggaaaatttcatggcaatggctgtggcagatacatggaaaacacacaaagtaaaactttacaagtttcattgacttttatttccagaaaacatgacccaagaaaatgcattttggaagatkaatttttatctatagtttgttgtctttgatgataaaaccttatctgagaattgctgtgaaacttttatgagttcctctgaccattttgaaacatcagtaaagtagaaaatgaaaccacttatttaccagagtgataaagcatacaagatttacatgtagtctctacacagtttttctttaaacaatctggtttctttaaggcgcaatgtaaggggctgatatcagttcatgttggttgagttgtgtttaccatgagatttagtttctttcttaagtactttaaacttagtaggttcaaggatgctcagtgagtccagacactcaataaatgctgtttgatgatgataatgctgaagttgcaacatgagtgttcttgtattcactcacactgaatgtcttactaaggttcagactggcctggcgcggtagctcatgcctgtaatcccagg

SEQ ID NO: 733240 - DNA, 583 bp, Homo sapiens
atactgtatatggttctctttccaacgattccatcggcttatttcattttttctacaagagggcattctgatgcaatttttcttaaaaatccccttaggggaccaatcaatgatgattccataggaattattttgtaacacctcagccttacttgctataaaattttccccattccaagcatccacaccttcaaaccaaagtctattttgtttacattcgagtttgtytggacagaactgctgagatttagtgctagaatggttatattttaaactttgtcccaaaatcatatgtaaagtagcttgtgatttagttttttctggggattactaccaatcatacttgtgtgctaatttgtaagcaatccagcagcaggtcctaggcatattggaggatatttatatcctattgacatattcatcttcatcccttcctcattaggatgcattggccctcagttatctctgggctcaggcatccaggtactgtcattgttgtgcacctcaatgacagggtccatccaactcacagactcacagggtcctccttcattaaaggaggaaatgggacatatgcccaata

SEQ ID NO: 733241 - DNA, 583 bp, Homo sapiens
atactgtatatggttctctttccaacgattccatcggcttatttcattttttctacaagagggcattctgatgcaatttttcttaaaaatccccttaggggaccaatcaatgatgattccataggaattattttgtaacacctcagccttacttgctataaaattttccccattccaagcatccacaccttcaaaccaaagtctattttgtttacattcgagtttgtctggacagaactgctgagatttagtgctagaatggttatattttaaactttgtcccaaaatcatatgtaaagtagcttgtgatttagttttttytggggattactaccaatcatacttgtgtgctaatttgtaagcaatccagcagcaggtcctaggcatattggaggatatttatatcctattgacatattcatcttcatcccttcctcattaggatgcattggccctcagttatctctgggctcaggcatccaggtactgtcattgttgtgcacctcaatgacagggtccatccaactcacagactcacagggtcctccttcattaaaggaggaaatgggacatatgcccaata

SEQ ID NO: 733242 - DNA, 650 bp, Homo sapiens
aatgaaggaaaagttaaccttgtacttctgttctcatgttctggcttcaatctgattaggtactactaacctggtgcttctattttagcctcatgcttctattcagttcacctctgtatgatgaattcttgatgtgtaactctcctatagrtactgggtatggagatgaaaaagaaaataattaagaataaaatgaaataaaatatatgaaattactttgcctgatgcttgaaatgacacaggtgatccctagaaatctgtttctattctccctgagatgaagtcaaaatcccttggcccataatatcataattaactatagtgaaaaaaagcccatatatggaaccatgttgtaatatggtagctaattctagatgatatagctacaggggaaaacaaaaaacaaaaaacaaaacctaatctgctatctctgcctccaaaagggactccaggtggtttgtgaaacattccagtctgattccatctcacccaaggccaccatttcaggctgtcaccgaggaaactcctttgatggaagtctgtcctcccaaacttcccaggaaagaggcccatcacattccaggtacctgattgcaatgttagggacaaaatgtgtcactggtcaccaaaaatcaaatatgcatttttaa

SEQ ID NO: 733243 - DNA, 611 bp, Homo sapiens
tctgagacaccaggtattccgagagaatgtaagagaattaaagtagattccatttcctctccctcttccttcccttctgtttaagaatgagtcctttgacaatgagggtcagtgttccctgaaaaatattgtattttgtaggaataattaatgctgttttggtgtgaggagattctcatgagatatctcaagccatctaaaacccaggcttaggaaagtttaattgggaaaacatttctgcctcctgcctagggcagaccaactcccaattagtgaaartatatataattggaatgtgtgaattgcagcttgaaagaacttttgcacagatgaatacatttagcaagcttttgatggcctgtaacaaatgactttttaatcatctgcctgggtactgtagaaacatattgcatattggagaaaggggtcaaagttttaggacctggtttgttgtcctgcctaagatatggaaaatggcccttattgggacaaaagaggactgtaaaagtaaccagtcattttctggctgctttatttgagaatgaaccttgccttctgaatatttgagatcatgtccttgtcaactgtgtgaaacttgaaactctgcattt

SEQ ID NO: 733244 - DNA, 626 bp, Homo sapiens
gctttaacttttttatcttttacaagaaaaactcaaataatttataagaaaccaggagtttaaacaatctgtttatctttaaaaattaagttttacttttcaaatttaggtctctaactcatgttaaacttattatttggtactgtttcacatagaaatcttgytttttttctcaatagatacaacacatcccactgtgtcatgtgattttcttagatttcattgttggacattttattcttttctactcgttaattttctattccatgttattatcacattgtcttaattaccatacagcattataattcatcaactagtttcttctttttcaaacctatcttagccatttttgattctgtacttttctatctgaattttaagaacagctttttaaggttgcattaaaaatcacaaaaaaaattagatttaaagaatatcaaaatatgtctttactaaaatgactcttcctcatttttgcaagtctttatacctttaaacaatttattatgtttttttccacaaaggtattaaataatttttgttagacttattcctggttaccttatagactattatgctattctctaggcttaacatagcaaactttaaaacaaataaatatg

SEQ ID NO: 733245 - DNA, 626 bp, Homo sapiens
gctttaacttttttatcttttacaagaaaaactcaaataatttataagaaaccaggagtttaaacaatctgtttatctttaaaaattaagttttacttttcaaatttaggtctctaactcatgttaaacttattatttggtactgtttcacatagaaatcttgttttttttctcaatagatacaacacatcccactgtgtcatgtgattttcttagatttcattgttggacattttattcttttctactcgttaattttctattccatgttattatcacattgtcttaattaccatacagcattataattcatcaactagtttcttctttttcaaacctatcttagccatttttgattctgtacttttctatctgaattttaagaacagctttttaaggttgcattaaaaatcacaaaaaaaattagatttaaagaatatcaaaatatgtctttaytaaaatgactcttcctcatttttgcaagtctttatacctttaaacaatttattatgtttttttccacaaaggtattaaataatttttgttagacttattcctggttaccttatagactattatgctattctctaggcttaacatagcaaactttaaaacaaataaatatg

SEQ ID NO: 733246 - DNA, 610 bp, Homo sapiens
aatgacctggtactccatggcttaaggtcagaaagtcatctaagtagctttccaagaatttcaagagttgctaatcttaggtagaaaaggtttctctcctcatcaactcttaggggaaaatagttgacactaattaacatctgattccttagcagctgggatttggggagttctactttttaaactgttggtgagaataacatagatttttctaaccattttacctacagctatctttaacatcttttaagtcaccaaaagaaatttgaggccggkcgcggtggctcacgcctgtaatcccagcactttgggaggccgaggcgggcggatcacaaggtcaggagatcaagaccatcctggccaacatgatgaaaccccgtctctattaaaagtacaaaaattagctgggcgtagtggcacacgcctgtaatcccaggtactcgggaggctgaggcaggagaatcgcttgaacccaggaggcagaggttgcagtgagccgggattgtgccactgcactccagcctggtgacagagtgggactccatctcaaaaaaaataaataaaataaaaataagaaatttgaacttgagcttgtagtagtagagaaggc

SEQ ID NO: 733247 - DNA, 626 bp, Homo sapiens
gggcgtgttccaaatgtggtcgagctactgtatccaaaggtgatcctggcatttcataatctccttgttccaatgtgtctggggacagctaggcagactttacataagtacagattgcctctctgggcactgctgggagacttcatttgtggcaggaggagtgcccccaggactggtgagataatttgagctttaaatagctcctggcccttgaaataaggacarcatgatttaggggaaaggccagaacttgatctttgtggccttcggcacgctggcctctccttgcactggaggcagtcatgagggctgcaccgcggggcggtttgtcttcagcattcgcacactcagtaaagtatgccagagatgggtggcagcagcgcccaagggctcagctccttccaaagccaagtctgggcagttttttttcaggctgtatggaactagggtttatggaaaggaagcgatgtgaggcagctaaggcagtttccgcttaatatagagaagaggatgaaacggagaagagacactcgatacaggaagatgagctgggagatcgttaggaaatgtagacatcccctgtggtgagaactaaaatgaaggaaaattattcagggtattcttaa

SEQ ID NO: 733248 - DNA, 435 bp, Homo sapiens
acttcctttaggtgttattcaactgttaccttactagtgagggcttccctggctactctttacctacagttgtaccctttctcctcactgacatttcctacccttcttccctgcttttctctttagaacttaatattgtcttatgtactttttatcttttaaattgtttgttgtttacctcttctactaacatgtatgatttataaaagcaggtattcacatatgttttgtttgctgatatatcctcatcacctagaacccygcctagccatagtgagcgcttaatatttttaaaataaatgaatgaaaggatgaatacatacatatatacacatataaatgggagaacttaaggatactattcagcaataaatgcaatgaattatggatatatgcaaaaatatgggtgaatcttgaaagtgtcatgctaactga

SEQ ID NO: 733249 - DNA, 667 bp, Homo sapiens
aatatttattatggaaccactgggaaaatacaagttcagttatgtcagttaataatgttgttcaaataactaattgtcttgtctatttcttctatcaattaatgagaaggcatgttaaaagtgtccagttatgactgtgaatttgtttatttctgtctttagtttttaaatttttttttttttttttttttgagacagagtctcaatctgtcgcccaggctggagtgcagtggcgtgatctcagctcactgcaagctccgcctcctgggttcacaccattctcctgcctcagcctccccagtagctgggactacaggcacctgccaccacgccyggctaattttttgtgtttttagtagagacggtgtttcaccgtgttagccaggatgacctcgatctgacctcgtgatccgcccacctcggccttagtttttaaaagttttgtttcattcattctggagttttgttgttggatagataaaatttaggattattatgttttcttgataaatgtaccttttgtcattgtgaactgtccaattgctgtgactatctacagcagtagcttttgttttgatgtcaatttttggctgatgttaatataactatgcccttcttctgcttactgtttccatggtaaatcttcttttcatgcttttactgccag

SEQ ID NO: 733250 - DNA, 667 bp, Homo sapiens
aatatttattatggaaccactgggaaaatacaagttcagttatgtcagttaataatgttgttcaaataactaattgtcttgtctatttcttctatcaattaatgagaaggcatgttaaaagtgtccagttatgactgtgaatttgtttatttctgtctttagtttttaaatttttttttttttttttttttgagacagagtctcaatctgtcgcccaggctggagtgcagtggcgtgatctcagctcactgcaagctccgcctcctgggttcacaccattctcctgcctcagcctccccagtagctgggactacaggcacctgccaccacgcctggctaattttttgtgtttttagtagagacggkgtttcaccgtgttagccaggatgacctcgatctgacctcgtgatccgcccacctcggccttagtttttaaaagttttgtttcattcattctggagttttgttgttggatagataaaatttaggattattatgttttcttgataaatgtaccttttgtcattgtgaactgtccaattgctgtgactatctacagcagtagcttttgttttgatgtcaatttttggctgatgttaatataactatgcccttcttctgcttactgtttccatggtaaatcttcttttcatgcttttactgccag

SEQ ID NO: 733251 - DNA, 614 bp, Homo sapiens
caaatcacatcaacaaataagagatctatatccagccaactttactcattatgtgacctgtatggcctccaaaggcactgagtttttaattcctgtggtagtaaatttgagattttctagctttgagggaaagaatgtaaaaaggagatgatagattcagcctatgcatagtcattttcttatagaaattgctgttctctctctgaaaatacatttttaaagaggttgcaaatctatacttgtgtttaaatgatgaatatattcacgaatgaaaagataacttcattttggtcactagtgcccaaccagaggaatgttctgatctattaaaacttgtcttcctaagtgaaatcacgtagttgagtcagtagttagattccatcttttctgcaatggcttggccaatgagctataaattcctgctttggtgtaacagtttgggggagaatggccagtatgataagtttcttctgctaaagtggacagaagttgggagagatattctaraagttcatgccttggtcccaggctaaggctgccaacagctcgtacaggttgagtatcccttacccaaaatgcttgggaccagaattgtttcggattttggatttttt

SEQ ID NO: 733252 - DNA, 644 bp, Homo sapiens
aggctgggggcaatggctcaggcctgtaatcccagcactttggggggctgaggcgggaggatcacctgaggtcaggagtttgagaccagcctgaccaacatggcaaaaccccatctctattaaaaatataaaaattagcmgggcgtggcggtatgcacccgtagtcccagctactcaggaggctgaggcagaagaattgcttgaacccagaggtggaggctgcagtgagccgagatcacaccactgcactccagcctgggcgacagagcaagacgtcacctcaaaaacacaaaacaaaacaaaaacaaaaaagtttaagaaaaaccttttaaccgtgtgctattccagacactggaaataggaatcaaagaggtaggccacatgttttcacctgtgtccttaaatatttcagaccagtagccagtagaggaaaaggccaatatttcaggaacaatcctgcaagttgaaactgcctttgcaaaattatgacagtaagagaaatctgacatggcttctaacctcacaggctggctgtcttcactcattccccagtgcagaaagtagaaaagttcctcttcaaagctcatcttggtttaaaaataaaatagtagacactaggaataatagctccttactctaaagcc

SEQ ID NO: 733253 - DNA, 553 bp, Homo sapiens
gggttttgagattggtttaaagtaggattttccaacctcactcctatggacatttttacctagataattttttgttgtggggagtctgtcctatgtattgtaggatgtttagcaacattcagggcctctacttaatttttaaaaaatttataaagaaaagaagtttaattgactcatggttctacatggctgaggaggcctcaggaaacttacaatcatggcagaaggtgaagtggaagcaaggcacatcttacatggtagcaggagagagagagagatgaagggaggaagtaccacactttaaaaccatcagccyttgtgagaactcactcactattaggagaatagcaagggaaaaatccactctgtgatcccatcatctctcaccaagggcctctacttacaagatgccatgggtagaggcatttctgttgcagttatgacatcaaaaaatgtcaccaaccattgccaaatgtcccttggagggcaaaagcacttccagttgagaactactgggttaaagcttaaacaaatcttggctcatggtttcttt

SEQ ID NO: 733254 - DNA, 531 bp, Homo sapiens
gggttttgagattggtttaaagtaggattttccaacctcactcctatggacatttttacctagataattttttgttgtggggagtctgtcctatgtattgtaggatgtttagcaacattcagggcctctacttaatttttaaaaaatttataaagaaaagaagtttaattgactcatggttctacatggctgaggaggcctcaggaaacttacaatcatggcagaaggtgaagtggaagcaaggcacatcttacatggtagcaggagagagagagagatgaagggaggaagtaccacactttaaaaccatcagcccttgtgagaactcactcactattaggagaatagcaagggaaaaatccactctgtgatcccatcatctcycaccaagggcctctacttacaagatgccatgggtagaggcatttctgttgcagttatgacatcaaaaaatgtcaccaaccattgccaaatgtcccttggagggcaaaagcacttccagttgagaactactgggttaaagcttaaaca

SEQ ID NO: 733255 - DNA, 418 bp, Homo sapiens
gaactgctttggctccatcctctatagcttgatatgttgttttcattacaattcatgtgtaatattttctaatatccctgtggtttattctttggctcataagttattgagaaatgaattatttaatttttaaatatttgaggattttatacatatctccttgatttgtattttagcttcattgtactcatataacatactctgaaatgttktaacctctttaaatttaataaaaacttatttttggcctaagatatgatctatcttggtaaacattccatgtaaatttgaaaataatatttattatggaaccactgggaaaatacaagttcagttatgtcagttaataatgttgttcaaataactaattgtcttgtctatttcttctatcaattaatgagaaggcatgttaaaagtg

SEQ ID NO: 733256 - DNA, 620 bp, Homo sapiens
atttcccttcttccatacctctgggaatcactaatctatttctgtttctaggaattcacctattctggacctttcatataaatggaatcatacatatgtggtcttctgtgactggctttcttcacctagggtaatgttttcaaggtttgctgacattctttgaatgggatttgcaycgtatctatatactgttttgcaaatactaaaaatgtattttggatatttgtgatatatatcaaatggctttctaaatgtactgctcttcccagtttctgccacaaagcaaaaggctggataggctcttgaaaaaaaaacagtcaccaagttcttctagtttagaatgtacattctataagaaatgatagctaagttattttatactaatagacttacccctgactaaatcatagcattatatatcctcccctaaatgctcactccattaaaataatcaaaatcaaagaacctcttataacttaaaatataaacaacccaatacaaaatgtgcaaatgatctgaacagttatctcacccaaaaagagatatgaatggaaagtatgcacatggacagatactcaatatcactagccttcagagaaatgcaattcaaaaccacaatg

SEQ ID NO: 733257 - DNA, 437 bp, Homo sapiens
gtgatattgtagggtatgagatgccaagcttagggtagaaagcatcttggtaaaagtgaagaaagtaagcataaggctagtcttgagcattttaccttcagcattttatggttaccatatgatattttttcagggtgaggaaagacacrgatgggaacggagacacttcagtggttgccagcattggggattgttagtaaaggaacctttacaactgagaatcagacaggccaacatgccatcccatggatgccagcaaggaaaggtgtccatcaaggtgcagggtccctcccctgatgccgtcacacaataaacttctggagcttagatgttgttctgacaagataaagaactataaacagacttaatttgttttgagttgcctcagaaagctcttacatttatcctgaattgaaaagcattgtttgcaataggac

SEQ ID NO: 733258 - DNA, 641 bp, Homo sapiens
cctgcctcagcctttcaaagtgctgggattacaggtgtgagccactgtccctgacctgaattacatacttttcatcaggaatttgcatgtggcctcatcatcaaccattgatatagaaataaaattttcaagtaggaaaaggcacartttggtttaaaactacattgtggtttttgaaaagttaagcctaccaatgggaggcttaaatgctggtgtgtgcgctcatacaccttatggtcgggtgactagcaggtgaaagggtagaagattctggaggccactaggcttacaaatctaattgtaaagaaagaataaactccatagggagtaaaggccagaggatgaagcctgtgtgtgtgtgtgtgtgtgtgtgtgcgcgcgcgcgcgcgtgtgtgtgtgtgggtgtgtggtggggaagaagggtgatctttgtggatgaggttcaaatgctgagttgtccaggtgaactggtgtgtgtgtgtgtggtagggaagaagggtgatctttgtggatgaggttcaaatgctgagttgtctgggtgaactggtgaccaggttctcactctggctttttaggtgattgctggtgggtactgtgggtgcctttcgccttctcaccctgggaaaaggcagaattccttt

SEQ ID NO: 733259 - DNA, 641 bp, Homo sapiens
cctgcctcagcctttcaaagtgctgggattacaggtgtgagccactgtccctgacctgaattacatacttttcatcaggaatttgcatgtggcctcatcatcaaccattgatatagaaataaaattttcaagtaggaaaaggcacaatttggtttaaaactacattgtggtttttgaaaagttaagcctaccaatgggaggcttaaatgctggtgtgtgcgctcatacaccttatggtcgggtgactagcaggtgaaagggtagaagattctggaggccactaggcttacaaatctaattgtaaagaaagaataaactccatagggagtaaaggccagaggatgaagcctgtgtgtgtgtgtgtgtgtgtgtgtgcgcgcgcgcgcgcgtgtgtgtgtgtgggtgtgtggtggggaagargggtgatctttgtggatgaggttcaaatgctgagttgtccaggtgaactggtgtgtgtgtgtgtggtagggaagaagggtgatctttgtggatgaggttcaaatgctgagttgtctgggtgaactggtgaccaggttctcactctggctttttaggtgattgctggtgggtactgtgggtgcctttcgccttctcaccctgggaaaaggcagaattccttt

SEQ ID NO: 733260 - DNA, 624 bp, Homo sapiens
cccagaattggaactactggctcaaagatatgaacatttcttaggttcttgatatataatgccaaattgctttccagaaaaactgaggcagtttatagccctaccaaattttacctacattgaaaaatccttttccccttaagatatatgctgatttgattgataaaaaaagttactcatttttgaaattataagaaaggttgaatttaagaaatggttatcagccacttgtacttctcctttgtaaagttctctctttcttttctttgtctctacygtcctgttaccttacttttgccatctctgagtagatcagtgtcttcagtgggtgtgccacttggccaaagactccttacttctcttgttaccctcttcactttcccccttatttaatctttttccactctttaaaaaatttattttttaatttttgagacagagccttgctctgtcactcaggttggagtgcagtagtgcagtcatggctcactgcagtcttgaagttctgagcttaagcaatcctcccacctcaacctccccagtagctaggactacagatgtgctctactgcacctggctaatttttattttttattttttgtagattacaagacagctcagagg

SEQ ID NO: 733261 - DNA, 547 bp, Homo sapiens
ctatattttctatttattctgttattttgtgcttaaattgttcctcccaactgttccataccattttttctaggctgtctatggattgttattttgcatttaattctttaattaccctcaaatttactttgcaattttaatgagattctgttctggtttwtttttctaagacactgaatatttatttataacagttgtgttgacatcctttgccctcatctctttcttcctggataacaggaaaccatctctccgttcattgaaggtgtgagtctcacggtgttcttaggtcagtccacatgataccattctttcaaccctgccaactagtcttaaagggcaagacccctgaaagaaactgatgaagtctctgacaaaatactttcagttctatcaaacaagttttctttcatgggaaatatgagtatgttctggagagctggatcatgcaatgactgtgatttcggtggtgattattatgtttgttttttgttttacactcaggtcttgtttcttagtctcttaattttcccaaatagtgatttct

SEQ ID NO: 733262 - DNA, 572 bp, Homo sapiens
ttattgttgtttttaggatcctttctttattcttgacttttgggagtctgattattaaatgccttgaggtagtcttcttggggttaaatctgcttggttttctacaaccttcttgtacctgaatgatgatatctttccctaggtttggaaagttctctgttattatccttttgaataaacgttmtactcctttctctcaacctcctctttaaggccaataacaaatatgcatttttgagactttttaagatcctgtagagatgctttattttttcttattcttttgtcttctctgacagtgttttcaaataacctgtgttcatgctcactatttctttcttctgcttgatcaattaaaacactctgatgcattcttcagtatgcaagttgcatttttcagctccagaatttcagcttcttttaaattatttcaatctccttaagtttatataatagaattctgaatttcttctgtgttaccttcaatttctttgagtttcctcaacacagctattttgaattatctgtctgaaaggtcacatatctctgtttctccgggattggtccctggt

SEQ ID NO: 733263 - DNA, 506 bp, Homo sapiens
ttctttcttattgttgtttttaggatcctttctttattcttgacttttgggagtctgattattaaatgccttgaggtagtcttcttggggttaaatctgcttggttttctacaaccttcttgtacctgaatgatgatatctttccctaggtttggaaagttctctgttattatccttttgaataaacgttctactcctttctctcaacctcctctttaaggccaataacaaatatgcatttttgagactttttaagatcctgtagagatgctttattttttcttattcttttgtcttctctgacagtgttttcaaataayctgtgttcatgctcactatttctttcttctgcttgatcaattaaaacactctgatgcattcttcagtatgcaagttgcatttttcagctccagaatttcagcttcttttaaattatttcaatctccttaagtttatataatagaattctgaatttcttctgtgttaccttcaatttctttgagttt

SEQ ID NO: 733264 - DNA, 602 bp, Homo sapiens
ttgacttgtatttgtacattttaagcaatagcatcatcaaatgtaaggtaataaaaatataataatctgctacttccaaacatttttctctctaaattttgagaatagataagaatggcacagttaaaagcaacatgcacctttagtggcttataataactctattgaactattcagagttctcaagggaaaaaaactctttcattattcctagatattttcttcaaagactttaagcttctttctactcaacaggtaaaggctgcatcatgccaacctgtcatcattctatcacctctcgccaccgaaattcaaaagaaaattcttgctgaggtggcttggaaggaarcagaaaattgtaaaatgccttcagtaaataaggctccttagccagcagtcagacagcatgcattcactgtgaaactcagtgcacttacaaacacctctgctgtctcctcctaggttggcttctatgtggtagctgggaaaatgcaaaatataaataaacagaaaaaaacaggtgtcatggggatttggtaaagcaacctttcatttctggaagtctgtgtgaaaaataatgctgaaatcaaaatccaaaagtg

SEQ ID NO: 733265 - DNA, 602 bp, Homo sapiens
ttgacttgtatttgtacattttaagcaatagcatcatcaaatgtaaggtaataaaaatataataatctgctacttccaaacatttttctctctaaattttgagaatagataagaatggcacagttaaaagcaacatgcacctttagtggcttataataactctattgaactattcagagttctcaagggaaaaaaactctttcattattcctagatattttcttcaaagactttaagcttctttctactcaacaggtaaaggctgcatcatgccaacctgtcatcattctatcacctctcgccaccgaaattcaaaagaaaattcttgctgaggtggcttggaaggaaacagaaaattgtaaaatgccttcagtaaataaggctccttagccascagtcagacagcatgcattcactgtgaaactcagtgcacttacaaacacctctgctgtctcctcctaggttggcttctatgtggtagctgggaaaatgcaaaatataaataaacagaaaaaaacaggtgtcatggggatttggtaaagcaacctttcatttctggaagtctgtgtgaaaaataatgctgaaatcaaaatccaaaagtg

SEQ ID NO: 733266 - DNA, 627 bp, Homo sapiens
ggtcccttatgttgtactttcatagccacaggcctttcccaacttaaactctggcaaccactaacctgttctctatttctgtaatttttttcatttcaatgaaatataaatggcctcatatgttatataacccttatagcctaattctgtggatcattattcagtttgctgcatttatcattatcttgctcatttttttgctgagtggtatttcatggtatagatgtatcacaatttaagtgttcactcattaacagacaactgggttgtgtccaatttttgtrtattatggataagactagtataaacatgtacagattttgtgtgaacagaaatcttcatttctctgagataaatgtctaggattgcaatttctggttttatgttagctgcatgcttagttctttatgaatgtaccaaacacattttccacagtggttgtaccactttcattctcaccagcaatatatttagtgatccagtttctcttattctctctagaatgtggtattgccactatttctattttagccatcttaataggtatacaataatatatcaatttggtttaatttacatttccttaatgacttgtgatgctgaagatcattttatgtgcttacttcc

SEQ ID NO: 733267 - DNA, 627 bp, Homo sapiens
ggtcccttatgttgtactttcatagccacaggcctttcccaacttaaactctggcaaccactaacctgttctctatttctgtaatttttttcatttcaatgaaatataaatggcctcatatgttatataacccttatagcctaattctgtggatcattattcagtttgctgcatttatcattatcttgctcatttttttgctgagtggtatttcatggtatagatgtatcacaatttaagtgttcactcattaacagacaactgggttgtgtccaatttttgtatattatggataagactagtataaacatgtacagattttgtgtgaacagaaatcttcatttctctgagataaatgtctaggattgcaatttctggttttatgttagctgmatgcttagttctttatgaatgtaccaaacacattttccacagtggttgtaccactttcattctcaccagcaatatatttagtgatccagtttctcttattctctctagaatgtggtattgccactatttctattttagccatcttaataggtatacaataatatatcaatttggtttaatttacatttccttaatgacttgtgatgctgaagatcattttatgtgcttacttcc

SEQ ID NO: 733268 - DNA, 627 bp, Homo sapiens
ggtcccttatgttgtactttcatagccacaggcctttcccaacttaaactctggcaaccactaacctgttctctatttctgtaatttttttcatttcaatgaaatataaatggcctcatatgttatataacccttatagcctaattctgtggatcattattcagtttgctgcatttatcattatcttgctcatttttttgctgagtggtatttcatggtatagatgtatcacaatttaagtgttcactcattaacagacaactgggttgtgtccaatttttgtatattatggataagactagtataaacatgtacagattttgtgtgaacagaaatcttcatttctctgagataaatgtctaggattgcaatttctggttttatgttagctgcatgcttagttctttatgaatgtaccaaacamattttccacagtggttgtaccactttcattctcaccagcaatatatttagtgatccagtttctcttattctctctagaatgtggtattgccactatttctattttagccatcttaataggtatacaataatatatcaatttggtttaatttacatttccttaatgacttgtgatgctgaagatcattttatgtgcttacttcc

SEQ ID NO: 733269 - DNA, 633 bp, Homo sapiens
acatatttagcactgctacatcttctttgtaacttaagccttttataattgtataaactccatgtggtaattttttattttttgctctgaagtctgatattaacatagcttctcctgctttcctttgattaatatttctatgaaatatattttccatcctttttactctcaacctgaatatgtcactatatytgaagtgactttactgtcaacagcctatagttgggtggttaattcaatgtgtcaactttcattttttaattggtgaatttagactattcacatttagtgtaattattgatatgttagggttcgagtttgccattttgtttttgtttgttctgtttttcacttccttgtctttttcatgatctctgagttcagtaaacacctttttagaatgttattttgaagttatctatataatggactacatctctttgtaaagatttttgcagtggttgctccaggcattacaatatatgtgtataacttaccacagtttattgatgtccttattttaccagtttgagtatagaaatttatctccctttatgtctctcccatttgtaacataattatcttaaatattttctgactctatagagatatttggtaaattatttctttctt

SEQ ID NO: 733270 - DNA, 633 bp, Homo sapiens
acatatttagcactgctacatcttctttgtaacttaagccttttataattgtataaactccatgtggtaattttttattttttgctctgaagtctgatattaacatagcttctcctgctttcctttgattaatatttctatgaaatatattttccatcctttttactctcaacctgaatatgtcactatatctgaagtgactttactgtcaacagcctatagttgggtggttaattcaatgtgtcaactttcattttttaattggtgaatttagactattcacatttagtgtaattattgatatgttagggttcgagtttgccattttgtttttgtttgttctgtttttcacttcyttgtctttttcatgatctctgagttcagtaaacacctttttagaatgttattttgaagttatctatataatggactacatctctttgtaaagatttttgcagtggttgctccaggcattacaatatatgtgtataacttaccacagtttattgatgtccttattttaccagtttgagtatagaaatttatctccctttatgtctctcccatttgtaacataattatcttaaatattttctgactctatagagatatttggtaaattatttctttctt

SEQ ID NO: 733271 - DNA, 633 bp, Homo sapiens
acatatttagcactgctacatcttctttgtaacttaagccttttataattgtataaactccatgtggtaattttttattttttgctctgaagtctgatattaacatagcttctcctgctttcctttgattaatatttctatgaaatatattttccatcctttttactctcaacctgaatatgtcactatatctgaagtgactttactgtcaacagcctatagttgggtggttaattcaatgtgtcaactttcattttttaattggtgaatttagactattcacatttagtgtaattattgatatgttagggttcgagtttgccattttgtttttgtttgttctgtttttcacttccttgtctttttcatgatctctgagttcagtaaacacctttttagaatgttattttgaagttatctatataatggactacatctctttgtaaagatttttgcagtggttgctccaggyattacaatatatgtgtataacttaccacagtttattgatgtccttattttaccagtttgagtatagaaatttatctccctttatgtctctcccatttgtaacataattatcttaaatattttctgactctatagagatatttggtaaattatttctttctt

SEQ ID NO: 733272 - DNA, 645 bp, Homo sapiens
tcagagcaacttatcagttctgagtcgagacctcacgaagccttgcagcttctactcttgctgttgttgaaatcctgccactatgtgaacaagcctgggtggacttgctggagggattacactccagccaaaagtcagccagtcccaagcatccagcagccacctgcggatgcatgagtgagccgctgctgagatgagctgagtctgctccagccccacagaactgccccgctgaactgaacccaaattgccaacccacaaaaatgtaaatgactgttgatttaagcccctgagttttggagtggttggttaygcagcaaatctaactgatagggtggtggaaggagtagtagtgattgcgagacctgttaacatgggctttcagggtatttataataaatctgtttcctgattcaagtgctgatgaaacatatgcattcacattgttaagattcattgagctgcataattatgatatttatgtttttcctatatatacatttatttcaattcaaaaagtaaaaataaaataaaatctttatgactgagatgagataatctcatagatatatttttaagggaaaaaatgagagctcaaaagggggcatatggtatctaccatttgtgtaaaaaaaagatgaaatg

SEQ ID NO: 733273 - DNA, 577 bp, Homo sapiens
gctgatgcaagaggtgggttcccatggtgttgggcagctctgcccctgtggctttgcagggtacagccttctttctggctgctttcatggactggcattgagtgtctgcagcttttccaggatcacagtgcaagctgtcagtggatctaccattctggggtctggaagatgggggccctcttctcatagctccactaggcagtgccccagtagggactctgtgtgggggctctgaccccacattacccttccgcactgctttagcagaggttctccatgagggccccgcccctgcagcaaacttttgcctggacatccaggtgtttccatacatcttctgaaatctaggcagaggttcccaaacctcaattcttgacttctgtgcacckgcaggctcaatactatgtggaagctgccaagggctggggcttccaccctctgaagccacatcccaagctgtacattggcccctttcagccatggctggagcaactgggacacagggcaccaagtctctaggctgcacacagcacagggatcctgggcctggcccacaaaaaccactttttcctactgg

SEQ ID NO: 733274 - DNA, 586 bp, Homo sapiens
tgtcttgaggttaagtaagaaaaagtaggtggtggtatggaaggatggatggtggggagagaggagatacaggataaattggaggtaatcatgaggttatgaaatgatgataagatattgagagcctgaatggtggtgataatggaaatgaagacatgaatgcaattttttttgtgtttccacaccgaagagggagaacctgatcagttggatacggagatgatgaagaaagacgtgaccatctgatcttcaataaagctgacaaaaacaggcaatgggaaaaaagactccctattcaataaatggtgctggtataactggctaaccgtatgcagaagattgaagctggaccccttccttacaccwaaaagtcaactcaagctagattaaatacttaaatataaaccccaaaattataaaattccctggaagacaaactaggaaataccatcctggacataggaatgggcaaagatttcatgacaaagacaccaaaagcaacaacaacaattgacaaatggaatctaactaaactaaagagcctctgcacagcaaacaaaactatcaacagagtaaacaacctaca

SEQ ID NO: 733275 - DNA, 642 bp, Homo sapiens
ggcccacagagggaaaacgtatatatatattacagtagattatgttccatacaggagggttatactcctgccaatatcaaacttatttactttttagaaagaaaaacaaaggagacttaaaatcttaagagagaatgttgagttcaatataaagactagcaagaaaattatagttattaaaaggccttctatttgagtaaaatgatcacaatttaatatttagactcactctgttgcaatatttttattcctgtttagtattgtaaccattttggataccacatattttgaggtttttccaaaatgtccttaaagaaatttatgaacaattgactcttttggcacaggctgtttcttcatctctaatactcctgcttttatccaagacacagtaagctccaactttttcacatttctcctgctgtgaactccagtaccctatatttttacctagaatcacggttctgttgtgtcctctggttamcgatcccctgcacccctccccccgcctctctctctctctctctctctctctctctctctctctctcatttgaaatgtagtttccttctttcagtacatttttacccttcccaaactggtgcccatggtagaaaaatgacatgtgattggggccaatga

SEQ ID NO: 733276 - DNA, 642 bp, Homo sapiens
ggcccacagagggaaaacgtatatatatattacagtagattatgttccatacaggagggttatactcctgccaatatcaaacttatttactttttagaaagaaaaacaaaggagacttaaaatcttaagagagaatgttgagttcaatataaagactagcaagaaaattatagttattaaaaggccttctatttgagtaaaatgatcacaatttaatatttagactcactctgttgcaatatttttattcctgtttagtattgtaaccattttggataccacatattttgaggtttttccaaaatgtccttaaagaaatttatgaacaattgactcttttggcacaggctgtttcttcatctctaatactcctgcttttatccaagacacagtaagctccaactttttcacatttctcctgctgtgaactccagtaccctatatttttacctagaatcacggttctgttgtgtcctctggttacmgatcccctgcacccctccccccgcctctctctctctctctctctctctctctctctctctctctcatttgaaatgtagtttccttctttcagtacatttttacccttcccaaactggtgcccatggtagaaaaatgacatgtgattggggccaatga

SEQ ID NO: 733277 - DNA, 614 bp, Homo sapiens
agccaaatcatattattattgaattggggtgaccatttacttagcttctatatttgttaacttttctcagacatgtctatagtagcatctgtacatcaaattgtaagcactgatgttgaataccattcaatcagttgctttcagaataccttaagattagaaacaaattcacgtttgtcttccctattgtgtcagttagatactggctgtcagggtggcccttcatttatcaacgagatggattgatctgcctccaacacgtggcattrtatttaatcccatcaattatcccctctatgacattccctgttgcttcctgattggccaaacaggccacatagctcacatagtcctcctcaaagggccatgcatacaatgaacaattcctaagatcttgggcacccgaaatacttggcatctgtgaaataaaatatgttattaattgttatttcttattaattctcaagggagcactgggatgattttccttgaatgtttttgataaatattgagattatatttttcttccaagtcctgttttttaagtgaaagctgaataactagagtgaaacccgaaagcctgaatcatggcctccaatttaatatttccaggg

SEQ ID NO: 733278 - DNA, 653 bp, Homo sapiens
ttacaatgccttgacctggaaaacctccaccacagggatagcctaagaagtccttggttcctgcaaaactcacccatgactctatgggttactaggctgaggagctggagtcctcaggatgaggtcttcaccaaaatgtacaaagcmaaatatcccattgtgaaatacacagcccaaagaattcttaatgagaacaggagctccagcatggacttgaaactgaaagcccagacccattttgacataaaggatgagttctgctgttccattggcaggattaggttcttgagagggcagggcaggcaaacactcaggtgctaaatcttctgcaaaataggctgcctgaagcctctgaatcacctgaataaaacagttaattaaccttgaataaaagtaaaatgacataaaaaactctttacaagccaactgtcacattccttaattttaataagttaattcattttagccttcccactagtgacagtaatgcatatactcagaaatgtctggaatactaatattttgaaatatatttctaagtttagttgtacgttttaataattttattttgttccactctttccttcagttctcataattcatcaaaatagtgtttgaattttgatcagttttcacaacaggagattgattat

SEQ ID NO: 733279 - DNA, 557 bp, Homo sapiens
ctgattttcttttttacaagccctaattctggtcctaccactgtaataatagatcttgctcgtcataggaaatgacagacacatcaggcatcagaagcatcatagaataagtggtttctggtatacttttcatcaattgatactaaaaattttrccagtctgtttcactttgtctgttaatatgtggatagcagggatgtctcatgagggcgtctggcaattgcagaagtctgaaccatgaagcggaacatttctatctggtccaaatgaagagacatcattcaaatacaaaaatagccaagtgccagcacacagattaatattccgccatgaaaagatgtgcactctgtctgccagcgcctactcacacatttgctgacaaacatgttctccccaggtggagtccctcccccacctctggccaagactcgtgtttgagaagtgtttccagatgccttcagttcctgacatcttaaagaatgagagtgggctcttaggatccggctgtgcaatctcactgtccacacaggtccttccataaatgctgttatcccctt

SEQ ID NO: 733280 - DNA, 557 bp, Homo sapiens
ctgattttcttttttacaagccctaattctggtcctaccactgtaataatagatcttgctcgtcataggaaatgacagacacatcaggcatcagaagcatcatagaataagtggtttctggtatacttttcatcaattgatactaaaaattttaccagtctgtttcactttgtctgttaatatgtggatagcagggatgtctcatgagggcgtctggcaattgcagaagtctgaaccatgaagcggaacatttctatctggtccaaatgaagagacatcattcawatacaaaaatagccaagtgccagcacacagattaatattccgccatgaaaagatgtgcactctgtctgccagcgcctactcacacatttgctgacaaacatgttctccccaggtggagtccctcccccacctctggccaagactcgtgtttgagaagtgtttccagatgccttcagttcctgacatcttaaagaatgagagtgggctcttaggatccggctgtgcaatctcactgtccacacaggtccttccataaatgctgttatcccctt

SEQ ID NO: 733281 - DNA, 504 bp, Homo sapiens
ccaggatctcacattgcatttagttgtcctgtctcctctagtctcgtcctccagtctgccacagttcctgtcattgtctttcctagagtgtccttccatctgagttttctgatatgtttgcttgattaaactgaggtgggcttttttttttgtttgtttgagacagggtctgcctctgtcacccaggctggagtgcagtggtgcgatcttggctcactgtaacctcygcctccttggttcaagcgattctcctacctcagcctcccaaatggctgggattacatacatgtgtcaccacacatggctaattattgtatttctagtagagatggggtttcaccctgttggccaggctggtctcaaactcctgacctcaaatgatccacccgcctcagcctctcaaagtgctgggattacaggcatgagccaccatgcctgacctgaggttggcttttttgacaagaccacagaagcgatgctgtgcccttctcagtgcagcatgtt

SEQ ID NO: 733282 - DNA, 537 bp, Homo sapiens
cccctccccgtcgtcacatgctaaaagcagaatctgagaaacagttggctgaattttagcacctaagacctcgacaaaggcaaaaacaaaagcaagaaataatgattccttagttgtcaccaattaaatgtattttgaatgtaattttttaattactggagacctggccaggcagagattcatggttcttcaacagcagagcacacctgaatcacccctgcagcttcttaaaaaaagatgagtacttgtgccctaactctggatttcgaattcaggaagcctgaggaggtgccaggtaactgtgccaaacacacacacacacacaygcacacacacacacacacacatacagttctcatctcagacctgacacttcaaagcatggactttgaagtatctctctccatctgtgaaatgatgataatgatagtaccaaccacacagagctgttgagatggtggcataattcaaaccttgtgcttagcacagagcccagcgtagatgcggcttcagtttccattagctgatgttgccatt

SEQ ID NO: 733283 - DNA, 657 bp, Homo sapiens
aatgacatgcaagattaaaaacataaaaaaaaatggaatatcatctcttcttgttctccttccctgtaaatgtagcctgttgtatttgtaactgcctgtttatttcacagccctcttctgatagatgcctattattaaagtagattgggccctgaagtggtaatagcagaggcgacttcccagggtgaggaggttttcttagtgtggagattagccttgtgttcagcaatctagtccttatctagaaactgggaaggaaaggccacaagtaggactctagcttgcttccagcattatttttaccattgagttaaatgtgtcaaggcattttcctagataattaattggctttggcctctaattctatatattcctgtatatgcctacttgtttatgcatttgtaatagaatggtgttagggacctgccggaagttatctcctgtwgttctagaatttgggccaggtcccacagtaggaacagggggcatgagtatcccattccaacttcagaatttgggaccatccagggcttaccaaagtgttctatttcaggagaatggaccctgccatcctcacccccaacctaagttgatataagagccaaactggggaaagagaaaggtagtctttttagagagaagagtatttatcaaaag

SEQ ID NO: 733284 - DNA, 633 bp, Homo sapiens
cagttaacaacgggctagatcacatttcccacagctcccacaggctgagaggtgaagcttattgtttctccctctccaaccctgccatccttgttgaactaaatatcctccaacaatatgattttcattaatctgatagatgtactgtggggtcatgttgccatttaacttgggaatttctatggttatgagagatgttgaacttttctcctaagctatttaaatttcccattctatgactcccctacttatgtcctttgatgacagagttggctttcttacctttttcttgttggtttgcaggagtactttgtatattctaggtattaatcccattcaaaaattctcctatttttttcattagmttgtagctgtatgtttcacattgaagtctctaattatctaaaagttcctcccttgaccagcctggaaaacagagtgagacatcatctctactaaaaaatacaaaaattagccagacatggtggcgtatgccttggtcccagctactcaggaagctgaggtgagagggtcgcttgaacctgaaggtggagactacagtgagccgtgatcgtgccactgcactccagtctgggtgacagaatgaaaccctgtctgaaaaataaaagaaat

SEQ ID NO: 733285 - DNA, 465 bp, Homo sapiens
tctggagaacccttgctaatataccttatttttttaaatgccttcacataagctatccagtaggtggatcatggaagccattttgctaatcagctcatacagatttcattcactcagaaggaaacataacatataagatccttcctccatttcttctcactaacagtaatttccaaatrccaaaccccatagagaccaccaaattttgtgtgatatttagtatatcaatagagatcagaaaagagttagttacacagttgtatgttcgttttttaaattaagacatttattaacaagtgcttgcagtttgttaacttttttgaaaaaagtcattataaaattttattacatattaaaaatgttcttaaaaatctcaacttgactggatataaaacatttaaaaatctttaaaggcatattcagtgaaaccaagcctccattcatggcatttaaaaaaataattag

SEQ ID NO: 733286 - DNA, 495 bp, Homo sapiens
ctaaacacataacatggatttgccaatttgatctacaaaaatgtcttgagatatattctcttttcatccccattagatggacaagtcaactgggactggaaaaggttaggacacatccttaaggctaaagagctgtaggaacagggcaaggactctgatccaggttatccaattccaacttttccactgttttctccattgttccaagttcccttgcattagaagttgatattggcagaagtactgaataacagggctatagtaattyctaaatggatacaagtatcttgagtcctgactttcagttttggcgttggcatcttatatttttcacattagaaaagtgacaaattcataccaaaaaccaactgttttctaaacgaagctctgctccaatttctctttgctaattattctgtttaaaggatgggcattttgctagcctttggagactctttctgtgtttttcttataaattttatttaagatttctac

SEQ ID NO: 733287 - DNA, 495 bp, Homo sapiens
ctaaacacataacatggatttgccaatttgatctacaaaaatgtcttgagatatattctcttttcatccccattagatggacaagtcaactgggactggaaaaggttaggacacatccttaaggctaaagagctgtaggaacagggcaaggactctgatccaggttatccaattccaacttttccactgttttctccattgttccaagttcccttgcattagaagttgatattggcagaagtactgaataacagggctatagtaatttctaaatggatacaagtatcttgagtcctgactttcagttttggcrttggcatcttatatttttcacattagaaaagtgacaaattcataccaaaaaccaactgttttctaaacgaagctctgctccaatttctctttgctaattattctgtttaaaggatgggcattttgctagcctttggagactctttctgtgtttttcttataaattttatttaagatttctac

SEQ ID NO: 733288 - DNA, 523 bp, Homo sapiens
aaagaccagaatagccaaagcaatcccgagcaaaaagaaaaaaactggaggaatcacattacctgacttcaaattatactatagtataattcaaaacagcatggtagtggcataaaagcagacatatagacctatggaacagaatagaaaacccagacaaatccacacacctatagtgaackcatttttgacaaaggtgccaagaacatacattggaggaaggacagtctcttcaattaatggtgctgggaaaactggttatcccattcatgcagaagaatgaaacgtgacccttatctcttgccatatacaaaactcaaataaaaattgattaaagatttaactctaagacctctaactataaaactgctataggaaaacactgggaaaactctctaggacattggtctgggcaaaagtttcttgagtaataccccactacacagacaaccaaagccaaaatggacaaatgggatcacatcaagttaaagagcttctgtacagcaaaggaatcaataaagta

SEQ ID NO: 733289 - DNA, 613 bp, Homo sapiens
agtgtatctatgaaaaattaggctttggaaacacgggatgaaagttaattacaaaaaccaactgctgtagaattagctatgcgaaattattgtaaaagtttggaaaacaagaaaaatctataaatattctgcacccagattgctttgtaagtgcctttaagttctttctccccttttaagaaacagaaactatagaacaggctgggcacagtaacctatgcctgtaatcccagcactttgggaggccgaggcgggcggatcacctgaggtcaggagttcgagaccatcctggccaacatggtgaaacaccttctttattaaaaatgcaaaaattagccaggtgtggtggtgcacgcctgttaatcccagctacttgagaggcygaggtgggagaattgcttgaacctgggaggcgaaggctgcagtgagccgatattacaccactgtcttccagcctgggtgacagagcgagaccctgtctcaacaacaacaacaacaacaacaaaaaagaaactatagaacaaagatgatccattaaatttgtagcacgtaataaatgagatttgacactgcaatccatagacccacacttaaaagaccttggtacaacatt

SEQ ID NO: 733290 - DNA, 655 bp, Homo sapiens
ttaaaatataaacataaagccttttcctctaccttggccaacatggcaaaaacccatccctacaaaaaatacaaaaattagccgggcgtggtggcatgtgcctgaaaccccgctacttggggcgctgaggcacgagaattgcttgaagccaggaggtcgaggctgcagtgagccaagatcataccactgcactccagcctgggctacrgagcaagactgtctcaaaaaaaagccttttcctttcatctgtagtctttccctcaatttgtcatggtgctttttaagatttgctatttaacatcattgtaaataaagggaaattaataactttaattattggcatgacttttatcattcatcttcatattgtgtaccagtttaagctgcaaatataacagcatttcacttgcatgtgcaattgccaaaattacaccatttgtatgtcatagttcatacatgtatatatattccattcttcccagaacagtggaaattatgcacaaaactagctcagctgtttttattttactttttgatatgtgtatgttctacccacactctccacctttgctttctgaggacaaggaaagcctgaaagaaaaagaaactgtgaattatcctatctttccctttctttctatgttatcatattcaa

SEQ ID NO: 733291 - DNA, 655 bp, Homo sapiens
ttaaaatataaacataaagccttttcctctaccttggccaacatggcaaaaacccatccctacaaaaaatacaaaaattagccgggcgtggtggcatgtgcctgaaaccccgctacttggggcgctgaggcacgagaattgcttgaagccaggaggtcgaggctgcagtgagccaagatcataccactgcactccagcctgggctacagagcaagactgtctcaaaaaaaagccttttcctttcatctgtagtctttccctcaatttgtcatggtgctttttaagatttgctatttaacatcattgtaaataaagggaaattaataactttaattattggcatgacttttatcattcatcttcatattgtgyaccagtttaagctgcaaatataacagcatttcacttgcatgtgcaattgccaaaattacaccatttgtatgtcatagttcatacatgtatatatattccattcttcccagaacagtggaaattatgcacaaaactagctcagctgtttttattttactttttgatatgtgtatgttctacccacactctccacctttgctttctgaggacaaggaaagcctgaaagaaaaagaaactgtgaattatcctatctttccctttctttctatgttatcatattcaa

SEQ ID NO: 733292 - DNA, 681 bp, Homo sapiens
atgtttattgcagcactattcataatagccaagacatggaatcaacctaggtgtccaacagatgaatggataaagaaaatgtgggccagacgtagtggctcatgcctgtaatcccagcactttgagaggccgaggcaggtggatcacctgaggtcaggagttcgagactagcctgaccaacatggagaaaccccatctctactaaaaatacaaaattagctgggtatgttggcaggcgcctctaatcccagctactcgggaggctgaggcaggagaatcgcttgaacctaggaggcagaggttgcggtgagctgagrtcatgccattgcactgcagcctgggcaacaagaacaaaattctgaaagaaagaaagaaggaaggaaggaagggtgatatatatatatatatatatatatatatatatatatatatatgtatgtatattctgtatgtgtatatatatatgtatattctgtatgtgtatatatatgtgtgtgtgtgcgtattcatatatatatacatacatacttacaatggaatactattcagccataaaaaagaatgaaatactgtaattcacagcaacacggatggaaatggaagacagtatattacgtgaataagccaggaacagtaagttaaatgccacatgttctcagtcatatgtcgaagctgaaaaat

SEQ ID NO: 733293 - DNA, 547 bp, Homo sapiens
accccatctctactaaaaatacaaaattagctgggtatgttggcaggcgcctctaatcccagctactcgggaggctgaggcaggagaatcgcttgaacctaggaggcagaggttgcggtgagctgagatcatgccattgcactgcagcctgggcaacaagarcaaaattctgaaagaaagaaagaaggaaggaaggaagggtgatatatatatatatatatatatatatatatatatatatatatgtatgtatattctgtatgtgtatatatatatgtatattctgtatgtgtatatatatgtgtgtgtgtgcgtattcatatatatatacatacatacttacaatggaatactattcagccataaaaaagaatgaaatactgtaattcacagcaacacggatggaaatggaagacagtatattacgtgaataagccaggaacagtaagttaaatgccacatgttctcagtcatatgtcgaagctgaaaaatgttgatctcataggagtaaacagtagaacagaggatactaaaggttgggaagggt

SEQ ID NO: 733294 - DNA, 599 bp, Homo sapiens
tacagtaagaatacagtactatactcttctgggaccatcgttgtatatgtggtctggtgttgactgctacatggcacatgactgtatcttcataaaggcttgtatccagaatatatagagaactcttacaacctaataagagacaaatgacctaataaaaaatgggcayagccaggctcagtggctcaacacctgtaagctcaacactttgggaggctgaggcaagaggattacttgaggccaggagttcaagacagcctgggcaacataatgagacctcatctctacttaaaaaaattttttaattagcagtcttggtggcgtacacctatagtcccagctacttgggaggctgaggtgggaggatcgcttgagcccaggggttcaaggctgcactgagctatgatcacatcactgtactccagcctgggtagcagagaaagaccttgtctctcttaaaaaaaataaatgaataatgaacagatacaatctatgaaagtatcttataaagttaaatcatacttataaaataatttacttataaaccatacttataaagttaccatacaatccacacatttcactcctaggaatttacc

SEQ ID NO: 733295 - DNA, 525 bp, Homo sapiens
ctttactgtgagctactggcatcagttgtcagcttgcttttgaccttcttgaatgggcctcagggggagggggtgggagaaacaatcccatttgctgatcctcagcagacaggactgaagattatctccagccccctggcatcccctccttcactgtcacttctacaggaagatcacgccaggcaagtatcaagtctctaactaggtcaacattaatcctctaatatctgcttcttacattaggtaatcagtccatggctctgggcacttctttgggagataatcatctaatgaagtcacaggctggggacaaactgataagcagatggcatgggaagtgtttgcaaggagggctggtcctcagccctcyaccctgcctccatttcccaggttgccccagatgtgcaggcaaacttaggaattaccacacatgcaaagtggtgacttatcatcagccactttcctttggtcaaaagtcccccaaagttcccactggggcaaaagtcagaggagtccctggtcctt

SEQ ID NO: 733296 - DNA, 585 bp, Homo sapiens
gtgtcagagttttggttcacttcaagaattttctaacaagtagaactgcccaaggtggagtcatctgtcttgtgatccaataagctctccaaccacataacattctcaaaaatggctgaatagtcaaatgtgggatcacccattcataaatatttattgagttcacattctatacccgacgctgcgttagatactagggacacaagaatgaaaacaccctggggttgatgaraaagacatacaaataattgaatgcaatgtgacagctgctataatagagctatctgcaaagtgtaacaagaatatagatgggctagaagttgttctggggggattgagttgatttctctcaaaaggagagatatgatttatctgtgaacaccatagataaacctgaggcaaagaatattgaagttggaggcactataatccagttattttaaatatgaagaaactgaggactgaggtgaaacggtctgctcaatgtcaagaagtagtttatgtacaatattttgtatgcagtagttttgaatgttcaaattgggactttcatgaagagtggtccctaagagaggcaatacataa

SEQ ID NO: 733297 - DNA, 488 bp, Homo sapiens
atccctttttgtttgctatttgtaatacttccaatgcagatggcttcaactgtgttcaacaaatttagtttttattacttaatttgtcyttttttttagatttttttttaactcagcttggtctatttcaaaaaactagtgaacaagaacctagtaaaatcacattttcattgttctaagctgcttgatttttctctaaaaacaattattaaaatgaggctgattctgctctagtcactaatgactgtctgcactaaatcttgtataaaccagccaagaaccaatacaacaactccttcatgtccccttctggttcatactatctctccctgtccatacacagggcctctttttagaggactagtagttccaggtcttaagataagtttaaagaaagatctgaaacttcttgatgcaaatgaaactttctggaaaaagtatgtttgaatattctacaaaacactgacttaaaggaaaagaaaggcacc

SEQ ID NO: 733298 - DNA, 639 bp, Homo sapiens
ccaagctacttggggggctggggcaagaggatcgcttgagcccagaagttaaggctggtgagttataatcgcaccacagcactccagtctgggcaacagagaaagactccatcactaaaatacatacataaataaaatattcactctacataacattactcattcactcaatacataatttaataatggtataatattactagcctactatctgccgtatcctattcttccagatgtcaggaatatagtcatgcatgttgcttcatttgtgttcttctccaacaacctctgctctaatgtaatcattctggggacagaaagagtttcttctgtatctttgggtctcggcttacctagcacagtgcttttataggtggtaaggattcagtaaattacagacttttatttgtaattaggaaataggtttaattgtgttgaccaaagagagagggagagagagagtgaggaaraagaaaaaaagaaaaagtttgatggtaagggaggaatacataggctaataagaatgtaaaaccaataactaagactggcctgcctcattttcatggattaattttaagaagcaaaaccatgcacaaatacctacctatttctagctataacttaccatttcatcaactg

SEQ ID NO: 733299 - DNA, 625 bp, Homo sapiens
caaactaaaaagggctgtgtgtgtgtgtgtgtgtgtgtgtgtgtgaaaaagagagatgggggcccccattccactaagaagatgacagaggccgtgcaggttttttctctgtgatatcccctcctcctacaaatcatgcccagaggagggatcttgaggacctgcccctgcctccccagacccatctccacacccaggccatcctgggcagaggacagcagagctcacatctctgtggagagcagactgggctcactgcaggcctctgtgtcattgttcatcttcacttcataagtctcattctgagacctctcctgacacaccatggctatctggctctcctgggaaaagcacttacaacattcaagatagagaaaatcatcagcagctgccaaccctcctccycttccctcagcaagtaaggcatcacgcatgcacatatgcacacatgcacaaacacatgaacttgtgtatatacacacacacaggcacacacacacatgaacatgcatgcaatttctgtggcctcattttcttgtgatggctgatgaaggcatgacgccatggaagtgttaagattagggagagggttccatgtgggaggatgtctggtgtggatccaagg

SEQ ID NO: 733300 - DNA, 571 bp, Homo sapiens
tatgccacagtacagtagtaggcaaggttaaagaagagcaaacagaaaggaataggatgaagaagaatcacaaaattgattttgtttgttcgtgctgggtggcagttttctactccctagagctttctgattttagaakacagttaagtatcctcagttgaaagtctcccaattcaacggacactgagcaattaaaagaagatgatatgcagtggtcaaaagaaaatgatgtctgtctttttaagaaacatgaatccaaggatcaacttcttggaattttactgctatgctggttgttactgtacctgctaagttcctttctgtagaagggtaagggtggattttttttaatggggtttctttcagaagactacacttccatgttcaaggtcatgagtagttattttagaaatgatttttgtacctgtttaatgataagactgatgatatctagtcatatccatttaccatagggaagtatcctaaattcatgaagtggcctggaattaagccctaagaaagaatctatgtatgtcatcaaggtttatggcaatatcttaggccttggaag

SEQ ID NO: 733301 - DNA, 571 bp, Homo sapiens
tatgccacagtacagtagtaggcaaggttaaagaagagcaaacagaaaggaataggatgaagaagaatcacaaaattgattttgtttgttcgtgctgggtggcagttttctactccctagagctttctgattttagaatacagttaagtatcctcagttgaaagtctcccaattcaacggacactsagcaattaaaagaagatgatatgcagtggtcaaaagaaaatgatgtctgtctttttaagaaacatgaatccaaggatcaacttcttggaattttactgctatgctggttgttactgtacctgctaagttcctttctgtagaagggtaagggtggattttttttaatggggtttctttcagaagactacacttccatgttcaaggtcatgagtagttattttagaaatgatttttgtacctgtttaatgataagactgatgatatctagtcatatccatttaccatagggaagtatcctaaattcatgaagtggcctggaattaagccctaagaaagaatctatgtatgtcatcaaggtttatggcaatatcttaggccttggaag

SEQ ID NO: 733302 - DNA, 571 bp, Homo sapiens
tatgccacagtacagtagtaggcaaggttaaagaagagcaaacagaaaggaataggatgaagaagaatcacaaaattgattttgtttgttcgtgctgggtggcagttttctactccctagagctttctgattttagaatacagttaagtatcctcagttgaaagtctcccaattcaacggacactgagcaattaaaagaagatgatatgcagtggtcaaaagaaaatgatgtctgtctttttaagaaacatgaatccaaggatcaacttcttggaattttactgctatgctggttgttacygtacctgctaagttcctttctgtagaagggtaagggtggattttttttaatggggtttctttcagaagactacacttccatgttcaaggtcatgagtagttattttagaaatgatttttgtacctgtttaatgataagactgatgatatctagtcatatccatttaccatagggaagtatcctaaattcatgaagtggcctggaattaagccctaagaaagaatctatgtatgtcatcaaggtttatggcaatatcttaggccttggaag

SEQ ID NO: 733303 - DNA, 636 bp, Homo sapiens
tcttgactcactgcaacctccgcctcccaggttcaagcgattctcctgcaacagtctctcgagtagctgggattacagacacctgccaccacgcccggctaatttttgtatttttagtagagatggggtttctccatgttggtcaggctggtctcaatctcctgacctcacgtgatctgcccrcctcggcctcccaaagtgctgggattacagctgtgaatcactgcacccggcctcaaagacttcttctttatgcaactgtttgtctcttatctacctatgacctggaaacccccttagtttggattgtcctgcctttctggaccgaaccaatgtacatcttacacatatttgttgatgtctcacatctccctgaaatgtataaaagcaagctgtaccccaaccaccttgggcacatgttggtaggacctctggaggctgtcataggtacatccttcaccttggcaacataagctttgcaaattgattgacatctgtctcagatacttttggttcacagtgttttaagaggaagaaattctaatcatctagaaaggcactaaaacagatggaacagaagcgctcagcacatgtgtaacaacaaaacaaacactttttaaggtatattgcttattt

SEQ ID NO: 733304 - DNA, 565 bp, Homo sapiens
tagtggacaacgctccaccagcccagactcaatgctgagtggggacaaagctggtcatctcggcggtcacacagagttcacttaccgtagtccataaggcaccccgtcccgaaaagcgccaagtgcacgaccatcggctttaccgcctgctcagcacgcctaatgcccgccccggctgcactgggctgagcaaggaccagggcctctgagcagccggctcacaacacactcttatgtcctcgtgtggccactctggaagtaagcagtcacagctcccaagcgtggtcaaaactctgcagcacagatcaagctagctctcagctttccccactcccaaattagcatttggttttytcaagtcagctaagtccatcaccaactctccaattacattccagcttctgaaataggaatgctatgactttactttctccttattcacatgaacctttgccaaaaaaaaaaaaaaaaaaaaaacccaccacacttctcactgcagtatgaggtttcagaaagaaaaaggtaggtgtatgtattcaatctaccatcctctccatcccccaaa

SEQ ID NO: 733305 - DNA, 625 bp, Homo sapiens
agcacaatgctgaacagaagtggagaaagcacgtatcctgtcttcatttttcttctctctctgctttattccccttaccggagaatcctgacggacctatcttcaggtttgctgattctttcttctgctgctcaaatatgccggtgagcttatctaccaaattttcatttcagttgctgtacttttcatctgtagaatttctatgtggtttctccttatagtttctttttattgatattctgcttctactgattgattgctttctccaccatgtatgaattatactttcttgcttcttgcatgtcttccgaattttgcrgcaactctggaatcagattctctgcccttgccagggctggctgctggtgctgccagctgtagttgttttttacttgtttcatgacttttctgaactaattctgtaatgtttgtgtctctgttctatgcagccactgacgtttccacacgttagccatgagaaatacaaattaaaaagcacataagatttaaaaaatgctaaatatcattaattatcagggaaatgcaaatcaaaaccacagtgagataccaccttaatcctgccagaatggccataatttaaaagtcaaaaaataacagatgttgg

SEQ ID NO: 733306 - DNA, 618 bp, Homo sapiens
ccagcccgcattcccgtggactctctaggagccgtattcgggaccgccagcctgcattcccgtggactgcggcatgagcaccaccccactgacgtccagcgtgagtcacccgagatcacggcctgatgcagaaccacactcagacacccgccctgtggagcacaacacaaggagcagcggggagccctgaaggggcccaggcatggcaggcaacccagcacgtgaggaaacctgccctctaccaggcccacagccaaggccaacrcaggagactaggggtcgacccccacagcgaggacggctccatccaccttcctggccatcagcctccggctgctcagagaggacgctcgcaccagcccctctccaactcacagggccctccacaagtacacgatcacgtcggatcttcacacgcagttggggagaagagctccgtgtccccctttcaataaagagaacactggcccagagcagcgcagtgacttgacacaggtcttactgttggtggcggggggcagggggagccttgaatccagcctccgaagaactatctgtgttcctcatcaaagctgcagggcgccacacatgcatgccacttgcttcccgcccacttta

SEQ ID NO: 733307 - DNA, 499 bp, Homo sapiens
cctggctgcctgggacagccggagggcctgaggatggcagcgcaccgggaggcgtggaaggaggcagggccaacatccctagcaacacagaggagtcgcaagcaccttccctgcaggcggtaagccaggagtgtgtggggcgggacagtcagagttggtgaggtctcgctgccggagcatccggtggcaggaagcccagtccagaggctgcagcccaagccacagcagccctggggcagagggggctggccctcgaggattatgtggtcactgcagggtggtctttgccaccccaccacctccccctgaactacccacagcctcytcgctggacccctgcatcctcacgcaccgacacacttcctgctccccatcccgaaggcctctttctccaggtcgctcttccgactgtgtgaggtaaccatgccactgccgcgcttccagtcttcaacagctgcccgctgcaatcatgctgtgatccccgcactgtgccagccct

SEQ ID NO: 733308 - DNA, 649 bp, Homo sapiens
ccaaatcctagtatcaattttctgtattagtccattttcacactgctacaaagaactgagactgggtaatttatgaagaaaagaggtttaattgactcacagttttgcaggcttaacaggaagcatgactgggaggccccaggaaacttacaatcatggcagaaggtgaargggaagcaagacacatcttcccatccatggtggaacaggagagagagaagggggaagtgccacacatttttaaaccatcagatctcatgaaaactcactcactatcacaagaacagcaaggggaattccacccccatgattcagtcacctcccaccagggccctcccccagtatgtggggattacaatttgtgatgagatttgggtggggacacagagccaaaccatattaatgatattagagccctcatgatctaatcacctcttacggttcccacttcttaacacagttgcattgaggattaactttccaacacatgaatatcgtgggacacgttcaaaccatagtggatcttgtattttccaatgactacctactctccacccaaatgttagaatatcccccatcactttctattattgtacactaccttttttctctacactacttctcaatccttatgatttattattactgt

SEQ ID NO: 733309 - DNA, 666 bp, Homo sapiens
agttattttgttgttgttgctatcattgtcattgtcatcatcattatcatcattaccctttaatattcacctccttatggaagtcttccctcatgtagggtatctcatattttttccttaataacaccctgtgcagatctctttcataacacttattatgcagtattttatttattcactcatctgtctcttccctccccaactgcattaaatcttttacttctgtaaacatacagtgcctaacccggagaaggtcctcaaagtaaatgtttgcaaaactaacacagtgcagaggggtatatcagggtttcagaaggggctgtstgtgtgtgtgtgtgtgtgtgtgtgtgtaataaatagaggggtctttgagttttctaattcttgagtcactttgagtaatttctaacacttaagagatttatccattttgtttaaattatcaaacatttgtaaatatgatgttcatattttcttattaccctattaatgtctacagaatctgatagtaatgtcccctgtctctatttctgatattggtaatttgtgtcttctttttcagatctatacatctagaaatttatcaattttattgttcttaaagaaccagcttttggtttcattaatttttctccattgttttcctcttttctaattcattgattt

SEQ ID NO: 733310 - DNA, 614 bp, Homo sapiens
gcattaatgttatattatagttatagctgcatttttttcccctaagcaaccctttctcttctgaaccctatggcagcccgcggttgtgtagattgagctcaggaatgtcttaaaacattaatttggtttgacatgacttggtgcacaaattaattattcaggcacatattgttccatgtacatgaaaagaatgaaactgtagtgaattgcattttaactaccacatgtgaattgtaatgttattagcaaacagactattaaaraacaaaagctggcaacatatagtaattccgaattgggccagtcccacaaaattagcataaatatgtcaatcaatcagaatagttttggacttcctaggaaagtgtccctattcttatctagctctaaaagaatgtgaaataaactattcatttaaccaagtataaaaatatgcctgctatgccgttataatcatgtgtcattaatcagaaaatactgcagaaactctgacaaattaaaaacacaaggatgtgtctgcaagggtttttttagccattaaaaagctgcttcacctctctggcaagctcttttatggcaacttcttactcagtgtactgacatcttcaaaggct

SEQ ID NO: 733311 - DNA, 614 bp, Homo sapiens
gcattaatgttatattatagttatagctgcatttttttcccctaagcaaccctttctcttctgaaccctatggcagcccgcggttgtgtagattgagctcaggaatgtcttaaaacattaatttggtttgacatgacttggtgcacaaattaattattcaggcacatattgttccatgtacatgaaaagaatgaaactgtagtgaattgcattttaactaccacatgtgaattgtaatgttattagcaaacagactattaaagaacaaaagctggcaacatatartaattccgaattgggccagtcccacaaaattagcataaatatgtcaatcaatcagaatagttttggacttcctaggaaagtgtccctattcttatctagctctaaaagaatgtgaaataaactattcatttaaccaagtataaaaatatgcctgctatgccgttataatcatgtgtcattaatcagaaaatactgcagaaactctgacaaattaaaaacacaaggatgtgtctgcaagggtttttttagccattaaaaagctgcttcacctctctggcaagctcttttatggcaacttcttactcagtgtactgacatcttcaaaggct

SEQ ID NO: 733312 - DNA, 625 bp, Homo sapiens
tttgaagctatgtctgatggccaaggggaaaacatgcaacatgaatgtatgtgtatgtgcatacacacacacacacacacacctgttttctgctttgcctctgaagttaatgtgtaaaacttggctgtgcctgttctcataaaaatgatgaaaaaggaaaaattcatcagctataaaaaaaaagtagcattcctccatgttccagagagcgtttgactttccattccatttttgtgggggtttgtttgggtgtttgtttatttgtttgagacagagtctctctctgtcgcccaggctggagtgcagtggcgctatctcggctcactgcaaactccgcctcccaggttcaagtgtgattctcctgcctcagcctcccgagtagctgggactacaagcgcatgccagcatgcctggctaaytttttgtattttagtagagacagggtttcactgcgtcagccaggatggtctggatctcctgaccttgtgatctgccctccttgacctcccaaagtgctgggattacaggtatgagccaccacacctggcccatttttgtgtttttatcataattataggctttctcatttgaaattgagttcattttggaattaataagtgttgct

SEQ ID NO: 733313 - DNA, 629 bp, Homo sapiens
aaagaagtcatatccctcaggaccaccccactaggcgggcatgtgaggctccaagccttcaagtcagtctcttgcccccacagtgctctactggctacagagtcccccaccttgaccaccaccacccaggagtcttgagytgggcctcatgttgtttgagggctgtgactgtgcctgcctggggctggctgcattagccatcaaggtcaggagggcaggggaggcaggtgcccaccaagccaagctggggaggggagggaagctgcactctgcccagaccccttgggtgctatggtggaggacttggccagtttgggggaaccagagcccctgctacctccatcagagacctaagcagggtcagccagaggaagccccacctccactaccagaaagaaacctcagggtcaactggcccatttgtgtccagagcctcggcgccagctcagtcctcttagccaactgagttagagagaaatggtcgttcattcaccttgtcttcttcaggctgagtcccatggtgggacgagaacaccggcctcggtgttccctgctagatccagatcctgattggccccaggcttcctccacctcccatcccccatggcaccttctccagacacaagccc

SEQ ID NO: 733314 - DNA, 368 bp, Homo sapiens
cttaaaaaaaaaaaaaagaatgcacctttagtaaggaaggttataaaacatagtcagaaaggtaaggcatgttgaagattgtctgtgaaagtcatgaaaaatgttttataaaaaggaatttatgcaggaaatgtatgatttttgttttgaaggtctaaacatgttytaaaatgttaaaaaaaaaaaaacaactgaagagttcatgaatatccaggtatattttaaatcaagcacagagttctagttactatctaggatgtggaaagatggaaagactagagactatcactcccatctttacaaacaaagcaataaaagttgagtgaaacaaaaagccacagttttgttgaatctgagaaaaaacaggg

SEQ ID NO: 733315 - DNA, 608 bp, Homo sapiens
attgagcatgctttctttttttttttttttttttttttttgagacagagttttgccctgttgcccaggctggagtgcagtggcacaatctctgctcactgcaatctgcctcccagttcaagcaattctcttgcctcagcctcccaaatagctaggattacgggcacataccaccacgcaggcttatttttgtattattcgtaatgatggggtttcaccatgtaggccagtctggtctcaaactgatccgcccacctcaagtgatcctcccacctcagtgggctcaagtgatctgcccacctcagcctctcacaaagtgttgggattacaggtgtgagccaccaagcctggccgagaatgctctttcaataaaatttcataagggcttgtctaaggataagagtatgattttttctagtagtgtgatcmtttgaatgactaattcctcttaatcttaaaattgtaattttaaaattgtaattaatataaatatgtaatattggagtagtaatacaagtttgagagaatcttaaagaaattttgcacatcgaaatataaaataactactatatcatggaaatactgggtgtcataaaatgatttaaagct

SEQ ID NO: 733316 - DNA, 521 bp, Homo sapiens
aaggatcccagacttccacatctaaacatctaaaaaataattaatactaattctacactgtctcttccagaaaacagaagaggatggaacactttccaattcattttatgaatctagtattaccaagccagacagacagtatacaaaaagaaaactacagatcaatatccctcataaatacaaacacaacatttttttctttctttttcagacatctgtaacagccaaaaaaaattcttaacaatctgttatcaaagagaattcagcaataaataraaagaattatataccatgaccaagtgaaatttattccagggatgcaaggctggtttaatattcaaaaaccaatctatttaatccaccatgttaacaagctttaaaggaaaaaaaaaatcacatgatcatattaattgatacaggaaaggcatctgacaaaattccatacctattcatgataaaaactctcagaaaaacaggaatggaaaggaactccctcaacttgataaacagtacctaccaaa

SEQ ID NO: 733317 - DNA, 614 bp, Homo sapiens
gaagttttagcaaacagaaggaagtaccagaacactgcctgttccctaccactttccaaatgaatcaactacggaacaagtcattagcgggaactttgggtcaaaacgaaaaattcatggttagcagggaagggaagcctagaagaaaacaagaccagctcctctgcaaccaggtgctttaagccactatttctaagaggatcacctaacgatagctgatgtttgyctcctgcacacctcgtggatgccagcactgtgctaagtgtgccacgtgcattctctcagaccacagctctgctcccttggggccagggtgcggcaggacaaaggggaatgtggagggaaggaccttaaaagaggtttgctaatccaggccacagggaacaaaggcccagggctagttacaaaaaccactttccgcatttcagtaaatctcagcttaatgtattttctaacaaaacaaaaaggaggaacacctggtgccttttatcaaaacaagctctggttttgaaaataaaccaatctgtgtggcaggactcaaagtctgtggttatttctgcagttagtagccccacgatagcaaagccctgtgctcaggaagctgggacagcaag

SEQ ID NO: 733318 - DNA, 598 bp, Homo sapiens
ctgctaatgttggtgatggagggaagaagggatcccaaaggtctaagaaaggggagagacttggccgcagtgtgggtaagggaaggagctgacatcgattaaaaaggggagggtgggctgagggcgcagctcagctctactctgggaggaatragcctgccacacatgcgatgtggaaatgagaaagggtttgcgagcctagtgcaagggcttctgactgtggaagaaactctggtgagagctgaagatctggttaaactcgtggggtgagggcatgagcagacggcacaggactcttgacactgcttcaggacgaagccggggcccatacgtagactcccaagaggaaaggaggttccagaattgtaagacgcttactttttcttttataaactgaagttaaacaggggcgctatcagcagcctgctgctggtgaagtaattactagatcagctgaagaaactcgaggggagcatggctcttgcacagaacaccctgcaatgcagatggacatggcctctaggaaggagatgcctcagaccccatatcccaggaggaaaaggaagctgcgcgttcaaggtggccaaagagtaactga

SEQ ID NO: 733319 - DNA, 598 bp, Homo sapiens
ctgctaatgttggtgatggagggaagaagggatcccaaaggtctaagaaaggggagagacttggccgcagtgtgggtaagggaaggagctgacatcgattaaaaaggggagggtgggctgagggcgcagctcagctctactctgggaggaataagcctgccacacatgcgatgtggaaatkagaaagggtttgcgagcctagtgcaagggcttctgactgtggaagaaactctggtgagagctgaagatctggttaaactcgtggggtgagggcatgagcagacggcacaggactcttgacactgcttcaggacgaagccggggcccatacgtagactcccaagaggaaaggaggttccagaattgtaagacgcttactttttcttttataaactgaagttaaacaggggcgctatcagcagcctgctgctggtgaagtaattactagatcagctgaagaaactcgaggggagcatggctcttgcacagaacaccctgcaatgcagatggacatggcctctaggaaggagatgcctcagaccccatatcccaggaggaaaaggaagctgcgcgttcaaggtggccaaagagtaactga

SEQ ID NO: 733320 - DNA, 643 bp, Homo sapiens
aaaaatattctgaagaccagaatatagtacaaggtacatggtacaatctgtgtggtactggcagtgctaacatctgggtttctaacagaatctgtgtttcaggtccctgtggagaccccagactcccacagagcaactctcaccctgcgcccagcgcccccacccccagcagaccctgygagctccctgcctagcgcccccacccccagcggaccctgtgagctccctgcccagagctctcagagctcccaggtctgccactttctgtggcttgtctttgtttctccagagcctgctcagaggcatcaacgcaggcctgcttccactccagggccccctgtatgaagagcaatcagtgttgctggtggaagtgtattaaaataaaaaaaaaagtccgattcccccagggctaagggaatcgaaccctttaaacagatccaaatcctcctcaagtctgttcaaacaaggacgtgttctcaagcctgtggaatggctgatgaggcggaccagaactatcaggagcaagcagatggaccttgcagcgatcgagtatcatacacgggattcaactctacttaaaatagaaagataagtcccaagtctacacaagtcctgataagacttaatatgtgatgggctcttt

SEQ ID NO: 733321 - DNA, 391 bp, Homo sapiens
agagcctaatgaatgtgtgttagatttgggaataccggaaagaagaattaggctttagaatcattggggagaaagaattaagaattagttttagggctgggtatggtggctgacacctgtaatcccagcactttgggaggccgagamaggtggatcacttgaggttaggagttcaagaccaacatggccaatatagcaagaccttgtctccactaaaaatacaaaaattagccaggtgtggtggcgcatgcctgtagtcccagctactcaggagcctgaggcactagaatcactggaacccggcaggtggaggttccagtgagccgagatcacaccactgtactctagcatgggcaatcgagcaagactctgccaaaaaaaaaaaaaaaaa

SEQ ID NO: 733322 - DNA, 562 bp, Homo sapiens
agttatttttacagaagtctactttgcctttgtattttctggaaaccactctgccttgtttgatagtttgacacgtatttaaagcagaaaattttaagtgtaatttagtaattgagctctgagtatgttcttataataagatgatttttttttctgtgttttattttcckcttgaagatttctctttgatagattctgatgtggatggacttacagacatcacagttagctctgttcataccagtgacctttcatcttttgaagaagatactgaggaggaagttgtaacgtctgatagcatggaagaaggagagattacgtcagatggtaaagcattttacataataatgcctctgaagcatcctgtcaagcattatttgtatattctgatggctatatcctgagaaacagtgtggtatagtagcaagagcatgggattttgtagttggaagatttgtttctgagtcccagctccaaagttgtctgtctgagcaagcttggtaagttactaaatctcaacaacccttggttcttcattccttaactctatcccctagtatta

SEQ ID NO: 733323 - DNA, 602 bp, Homo sapiens
ttcttcccagctcgggcagatggcagaagggaccccttggactttttctcgccatccctccccccagcgcaggggcacaagctgagcttgtaaaagcccacagatgttgggggctggagaaggggcaggagagcatcacactcagccccagcctcctcaacctcttggggccccgtgatggggaggagagggcaggtgcggggaggctctggccttccttggtgccccgccctttgtttgcactattggacttaggagtgccgagggtggggagatggagctgcccgtctcagtgtgtgagtgtgtgtgtgcgtgcrtgtgtgtgtgtgtgtgtgtgtgtgtgtgtgtctgtctgcctgtctctctcctcctggacccagggcagccaagggcagggataggcgcagtggtcagatgaagcagcgccagagaggggacctcccagctcttatttgcaccctccccacctcaccaactttggtccctctctgggggcatgaatggttaacaaacaccagagcagtactccaatattggagagtcgctgggggcacagggctttgaatcagggtagtatcctgccttccctcccctgaccccac

SEQ ID NO: 733324 - DNA, 594 bp, Homo sapiens
tatgtacatatgagaccctcataactcaataagacaatccaataaaaatggacaaaagatttgaaaagagtattaaagaagatatacaaatggaaaataagtgcaagaaaaaatgctcagcatcattttagtcattaggaaaatgcaaattaaaactacagtgagaaagctcctacacccccaatagaatggctaaaattacaaagtctgggctgggcacagggcttacacttaggtgggaggattgctcaaggatacaggactttgagaccctacctttaaattaaaaaaaaattttttttagttgttgactaggatgtatgtatgtagaagaagaggacctgtggacctttttttttttttttttccgcttgagacagggtcctactctgttgcccggagtggagtggcaraaccatggctcactgcagccttgaactcctgggctcaagcagtcctcttaagtagctgtgcacactgccacatctgcctaatttttaaatttttggtggagactgggtcttgctatgctccccaggctggtcttgaactcctggcctcaagcgatcctctctcttggcctctcaaagtgtt

SEQ ID NO: 733325 - DNA, 393 bp, Homo sapiens
ttatgattccagatgtagaaactcccggaggagggaaatgaggggctgctggcatgtgacatgtgttttaaggtgtttggcagtgtttctcaaagtggtgacaaaatgttcaattttattacagggaattggtaaaagaaatatgaatactaggtcagagattgttcacctcakcaaaaggatttaccattattgattagggtgcagaaagtatgtatctaggtcctgcttaaatcacattgtcaacaatataaatctgtcagatcagatttttctgaaagaacaattataacaaaatacactatagctaattgcatcccctcacggctaatttccatgcaatgatgtaaatttccctggaagcaaaaccaaaaaaggtaaatgttgcaaaaa

SEQ ID NO: 733326 - DNA, 586 bp, Homo sapiens
actcaaagtacaaaaataaaaataaaaattatccgggtgtggtggtgggtgcctataatcccagctactcaggaggctgaggcaggagaatcacgtgaacccgggaggtggaggttgcagtgagccgagatcacaccactgcacttcagcacttcagcctgggcaataagagtaaggctctgtctcagaaagaaaaaaaaaaaaaaaagaattatccttcacagccttcagaaggaagtctctactgacaccgtgattttggactcctggcctccagaaccatgagaaaataaatttctcttgttttcagccacccaattcatggcgatttgttacggcatcctcaggaagcgaatccagcggcggagaccagagctgctagttctgcttcctcttggtcacgagccttctttgggatgaccacgtmggcctccccactggcgtggctgcctccaacctcactccctccagtccctctgctgcaccgcggctgccggagtgacattactaaaacacatgacggcgttgcattcctgtttgaaacctgtatcagctagaacgctttctgttccaagtaacagaaaac

SEQ ID NO: 733327 - DNA, 643 bp, Homo sapiens
aggcaggagtattgcttgaacctgggatacgaaggttgcagtgagccaagaccacaccactgcaccccagactgggcgacaaagcaagactccatctcaaaaaaaaaagctttagaattcaaacaactaaaatttctactaacaattaaaacacaaaaatggttatgtgaggtgtctctctagaaggggcaattaaaataaataagatacacgcacatgtgtgcaagcgtgcaygcatgaaaaaaagtataaagaaaaactttagcagagagtccaagagtccaacacactttcaaaatgttagagccgtatggtgactattttcaaaatggaagagaactgggcctctggagtttaggcttgggtcttgcctaaaagactgagccaatcaggtggaaatgggaacagccccaggggagggggtcctagaagtcctgacaagtagaattaatatccaaagtgagttgggaagagtcaaggtcaggcctgggaaaacaaggcatgtatcaaatcctagagatgagggagaaggaatggccaggtaggaggtgcggaagcaagttcaagcacacagaggtccttttacagggtgtccagcctgagccatagtagataagcaaggtggctgaagaggctacaccag

SEQ ID NO: 733328 - DNA, 614 bp, Homo sapiens
tatttgctgtacttcactttaaaaactagatgtgcttggggattgagaaagagcatgaagaaactttctggatgatgggaacatcctgtatcttgataagatttgtgttgcacagatgtgtgtatttgtccaaactcggagaatgttcactttaggatttgtgcatttcattatatgtaaaatttgcctcaagggaaaaatactggaaacaatataaaaattatgttctagattggccgcgtggggtggctcatgcctgtaatcccagcactttgggaggccgaggtgggcagatcacgaggtcaggagatcragaccatcctggctaacacggtgaaaccctgtctctactaaaaatacaaaaaattagctggacgtggtggcgggcgcctgtagtcccagctactcagcaggctaaggcaggagaatggcgtgaacccgggaggcagcgcttgcagtgagctgagatagcgccactgcactccagcctgggcgacagagcgagactccgtctcaaaaaaaaaaaaaaaaatttattgtgttctagataataatatgcatgctgaagtattttggggagagtgtactgatgttcacaacttactttgaaatgc

SEQ ID NO: 733329 - DNA, 546 bp, Homo sapiens
agacgttgacttcttttctctagttctgaaaatcctagatggcatcttcttccaatataaggatgtttcatccatactgaaaatatgtcatttagtatagcttgtttcatcagtgctcttagcttagatctttggataacttgctgcagcctctamatcagaatttggtgcttcatctcgcacttttatgttatggggacagcttctttccttaaacttcgtgaaccagcctttgctagcttctaactttccttctgcagcttcctcacactttatagaaatgaagggagttagtgccttgctctggattaggctttggcttgtagaaatgttgcagctggtttgatcttctatctagaccactaaaactttctccatgtaagcaataaggctgtttgacctacttaatttttgtgtgtttcctggagtagctcttttaatgtcctccaaaaacttttcctttttgttctaaacttggctgattagtacaagaggcctacctttctgcctatctcagttttcaacatgccttctttactaagctta

SEQ ID NO: 733330 - DNA, 602 bp, Homo sapiens
agctggtttgatcttctatctagaccactaaaactttctccatgtaagcaataaggctgtttgacctacttaatttttgtgtgtttcctggagtagctcttttaatgtcctccaaaaacttttcctttttgttctaaacttggctgattagtacaagakgcctacctttctgcctatctcagttttcaacatgccttctttactaagcttaatcatttttagcttttttatttaaagtgaaaagtttgtgacccttttcacttgaatactttgaggccattgtagggttattagttagtctaatttcaatattgtgtctcaggaaataggaaagcccaaggagaggaagagagactgtacaaaaacttgtcaatggaacagtgagaatgctcacaacatctgttgattaagtttgccattttatatgggagcagtttgtagcaccccaaaacagagtagtaacttcaaacatcactgatcagattacaataacagatatcatcataatgaaaaagtttggaatactgcaagagtttccaaaatgtgacacagacctgaagtgagcatatgctgttgaaaaaatgataccgatatacttgctt

SEQ ID NO: 733331 - DNA, 631 bp, Homo sapiens
tgggctgcattcccagatggttaaagcagagacaggaggtcggcacaaaatacacgtcataaagaccttgctgataaaacaggttgcagtaaagaagccggccaaaacccaccaaaaccaagatggtgatgagagtgacctctggtagtcctcactgctacactcccaccagcatcatgacagtttacagacgccatggcaacatyaggaaattatcccatatgatctaaaaaggggaggcatgaataatccaccccttgtttagcatataatcaagaaataaccacaaaaatgggcaaccagcagccctcagggctgttctgtctatggagtagccattctttcattcctttactttttgcaatctctgctcactgcaagctctgcctcctgagttcaagcgattctacagcctcagcctcctgagtagctgggattataggcgcctgccaccacgcccagctaatttttgtatttttagtagagagtgggttttgccatgttggccaggctggtctcaaactcctgacctcaagtgatccgcccacttcggcctcccaaagtactgggattacaggtgtgagtcaccgcgcctggcctcctttacattcttaataaatttgctttcatt

SEQ ID NO: 733332 - DNA, 631 bp, Homo sapiens
tgggctgcattcccagatggttaaagcagagacaggaggtcggcacaaaatacacgtcataaagaccttgctgataaaacaggttgcagtaaagaagccggccaaaacccaccaaaaccaagatggtgatgagagtgacctctggtagtcctcactgctacactcccaccagcatcatgacagtttacagacgccatggcaacattaggaaattatcccatatgatctaaaaaggggaggcatgaataatccaccccttgtttagcatataatcaagaaataaccacaaaaatgggcaaccagcagccctcagggctgttctgtctatggartagccattctttcattcctttactttttgcaatctctgctcactgcaagctctgcctcctgagttcaagcgattctacagcctcagcctcctgagtagctgggattataggcgcctgccaccacgcccagctaatttttgtatttttagtagagagtgggttttgccatgttggccaggctggtctcaaactcctgacctcaagtgatccgcccacttcggcctcccaaagtactgggattacaggtgtgagtcaccgcgcctggcctcctttacattcttaataaatttgctttcatt

SEQ ID NO: 733333 - DNA, 633 bp, Homo sapiens
tggttggcttcaaatgttatttatacattttttattgaaggtttcacatatttatgttttgacacctcaaattaagctgcaatgatgaatgaacagctgatacaaattgagcacttactattccctaagcaagattttacacaggtcatttagtttaatgttcacagtaagcttactattgcctccccttctcagatgtggacattaaggcctggagggattaacttttcccaaggctgcgtgggtgctgaatgcgtcagggtgtctgactccagggtccaggtgcctaacgcctacaggtccaccttgacggcaccgtacgggccttccactcctcaatccagattaggaacttgggaaatagttatgattttattttattcaagcacccagtctcctcccttccccttctccgtcccctgcacaccatgcatgctgtgacacygaggccctgcctggccagatcctccacttccagaggcagccctcaggctgccattttgtggcttcttttccctctgaaggctttcctgctgttggttttgatctgacctcactggatagtaatcctgagaatgggaggaaggaccacccggtgtgatctgtcctggtctctgagcacctggacagcct

SEQ ID NO: 733334 - DNA, 603 bp, Homo sapiens
agagacggacatggaaatgttagttgaatttccaggagccgtggcactggagacaacagagggtggttgtggtgacggggaagggcagggtgctgtgggagatgggtcagggaaggcctcttctaaggaagggtgtggatggggctgggatgagagactatcagggcagagctgcaggtgtggggaagggacggatgcaaggcaaggcagggctcactggacatgacctgggagcacagagcagagggcagaggggagaccacacagggcctgcgagccaagactcaatcttaaatgcaacagaaaaccatggaaaggtctacactgagagtgacgggatctgactcatgcttattttgttatatttttaattgtggtaaaaaactcatcamataaacttttccattgcactcactttcaaatgtatagtggagtaaagtacgttcacattgtgcaaacatcacaccatccatttccaggttattctcatctggcaaaactgaaactctgtccccattaaatatgaactccccattctccccagcccctgacaaccaccgttctttcagtctctaggaatttgactcctagactcctcatata

SEQ ID NO: 733335 - DNA, 633 bp, Homo sapiens
ctgacctctcagctccaggctggttatttccaacagcctacttgggtgtctcaaaggcactttacactcaatgtgtccaacactgaactcaaggctcccggcatcgccagttatccctccacatttccaaccctatggattgcactagcgtctgtccattatgcaggccaggctgcaaaggctgtctcaacgctgcccttatgctgtcggggcttagaacatgacaccccaaagcrtggtgcctcagcctgagtattttgaactgaaggacattggaaggaactcagaagcaaggtctttccaaccttctcctcataccctctcttctgcttgccttcatcctccaaagtgagtcacagaaaccagaatttatcttcctcaagatgggtcatagaacctagaaaccctcctgctaaagcaaaccataaaacctagaaaggtcactctctatcttctccttctcctttgaaaactctcatttcagaaagggtcctgccccatacccaggaggaatggaggctacacagagaggctgagaagaatctgagcagacagttttgctgggtcccctttcagtctgttcccagtaggtcatacccgtttgtccaatcacatttctatctggctgtccat

SEQ ID NO: 733336 - DNA, 633 bp, Homo sapiens
ctgacctctcagctccaggctggttatttccaacagcctacttgggtgtctcaaaggcactttacactcaatgtgtccaacactgaactcaaggctcccggcatcgccagttatccctccacatttccaaccctatggattgcactagcgtctgtccattatgcaggccaggctgcaaaggctgtctcaacgctgcccttatgctgtcggggcttagaacatgacaccccaaagcatggtgcctcagcctgagtattttgaactgaaggacattggaaggaactcagaagcaaggtctttccaaccttctcctcakaccctctcttctgcttgccttcatcctccaaagtgagtcacagaaaccagaatttatcttcctcaagatgggtcatagaacctagaaaccctcctgctaaagcaaaccataaaacctagaaaggtcactctctatcttctccttctcctttgaaaactctcatttcagaaagggtcctgccccatacccaggaggaatggaggctacacagagaggctgagaagaatctgagcagacagttttgctgggtcccctttcagtctgttcccagtaggtcatacccgtttgtccaatcacatttctatctggctgtccat

SEQ ID NO: 733337 - DNA, 629 bp, Homo sapiens
gactcaggtatccaggcacattcatctctgcaggtctgccatcttgacacgaggtcattgcagaaggagagagggtgtagagtcatgccagttcttaggtgctcctgacaaggagatctgcagcactctgctcacattcctgttttccagaactcagccagtacccagtgcaactgccaaagagtctgggaagcatagagagtacacggatagctggagatccttcatcactactgtcatatgttcatttatgcaatacatatcaatgggttcaccccagtcaggctgactccaagaggctaagatgacttcaccttgggtggtttgcagctgggaaagaaaggcaagtcggcacygatcgaacagatcattcacttcagtgggctgtcgagctgtgctagaggcaggtgcagtgtgctgcagaaatacagatggtgactactaccctggagtcttggggagatcctggtgtgcattggtgtggggttggaaaggtgagttggcactcacccccttcaagaagaagtgggaaggacatttcaggcaggggcaagtgcaaaggcacagggcctgaaagaactaggctgggagaagaggatggcattggaatgggtgggagaggggtctgc

SEQ ID NO: 733338 - DNA, 629 bp, Homo sapiens
gactcaggtatccaggcacattcatctctgcaggtctgccatcttgacacgaggtcattgcagaaggagagagggtgtagagtcatgccagttcttaggtgctcctgacaaggagatctgcagcactctgctcacattcctgttttccagaactcagccagtacccagtgcaactgccaaagagtctgggaagcatagagagtacacggatagctggagatccttcatcactactgtcatatgttcatttatgcaatacatatcaatgggttcaccccagtcaggctgactccaagaggctaagatgacttcaccttgggtggtttgcagctgggaaagaaaggcaagtcggcactgatcgaasagatcattcacttcagtgggctgtcgagctgtgctagaggcaggtgcagtgtgctgcagaaatacagatggtgactactaccctggagtcttggggagatcctggtgtgcattggtgtggggttggaaaggtgagttggcactcacccccttcaagaagaagtgggaaggacatttcaggcaggggcaagtgcaaaggcacagggcctgaaagaactaggctgggagaagaggatggcattggaatgggtgggagaggggtctgc

SEQ ID NO: 733339 - DNA, 602 bp, Homo sapiens
gtaaggacagcagcctcacagcatcagtctgaagatagaatgggttaatgcagccaggcacagtggctcatgcctgtaatcccagcactttaggaggccgaagcaggcggatcatgaggtcaagagatcaagacaccctggccaacatggtgaaaccccgtctatactaaaatacaaaaatactagctgagtgtggtggtgcatgcctgtaggcccagctacttgggaggctgaggcaggagaattgcttgaacctgggagacggaggttgcagtgagccaagatcgcaccactgcactccagcctgggtgacagagtgagactttgtctcygcaaaaaaaaaaaaaaaaaaaaaaaagaatgggttaatgcctgagaactctttggcacagtgtccagcacaaattcagcagtcactcagtgttggctatcatctttggtgatgttggtcccaaacccagacctctgctcttgtcctcggctcatacacccacctgtatagcccatatgcactttaaacatgagtccaaaatggaatccaaaatattagatgccctcgttgccaccaccaggtttgctttcctctcaagccactgagggat

SEQ ID NO: 733340 - DNA, 587 bp, Homo sapiens
gtgtgcctgagagaaagttgtgacaaggaggagaagcaggaggagagcagctggggagggaacccaagcccagtccaccttcctcgtttcttacagggcaacgccaagagaaaagtcctgaggaatattgcagccttcttgttcctctgcaatactttggtaatctgcaccaagttattcttattcttttaattttgctgtaaactttcattttaggttcaaggggtacgcatgcagatttgttacatgggtaaattgcgtgtcgctgaggtttggtgcacaaatgatcccgycacccaggtaatgagcatagtacccgataggtagtttttcaccctgcaccccacttctgacctctccccctagtagtccctagtagtgtctattgttcatatatttgtgttcatgactaccattagctcccacttataagagaggacatgaggtatttggttttctgttcctgtgttaattcacttaggataaggactccatttctatccaggttgctgcaaataatgtgatttcattcttttttaaggctgcataatattccatggtgtagagctaccacattttctattttt

SEQ ID NO: 733341 - DNA, 539 bp, Homo sapiens
tcagttataagtggacttttgactgtagagctcttaaattttttaaaattaaattttagccaagtaaatagcaaacattacttgtttttttctttctaaagtttacatcaagatgaaattttggaggtgggacatttctgtttactggaggtctagggtaattactatttaaagctgtttgtcttcggaaatttttagtaaatgttttctatcttccaaaccacagtatatggttttatttatgtcaggagagaaggttaaatgaaaaaaacaaaacaaaacatttctgtcacactctaamtatgaaccaaaattttaaattaaaggcgtacctgaactagtgactcaaaaccaacacaaataaacatgtgtgagaccaaatccaagaagtcatgcatggctttaactaaagctccaaagagagcacaaaaagcgtagcttttccatgattaaaacacctattaaaaacagcttcctgcaaatggggtgcaatctacattttcaggccacatattctagtgtctcaacttctcagttta

SEQ ID NO: 733342 - DNA, 554 bp, Homo sapiens
catcattataaatgtttcttgcctaagctagaggtactaaccgagaaataaaattttgagggtgagtctaaaaaccttcaatttttttttcaatttgatttcagctgcaatgctgttttgctaattacctggatgttaacatttcaaatacrtggtaaggtttacatctttgagggactgagaaaggcctgggaaaggttaaagtatgtgttgtaaatcctgcagcaaagtcaagcaggcaatttgagcatgtaaagggttttcttgaggcagtgaaagaagagccctctgaaaatgttatgtagttattatacagttaatagttattcaacttggtctttaacttgtctgtggctggatgttgtttatgggttacactctaattcacagtttcagatgtcatttcacaatgtctaaaaaatatgacctattgaatgtctactttcatgaagttactgacataattttgcatccaaaattttaaaattttaaatatttttctatggaatttgaaaataatatgtatgctctttatactacttaataatgctatc

SEQ ID NO: 733343 - DNA, 554 bp, Homo sapiens
gccccttccaaatctcatgccctttttatatttcaaaaccaaacatgctttcccaacagtcccccaagtcttaactcaagttagcattaacccaaaagtctaagtccaaagtctcatctgagacaaggcaaatccctgctacctgtgagcctgtaaatcaaaagcaagttagtaacttccaagatacaatggaggtacaggcattagacaaattctcccactacaaatgggagaaattggccaaaaccaaagagctacaggcctcatgcaagttggaattccaatggggcagtcattaagtcttaaagctctgagatgttctcatttgactccatgtctcacatgtgggccatgctgatgcaatgggtgggccctcatggccttgggaagctcctttatggactggaattgtgtgcctstggcttttctaggtgcacggtgcaagctcatggtgaatctgttatttaggggtctggagtatagtggccttctcacaactccagtaggcagcttcagtggggactctgcatgagggctccaaccccacatttccc

SEQ ID NO: 733344 - DNA, 548 bp, Homo sapiens
tcaacctctgcctattacccagttccaaagtcacttccacattttcaactgtctttatagcagtgccccaaactacctgtattaattttctgtattagtttgttttcacactactattaagttactaccagagaatgggtaatytatacagaaaggaagtttaatttactcacaattctgcattgctggggaggtctcaggaaacctacagttatggtggaaggcaaaggagaagcaagtaccttctttactaggcagcaagagagaggcagagcagaaaaaaacaccacttatataaccaccagatcctttgataactcacttactatcatgagaacagcatgggggaaaattacccccatattccaatcacctcccaccaagtccctcccttgaaacatggggattacaatttgagataagatttgggtgggataaaattttacagtaacgaattcaatacaagtcacagaatatagatttttttgagaatctctgaggtttccaggtttctctttaattatccaccttattaaaataatcttttt

SEQ ID NO: 733345 - DNA, 548 bp, Homo sapiens
tcaacctctgcctattacccagttccaaagtcacttccacattttcaactgtctttatagcagtgccccaaactacctgtattaattttctgtattagtttgttttcacactactattaagttactaccagagaatgggtaatctatacagaaaggaagtttaatttactcacaattctgcattgctggggaggtctcaggaaacctacagttatggtggaaggcaaagragaagcaagtaccttctttactaggcagcaagagagaggcagagcagaaaaaaacaccacttatataaccaccagatcctttgataactcacttactatcatgagaacagcatgggggaaaattacccccatattccaatcacctcccaccaagtccctcccttgaaacatggggattacaatttgagataagatttgggtgggataaaattttacagtaacgaattcaatacaagtcacagaatatagatttttttgagaatctctgaggtttccaggtttctctttaattatccaccttattaaaataatcttttt

SEQ ID NO: 733346 - DNA, 548 bp, Homo sapiens
tcaacctctgcctattacccagttccaaagtcacttccacattttcaactgtctttatagcagtgccccaaactacctgtattaattttctgtattagtttgttttcacactactattaagttactaccagagaatgggtaatctatacagaaaggaagtttaatttactcacaattctgcattgctggggaggtctcaggaaacctacagttatggtggaaggcaaaggagaagcaagtaccttctttactaggcagcaagagagaggcagagcagaaawaaacaccacttatataaccaccagatcctttgataactcacttactatcatgagaacagcatgggggaaaattacccccatattccaatcacctcccaccaagtccctcccttgaaacatggggattacaatttgagataagatttgggtgggataaaattttacagtaacgaattcaatacaagtcacagaatatagatttttttgagaatctctgaggtttccaggtttctctttaattatccaccttattaaaataatcttttt

SEQ ID NO: 733347 - DNA, 548 bp, Homo sapiens
tcaacctctgcctattacccagttccaaagtcacttccacattttcaactgtctttatagcagtgccccaaactacctgtattaattttctgtattagtttgttttcacactactattaagttactaccagagaatgggtaatctatacagaaaggaagtttaatttactcacaattctgcattgctggggaggtctcaggaaacctacagttatggtggaaggcaaaggagaagcaagtaccttctttactaggcagcaagagagaggcagagcagaaaaaaacaccacttatataaccaccagatcctttgakaactcacttactatcatgagaacagcatgggggaaaattacccccatattccaatcacctcccaccaagtccctcccttgaaacatggggattacaatttgagataagatttgggtgggataaaattttacagtaacgaattcaatacaagtcacagaatatagatttttttgagaatctctgaggtttccaggtttctctttaattatccaccttattaaaataatcttttt

SEQ ID NO: 733348 - DNA, 583 bp, Homo sapiens
ggagaaattagttattttgccaaggctttggctggaatgacgtgctttcctttaaggaatcaaacttgacttatagagccaataaaagccccttgggaaaactggctttatgccttgtctacacagtccctatacagggttcctaacctggggtaagtaaataatgtcactttttgacaggttcatgagccccaagttatcccgtggtatcaaaaaagaaatttatgcaactcatatttgagggtatagactcatgrctggctcagctttaaaaagtcttatctgagattcattttatggaacagtttcatcaaatccaatttttaaaacctatgtaaaaataattattcttgctgcacttcgtacaaataatcaggccaagtataataaagcaacttggtcataccatgatttgtctttagtaaaatggcagactggggagagtaaaaaattatactttaagaactatggtacatctgttattaaattctagatttatctgttgttgttgaacttttttttgaaagaagttgaacctttgaataagccaatgacaagttctaaaattgaggcagtaataaat

SEQ ID NO: 733349 - DNA, 620 bp, Homo sapiens
actcttcctccctagagacgggacgccaggagggaagtcagggctcagggataaccctgggttccctgagggggtgtggcggggcccccagaatttcccacagaagtcaccagccaggaaagggagtggtctcccaggtggggatagacaggcggagagggagggccaggggcttggttctgtggcccctggctctgctgggcttccctgtcacagcacagaggcactgcccctacggggtccccagcacagacagcccctgccaggaggtgccctatcccaccatccctgggcaggcagytgtccttggggggctggggtgccctctggtggcagcagcactgcacagacccccagggtcagggccggcagctgtacaggcctggggacacctgcagggtgaggtcaggagtgccaggccatgcagaggcgggtcgagggagccattggtcctcattcctgagggtccagaaccagaacggtcttgatgcaggtcttgatccagtgagtcacctgggcacttggctggggacactgaagtgagccagaaacacatccccaggggagcccccagacccagagaggggcccaggatggaaggggacaagccaggggagggg

SEQ ID NO: 733350 - DNA, 542 bp, Homo sapiens
ttagatttgggtggagccagaaagtcacaccatatcactgcaaaggatccgcagcaaggaagggcataaaatcctaaattttaaaataattgtcattatttcaatttatgaataaatattatatatcatttataaatgcatatsacattatacacaaggttaaatgcaaatatcctctgaagttggcctggctcagatcaaggaagaagccctgcctgtgaaggctgcagcctaggctgttatttttgcttcgctcagcccagtgtctgatcaaatattccctcactcagggcatgaaggctggggcctgaaaccttatccaatcaggagccgtggtctagaaactgtccaatcaggcatgcagctggaaagaacaggctacttccgtaattttgcgggtcctttgtgtttttctgcgtccagagctgcagttcttctcttcactgctctgtgtcctctgctcctagaggccaagcctatgtgtccttgtgtcctgcaggtatctgcagatttatggctaaaagaccgggaccccctggaag

SEQ ID NO: 733351 - DNA, 596 bp, Homo sapiens
ttagctattataaacagatattattgtgactttcttcaaaaccttatgaacaaatatttgatgaatgttttattgttaggcttgaaatttaacattcatgaatagtgacggaatatatggctttcatcagtgagacctcaaagataagaaagacatgggttattttaacctgcttattaggttaatgtacagtgttgtattactgactctagttactcttgtttcattattttcatagagtaacaccttaaattgtaaatattatattttgttttaacgagaacaaagaaatttttaatccagttatttactcttaagctgcagtaaaatgagggaatgataacgacattgttgcaaaacatgtagagtgcatttcaaagtcaaaataaatgtraaatagacattaatttggaacattaaaaaatattgtgtttattaaaatattagtttgaagaaacatgaaatgttacagatagtctttttatcttgagtagttttttcttaagccagtatatatattattctgaactctattattcttaaatgttttcttaataatgcagaagtacactggatttgggttgtttccacagatt

SEQ ID NO: 733352 - DNA, 627 bp, Homo sapiens
ggattgggaaagtcgacattaatcaactcattattcctcacagatttgtattctccagagtacccaggtccttctcatagaattaaaaagactgtacaggtatggatattagtattgttaattgatgataagctggaataatattaagacatacaaagcacatgttgtaacttttattatgcttccttagaggtaagatgcaawtttgcccttagccagtgtaagatggtaaatatgacttcataaaattaaaaagaagaaggagtacagttaatcagaagaattatcttgactagaactttccaaatttgtcctaagactctcctagagatgaaactgtgacatagtaaccaattctcctggagttgtactatctagtatgatagtcatttgccaaatgtttacatcagttaaatgaattaaattaaaaatgcaatttctcttttgctccagatacatttcaagtgctcagcagccacatgtggcaagtggctgccattctatgcagcacatatataaagattttcatcatttcagaaaattgcattggacagtgtagagaaaacatgattcatagaaaagctattgttatttaaatacagtgttctatattagtcagtggggtaa

SEQ ID NO: 733353 - DNA, 494 bp, Homo sapiens
ctagaatttaataacagatgtaccatagttcttaaagtataattttttactctccccagtctgccattttactaaagacaaatcatggtatgaccaagttgctttattatacttggcctgattatttgtacgaagtgcagcaagaataattatttttacataggttttaaaaattggatttgatgaaactgttccataaaatgaatctcagataagactttttaaagctgagccagycatgagtctataccctcaaatatgagttgcataaatttcttttttgataccacgggataacttggggctcatgaacctgtcaaaaagtgacattatttacttaccccaggttaggaaccctgtatagggactgtgtagacaaggcataaagccagttttcccaaggggcttttattggctctataagtcaagtttgattccttaaaggaaagcacgtcattccagccaaagccttggcaaaataactaatttctcca

SEQ ID NO: 733354 - DNA, 524 bp, Homo sapiens
cccaaagtgctgagattacaggcgtgaaccattggcctctacccttctctttactagagcaaaggaatatttccatttctagttacctagttacccactaggtcagggaagacagaaactgcttttaatattcttttgctgcttgaagaattaactcaatcatatgccctgaccaattcacatggaattaaactcytgggtctagcaaatggtgtttatttcactagggggaggagaaacctttatgaagtaggtctacagcggagccaaccttatctgttgctataattttgccccagtttttaaaggcctcattaaagatatcaaggccatgattccacagggatttataaactcatcagggacatgtcagggaatgagataatgaagacaacacactatttggtgagttatcgccggagccacactgtatttggctgtgagcactgtatatcgtggcttaattagaaacacccgttaaccaggagccagactgacatttttatcttgcgcccatacttcta

SEQ ID NO: 733355 - DNA, 547 bp, Homo sapiens
agtttcattcttctgcatgtggcttgtcaattatcccagcaccatttgttgaatagggtgtcctttccccattttatgtttttgtttgctttgctgaagatcagttgactgtaagcatttgtgtttatttctgggttctctattctattggcatatgtgcctatttttataccagaaccatgctgttttggtgactatggccttaaagtatagtttgaaatcgggtaatgtaatgcctccagatttactctttttgcttagtcttgcttttggctatgcaagctattttttggttccatatgaatgctacattttttttctagttatgtgaagaataatggtggtattttgayggtggtatttgatggacactgaatttgtagattacttttggcaatacagtcattttcacaatattgattctatccatccatgaggaggcccacttgcactacttctattcaacatagaaccagaagtcctagccagatcaatcaaacaagagaaataaatcaaaggcatccaaattggtaaagaggaaatcaaa

SEQ ID NO: 733356 - DNA, 572 bp, Homo sapiens
acacatatccatgcatgtattcatacataagagaattgtcaattcatctactgataaaaaggtgtcaggaaaccgttaaaatatctcctggaaaaaatgaatttaatatttaaataatttgtttaaaatgttgacatttagaaacaagttgatacaattactgattacaatatcaaccgtatggtggttcactaaatatggatgcatcttaacttttcatctatttggtgcaaaacagtttggtatgccaggggcctttcttgtgcaaatcaacctgataattcaggtagtggaaagccggcagtaacaaaaaaaacctttcaatttaaaaactgaaaaaaaatgtttatcctttaattcatcaaagggtgagttttttaaaraaatggatagggctgggcacggtggctcatgcctgtaatccagcactttgggaggctgaggcgggcggatcacaaggtcaggagttcgagaccagcctgaccaacacggtgaaaccccatctctactaaaaatacaaaaattagctgggcatggtggcatgcgcctgtaatcccagctgctcaggaggc

SEQ ID NO: 733357 - DNA, 675 bp, Homo sapiens
tttctaaatccagtttctcctcttctgcactggttcctctcctggatcgcctacttaagaacatctttccaacaattcacaccttgaaatcccatttttgagtgtttactcattactagatcttttccgttgacatagacagtatgctgcaatttaccctctccctaccaaaatcaaaaacaaaaaccaaaaaagaacaaaaaagctcaattttttttagatctttcatttactgtctccacttccttttctcccattctctttgaagtcacycccactagattttaccctcaccactccactaaaaatgctttcccaaggtcaccagtgatgttcaaactgataaatccaatggttgatcctaagatctcattttaattgacatatcagaagcgtttgaccctgatgattagttcttccttcttaatatatattaatatgttatggactaaatgtttgtgtcctccctgaattcctatgttaaatcgctaaccccaatgtaagggtatttggaaatggagccttcgggaggtaattagttatagataatgtcacaaggatgggactccatgataggattagtgtccttagaagaaggaagactacaactccttctctccaccctgtgaggacacatccagaagaaggtcttcagcaaaccaggatgtggtacct

SEQ ID NO: 733358 - DNA, 638 bp, Homo sapiens
agtgatgttcaaactgataaatccaatggttgatcctaagatctcattttaattgacatatcagaagcgtttgaccctgatgattagttcttccttcttaatatatattaatatgttatggactaaatgtttgtgtcctccctgaattcctatgttaaatcgctaaccccaatgtaakggtatttggaaatggagccttcgggaggtaattagttatagataatgtcacaaggatgggactccatgataggattagtgtccttagaagaaggaagactacaactccttctctccaccctgtgaggacacatccagaagaaggtcttcagcaaaccaggatgtggtacctcacctagaaataaatcagtgtgcatcttaaacttggactccccaccctccagaactgtaaaaaatacatggctgttgttgaagccacatagtctacagtattttagtaaagcgacctgagctaagataatatatttctttctttcttttttttctttttttgaagttttcacagtatttctaatgaggttcttttttaaatttttatttaggttttgggatacatgtgctgagagtgcaggtttgttacacaagtatacacgtgccacagtgatttgctgcacctatca

SEQ ID NO: 733359 - DNA, 634 bp, Homo sapiens
tcctcataagcatactgcacactaattttaatctcagattttgctacctgaaggacctaacccatgacacttggtgccaagaacggtccaaataaaggagaggctaaaatggaattctggagttggaccagctgccaaccagctggcgataaaaactccactggtggcaggtggagcacagagaggccctggcaggagctaacagcacaattactaaaacattcactggctgtggatcaatgttataccactggcaaaaactgcattagctggtacaacctggtgttgaagagagatgtagtaaacagtaaccatagggcagtgggattgagtgcctattgctaagcttgagagtgattgattgattgataattaaaaastaaatgtggagaccagaaggcctcactgattgcatataaagagactctactctcttaaaactggaaggcagagaaagctgaggaccagacctagagcttagtgggaaaagtagctgcgcttcaaagaagaaaaatcctcaccacggcagctatgccatgccaagtgcaggagccttgttgggaaacaatgaccctgacatgtagaatgagcctatctgggttgatgctctaaatattttgaatccccaggtttt

SEQ ID NO: 733360 - DNA, 634 bp, Homo sapiens
tcctcataagcatactgcacactaattttaatctcagattttgctacctgaaggacctaacccatgacacttggtgccaagaacggtccaaataaaggagaggctaaaatggaattctggagttggaccagctgccaaccagctggcgataaaaactccactggtggcaggtggagcacagagaggccctggcaggagctaacagcacaattactaaaacattcactggctgtggatcaatgttataccactggcaaaaactgcattagctggtacaacctggtgttgaagagagatgtagtaaacagtaaccatagggcagtgggattgagtgcctattgctaagcttgagagtgattgattgattgataattaaaaactaaatgtggagaccagaaggcctcactgattgcatataaagagactctactctcttaaaactggaaggcagagaaagctgaggaccagacctagagcttagtgggaaaagtagctgmgcttcaaagaagaaaaatcctcaccacggcagctatgccatgccaagtgcaggagccttgttgggaaacaatgaccctgacatgtagaatgagcctatctgggttgatgctctaaatattttgaatccccaggtttt

SEQ ID NO: 733361 - DNA, 462 bp, Homo sapiens
ccagtgaaaacataaagtgcatatgaggacatgagggctaaggggatccccagggttcccttttccattctcagaattccttatgatatataagccacatacattgcctaatgccgtttataagaaatgtcatatctttttaatcaaagtaggtgtggctttaagtgaaaagtcccatttctcttctttcagagagagtgaagatgctgacgatgagggtcgkgtggggagccaaagaaatgaccccacctcattgtgtggatgtttctcagcttttcccttgatgttgaatggtgtcactgccagttttggcactctttacctgttttatgctgtgaagccaagatgagattctcttgctcagccttgggattgtgtaggttgggtagaagagctggttagggcagtataatgccatttgccccaggcagccccatgggcatcctgtgactgacactgctc

SEQ ID NO: 733362 - DNA, 493 bp, Homo sapiens
acagtactgggtataaagtactgcataatgcaatatgctggaattacttccattttctgaatgataaatccaatctaatttagtctgattttgaatgctgtggacttccaatgagtttttaaaaatatctttcaactgcttaccagcccttatttagtatgccatattttgaatgctttgttcttaaagaatatcaaatatattatccaaagcatttgcagaaaagaagaaagtttttctctacaaattkctgtaagcaaagatcatttttcaagctaatgaaatcttagtattttccaaataatgcttagggaaacatcaaaggaaagaacagtagataccattccatgtgtagacattatggaatgtaaatatttttcactagatattcataaagatagcagctatacatgaatttacatcaacctgcttaaaatcacattatacaaaggatccatcacattggactcattgtaatgtcaaggaagcccag

SEQ ID NO: 733363 - DNA, 574 bp, Homo sapiens
cttcatttatttaggttttttatttctctaactgatgttttgtagttttcagtgtggaggtattataaattcttaattagatttattcctaagtagctgcatttttatactactgtaaatagtattttaaaatacatcattttcagttgtttgctgctaacatataggaatacaatttattttagtatattgaatctgtattcagcaaacttgcaaaatcacttactatgtgtactagtttgaagttttgtgcattgtttttgattttctacatacgcaatattatcatctgtaaaaaatatctgcattatttacactctaattttatactgttttcttgccttactgaatcggctagaacctccgagacaatgtatagatatagatgatagyggacatcttttcttattcagggggaacatattcactactttgctatttggtataattttatctctagaaacttctgtgtaaatgacatttatcatatttagagagtgttcttgtattcatagcttgtggagagtttttaaagtgtttacttgagaaatgttattgtatgatatttttctgc

SEQ ID NO: 733364 - DNA, 517 bp, Homo sapiens
gaactcagactctccttgggcaggtcttgctgcagccgctatgggggttggcagtgaggttcccaggtcaatgagttgtgtacctagaaggattatgtcttcctctgctgagtcatgcagattgtcagggaagtggaggaaagctggcagtcacaggcctcacccagctcccatgcaaaccaaagggccggtctcaagcccactgtttccccctaacagcaccctacgtctgtttccaggtgggcaagccaggcttgagaacttgccccaggctggttttcygatctgcgaaagaaaagggtttggttcttccctggcctgtggagtctgcacaccggattcatgccttcccctgagttctggccaggaagcttctcacccagttcaaattgttaagaagttcatctggagatttcctcctccctgtggagttttacccccagctcctctggccgccctcccaatggatccctgtggtgctaggcaggaatgggctgcttggggtcccagcaagctc

SEQ ID NO: 733365 - DNA, 517 bp, Homo sapiens
gaactcagactctccttgggcaggtcttgctgcagccgctatgggggttggcagtgaggttcccaggtcaatgagttgtgtacctagaaggattatgtcttcctctgctgagtcatgcagattgtcagggaagtggaggaaagctggcagtcacaggcctcacccagctcccatgcaaaccaaagggccggtctcaagcccactgtttccccctaacagcaccctacgtctgtttccaggtgggcaagccaggcttgagaacttgccccaggctggttttccgatctgcgaaagaaaagggyttggttcttccctggcctgtggagtctgcacaccggattcatgccttcccctgagttctggccaggaagcttctcacccagttcaaattgttaagaagttcatctggagatttcctcctccctgtggagttttacccccagctcctctggccgccctcccaatggatccctgtggtgctaggcaggaatgggctgcttggggtcccagcaagctc

SEQ ID NO: 733366 - DNA, 625 bp, Homo sapiens
atatgaatgtttccacattatataaatgcttttttgtacattatgtaaatggaatcatagtttatttttggatggcctagcttcatttgctcaacaatatgtttatgatgttcacccatatttttggatatagttgtagatttttaagtttcattgttgtgtagtattccattgtgtggctatggcataactgacttattcattctctttgccaggttttttatttttaatttttctaggcttttttttttttttttcccttgagacggagtcttgctttatcacccaggctggggtgcagtggcacaatctcggctcactacaacctccgcctcccgggttcaagcgattctcctgcctcagcctcctgagtacctgggactacagacgtgtgccaccatgctcggctaatttttatatttttaagagatggagtttcaccatattggccaggctggtctccaactcctgagctcaggtgatccaccyacctcggtcccaaagtgctgggattacaggctgagccaccttacctggccaatttttccaggctttgtttgcttgttttgcttactgtttcactaatttttttcgtcttcattttaattgctagtaaagaagattc

SEQ ID NO: 733367 - DNA, 636 bp, Homo sapiens
aatagaagtatctttcaattttcccttagatactagtcaatagagtcgttttacatattcagctaatctcatcagattcaaacaccttgcaaaaaggaccattctatttcctcagagttcaacaagttcacgtagttagcgggtgtacaaatacgtctataaatgctgtctgactaaatcccctcgtcacactcaaaaccaaagtgtgtgtatgagagaagaatgtttaaaaccactaccagaacaatgctatagtaactagagaatgatgcctttcaaaagagaacagtgagaattaaacaacaaaaatcaccttggcaatgttttcaaaatcactgcattgtttrgtttcatagaacaataatcatacttccactttttcagaaatgcttatattctatcaatagatgatgtttcgaactctacttctctcaagcaatgcaaaaataatgacgattagttaaatacttacttggtggttctgtaagtatatttataggtgacttctcgagaaatctgtcgagccaaggcaaaaagctcatctcttcttgtcagcagggcattatccttcacacagagttgagcagccgcttcattaacagtgagctggatatccaaaacagagtttcaaaatta

SEQ ID NO: 733368 - DNA, 555 bp, Homo sapiens
ggcagagacgtggcttgtttacattagcatctggcatgggctggaagttcaatatatatctgttgactgacgaatgaattgaaaaatcctttataatatcacttttactacccacacatacaatattccattgtagaaaacaaccrtatattatttaaactaccttcactctggacatcaaactacctccagttttccatagactatttaaaaaaaagctgcataagagattcttaaatgtgtacctttgcacacatatccaattatttctttgcaataaattcctacaaatagaccagttaggtcacagggtatactaaaattttaagaaatttatacattccacctaactaccctcagaaaagtttctctaaatcataatgctgtcaataattacatgatgagtccatttcctacaatcttgaccaacactagttattatctttttaaaactttaccaattttatatttctaaaacagcatttggttgtaatttgcatccctttgactatgaaactaaaggtttttcttacatctttgactcattacaatgtt

SEQ ID NO: 733369 - DNA, 555 bp, Homo sapiens
ggcagagacgtggcttgtttacattagcatctggcatgggctggaagttcaatatatatctgttgactgacgaatgaattgaaaaatcctttataatatcacttttactacccacacatacaatattccattgtagaaaacaaccatatattatttaaactaccttcactctggacatcaaactacctccagttttccatrgactatttaaaaaaaagctgcataagagattcttaaatgtgtacctttgcacacatatccaattatttctttgcaataaattcctacaaatagaccagttaggtcacagggtatactaaaattttaagaaatttatacattccacctaactaccctcagaaaagtttctctaaatcataatgctgtcaataattacatgatgagtccatttcctacaatcttgaccaacactagttattatctttttaaaactttaccaattttatatttctaaaacagcatttggttgtaatttgcatccctttgactatgaaactaaaggtttttcttacatctttgactcattacaatgtt

SEQ ID NO: 733370 - DNA, 634 bp, Homo sapiens
aatcctctgtactccacctcttcattcccttcttgccccaacccctggcagccactgatctttttcttgtccccctcattgtgccttttctggaatgtcatgtagttggaatcatgtagtatgtaacctttattagactggcttctttaacttagtaatatgcatttaagtttcctccataatttttcatggcttaatggctcatttcttcttaatgtgctgaataatatttcattgtctggayttaccacattcatttatccattcacctactgaaggataccttgattgcttccaagtttcagcaattatgactgtagttgctataaacattcatgtgcagatttttgtgtgaatataagttttcaattcctttgggaaaatatcagggagtataattgctggatcatatggtgagagtatgtttagttttgtaagaaaccaccaaactatttgtcttccaaagtgactataccattttgcattttcaccaacaataggtgagagctcctgttgttctacattctcatcagcatttggtgtttagcagtgtcctggattttggccattctaataggtgtatagtggtatctcattattgttttaatttgcatttccctgaggacatatgatg

SEQ ID NO: 733371 - DNA, 634 bp, Homo sapiens
aatcctctgtactccacctcttcattcccttcttgccccaacccctggcagccactgatctttttcttgtccccctcattgtgccttttctggaatgtcatgtagttggaatcatgtagtatgtaacctttattagactggcttctttaacttagtaatatgcatttaagtttcctccataatttttcatggcttaatggctcatttcttcttaatgtgctgaataatatttcattgtctggatttaccacattcatttatccattcacctactgaaggataycttgattgcttccaagtttcagcaattatgactgtagttgctataaacattcatgtgcagatttttgtgtgaatataagttttcaattcctttgggaaaatatcagggagtataattgctggatcatatggtgagagtatgtttagttttgtaagaaaccaccaaactatttgtcttccaaagtgactataccattttgcattttcaccaacaataggtgagagctcctgttgttctacattctcatcagcatttggtgtttagcagtgtcctggattttggccattctaataggtgtatagtggtatctcattattgttttaatttgcatttccctgaggacatatgatg

SEQ ID NO: 733372 - DNA, 634 bp, Homo sapiens
aatcctctgtactccacctcttcattcccttcttgccccaacccctggcagccactgatctttttcttgtccccctcattgtgccttttctggaatgtcatgtagttggaatcatgtagtatgtaacctttattagactggcttctttaacttagtaatatgcatttaagtttcctccataatttttcatggcttaatggctcatttcttcttaatgtgctgaataatatttcattgtctggatttaccacattcatttatccattcacctactgaaggataccttgattgcttccaagtttcagcaattatgactgtagttgctataaacattcatgtgcagatttttgtgtgaatataagttttcaattcctttgggaaaatatcagggagtataattgctggatcatatggtgagagtatgttyagttttgtaagaaaccaccaaactatttgtcttccaaagtgactataccattttgcattttcaccaacaataggtgagagctcctgttgttctacattctcatcagcatttggtgtttagcagtgtcctggattttggccattctaataggtgtatagtggtatctcattattgttttaatttgcatttccctgaggacatatgatg

SEQ ID NO: 733373 - DNA, 538 bp, Homo sapiens
agcagagtctaaaatctcaccttttactttctccttaatgcagtgtctcagaaaatgaacacttttccttagtgttctgcaatatttttgacctaaacttaataggagggaattattcagtattcctcccacctgctttgtacttttaatcattctaatctaatagtaagacccaagcaatggccagttctaccataaattagcacaaaagaatgatgccaataacatcctattcacggctagcccatagggctcccccgtcagccaactctcagtctcaaaatccagaagcacaactcttaaaatttaatcttgtgttcttttcctgttactaaggcttagttgttctactctccagggctctctaagcaggtaacagaagcaatttaggaataaayagtgagaaatgctgttttataggagacgaaaacacggcacaccaaggttaagtagtttgtagatgatgttgaataggttcaggtacaggtcaatgcagtgatgaggaaagcacctaggtatacttgacagatagtcccct

SEQ ID NO: 733374 - DNA, 489 bp, Homo sapiens
gttgaactaatttaaactcccaccaacagtggaaaagtgttcctatctctccacatcctctccagcatttgttgttttgagatgatatcccattggggttttgatttgcatttctctgatgaccagtgatgctgggtrttttttcatatgtctgttggctgcataaatatcttcttttgagaagtgtctattcatatcctttgcccactttttgagggagtcgtttgtttttttattgtacatttgtttaagttatttgtgaattctggatattaagcccttcatcagatgtgtagattccaaaaattttctcccattctgtaggttgcctgttcactccgatgataatttattttgctgtgcagaagctatttagtttatttagaccccattcatctattttggcttttggcattttagtcatgaaatctttgcccatgcctatttcctgaaaggtattgcataggttttcttctaggatttttctag

SEQ ID NO: 733375 - DNA, 584 bp, Homo sapiens
gttcactcatgatttggctctctgtttgtctgttattggtgtagaagaatgcttgtgatttttgcacattgattttgtatcctgagagtttgctgaagttgcttatcagcttaaggagattttgggctgagacgatggggttttctagatatacaatcatgtcatctgcaaacagggacaatttgacttcctcttttcctaattgaataccctttctttctttctcctgcctgattgccctggccagaacttccaacactatgttgaataggagtggtgagagagggcatccctgtgttgtgccagttttcaaagggaatgcttccagtttttgcccattcartatgatattggctgtgggtttgtcatagatagctcttattcttttgagatatgtcccatcgataccaaatttattgagagtttttagcatgaagggttgttgaattttgttaacggccttttctgcatctgttgagataatcatgtgttttttgtctttggttctgtttatatgctggattacatttattgattcgcgtatattgaaccagccttgtatcccagggatgaagcccacttga

SEQ ID NO: 733376 - DNA, 501 bp, Homo sapiens
gctcacaacttggtcctctaagaggtagtcagtggtcagcgcttcagcttgaccacagcgtttggttctttctttaagtgttgtgttgtaatgcttggattataaaagccttaacacggccccatttgatcagttccctgccaactcttgtatcctcatttcactaagctttgttacactcactagactgttaacaacggagaaaaacctgtgggtactgaatatgccatatacaacttgctatttattctgttccctgtttagaaggccatggctacccttaactatctgaactyttcctgtcctgtaagactgagctcactggcaatatcctataggctgctttccctaagcctccccatctttcttcctccctctttctacttctctcctacctccttttccctctctcccctactcacctgctttccttttgcccctcccacatcctcttcccccttcttgtcatttttccatgtcaagaaatttccagatatatag

SEQ ID NO: 733377 - DNA, 619 bp, Homo sapiens
aggttgtataagaagattttctatattagagtgttgtttaccctcctgaatcttgaagctacttcattttgagtatttacatctagttatgaaagttagttattactctttcagttccaacataacttccacatagaaacatttaaccagtatcatatgtaagttgtgtcataagtaagtgtcttataatttttgtaaacatttttatgtggtcttttcagtttaatattcttacctattctaaaagtatttgaaaaatgcaggaataattatttgtaatctggtttttatgtgtttttaccctcaatttacacatctttgaagttgccagactactcaggcattgctactaaatgtttgtcaactttacttgctttgtgggaccaaattgagaagatgagataacttcttaattgggttttgacaagcctatttgaaaaattaactcmcaattataacaagtgaaagataaagacaagtatgttgaaaataagctgtaggataaattgtatcctgaattcaaaagtatggatatcaaaaatatattaggaagtattcacacaacaaaaggagtctttgttttgccatttagctcattataaagttctaagtggcaaat

SEQ ID NO: 733378 - DNA, 608 bp, Homo sapiens
tttgtgccttctgtaattttgattgaacactttatatgaattccattttgtgtcttttggtgtactgcttatacatttttttaaaaaacgaaacaaaattttggtgattctcctagagtttaaaatacatatttttaaataatctaagcctaccatcagataacactatactataaggcttcatgtgtactgcagctactccataatagagtatatccaattccttcctcgcatcccttgtggcattgctgtcattcacttcatttataatatgctrtaacccccaatatattctttctattattgctttgaacagttatcttttagctcaattaaaaataagaaaaataaaagattatatgtattttaccttcatttattcctcctctgatgctctttcatttctttatgtagattcaaatttcttactgatattattttccttatctctgaagaacttttatcatgtcttgtaggccaagactagtggtgatgcagtctctcagtttttgtttgagaaagtccttgtttcttctttgcatttaaagtataatttcactggatatagaattatctgttagatttttttttctctttcagcgctctga

SEQ ID NO: 733379 - DNA, 608 bp, Homo sapiens
tttgtgccttctgtaattttgattgaacactttatatgaattccattttgtgtcttttggtgtactgcttatacatttttttaaaaaacgaaacaaaattttggtgattctcctagagtttaaaatacatatttttaaataatctaagcctaccatcagataacactatactataaggcttcatgtgtactgcagctactccataatagagtatatccaattccttcctcgcatcccttgtggcattgctgtcattcacttcatttataatatgctataacccccaatatattctttctattattgctttgaacagttatcttttagctcaattaaaaataagaaaaataaaagattatatgtattttaccttcatttattcctcctctgatgctctttcatttctttatgtagattcaaatttcttactgatattattttccttatctctgaagaacwtttatcatgtcttgtaggccaagactagtggtgatgcagtctctcagtttttgtttgagaaagtccttgtttcttctttgcatttaaagtataatttcactggatatagaattatctgttagatttttttttctctttcagcgctctga

SEQ ID NO: 733380 - DNA, 598 bp, Homo sapiens
ctggaacaaattgagggtctggaaagctccttctctgtgatctgaagaatgaattgcaggtagcctcaccctactgtgggcatgggccagtgttgtttaaaatgaacaggaactacatattagcccttcaggtaatctctccaagcactacgcattgttctgctgtagatcttttgcttgtgggcctggttttacctctgtgttgcctatgaagttsttaggctgctggacttcatctacgagactgtttttgcatcctcttgggtctgcactctgtattgtcctttggaattccactgtgctcccacacttgagaactatggcctgggtcaaaacactgaactacctactctctaaagggacaagataaaagtgtcggaatttctggcaggatctagggattgtcagtgtttacctgctggagcttttatattaagcatagtatgatgtggcttctctgattagggtatttttgttttaacacagtgcccgttctactcgggcacttttctaggctcttggtgtatgacggttcctcttcttgtgaagcaacattattttggcggggtgggcagaggggatcaagggttctgttttg

SEQ ID NO: 733381 - DNA, 632 bp, Homo sapiens
aaactcatatttctaatgttgttgggcactctaccaaaagaaaagttagcatttcttactaattcatagagtattatggaaagaggaaaaaggtctataaaagaagccaataagtacatatataatgacagatagaaaaaaattgcagcaacagaattcttgccaacttctaaactcattagcrtgacagtgacattctcattaaaaatagcataatcagaagcactctgaggaactgtgccttctgatgttttactgcaacaaaatcctccattaaaagcaattgtgtactcccttgtatcatatctataaaataaataacctttgagtaaatggaaatattttcagaaaaacttttgtacaaatatacaaaggtgtcattccagtttttacaagtctttagactgaatgaccttggggatagctgtttcttccatttctggtttccatactggcaaatatggtggaaacaacactgtggcatacagaagaggcttatgctggaaataattctcattaattggttgcttatgtctgatgtaatgtgagagcctattttagagtttgacttagtttgtgctgtttcattgttttccttcccattttaggcaattggcgtccgattgaatgag

SEQ ID NO: 733382 - DNA, 627 bp, Homo sapiens
agggatggttacttggcccacgtttggggagttagttggggaagtctttctaaaagaggcttgtgtgacctggaagggcaaattgaaataggcaagatgaagggagtagaagagaggatgtcttaacttaggtttaagtaattcaatgagccaaggctcagaactaaagagaaagygtgtgtacacacacatgcatgaatctacatacatgtctacttttgagggagtggaaagcagtaggcaccatgaaaaggtttggttaacagcggatagcttggtatggatgcagtaaagagtttaggaataagagtacaagaaattggaggggtaagcaaggccaggtcatgcttgtgtgtcgtgataaggagtttggtcttttttcaaaggcattgaggaatgttaagcaaggaagagaatgtgttttatatgctacaagtggtagggagagtgtagtgtagggtagtaaagctgtacatgggaaactcttgcagcattccaggaagaagaccttagtatcctgaatgaagagaatgacatgaacctgaagagaaatggatgaattaggggagatattaaaagcagaaaagtcaataggactcagtgatttattgcatggaggaagtgaga

SEQ ID NO: 733383 - DNA, 627 bp, Homo sapiens
agggatggttacttggcccacgtttggggagttagttggggaagtctttctaaaagaggcttgtgtgacctggaagggcaaattgaaataggcaagatgaagggagtagaagagaggatgtcttaacttaggtttaagtaattcaatgagccaaggctcagaactaaagagaaagtgtgtgtacacacacatgcatgaatctacatacatgtctacttttgagggagtggaaagcagtaggcaccatgaaaaggtttggttaacagcggatagcttggtatggatgcagtaaagagtttaggaataasagtacaagaaattggaggggtaagcaaggccaggtcatgcttgtgtgtcgtgataaggagtttggtcttttttcaaaggcattgaggaatgttaagcaaggaagagaatgtgttttatatgctacaagtggtagggagagtgtagtgtagggtagtaaagctgtacatgggaaactcttgcagcattccaggaagaagaccttagtatcctgaatgaagagaatgacatgaacctgaagagaaatggatgaattaggggagatattaaaagcagaaaagtcaataggactcagtgatttattgcatggaggaagtgaga

SEQ ID NO: 733384 - DNA, 373 bp, Homo sapiens
aatttcctacaggaaagaccaaaccatttaattttacaggtggaattactaagcattcaagagttaatttctatcttttacaaacttatacagcaaaatggaaaagaacaaatactctctaaatcattccatataacctggacaccaaaaatagacaaatacagtttaaaaaaataaattataggccaatctcactcaagaccytaaataaattataccaaatggaatacagtggagttaaagacaaaaaaaggtgtatttatcatgaccaacttggctttatcccaggaatgcaagggtagtttaacatttagaaatctagaattgtgatttacataatagattaaaaggggaaacccatatataatctcaa

SEQ ID NO: 733385 - DNA, 614 bp, Homo sapiens
tcactgtatagtttttaaaaacacttaaacattcattttataaatatttttgtatatatttaatatttaataaaaataaaattccaaagatctttggggttgaggaggtaagagaggtttatcacagcattatttcacgctggaaattgggaaacagcaaaggtcacataagagactgtttaaataaattaaggtgcgtctatacaatggaagagcatgcagcaatgacagatgatgtgttagaaatgtacgtactgataggaaggatattcctggtagagcaggtgaaagaagaagattatagaacaacattgtatctcatttgtataaggaacatgtaaaaatacacatagataagagtatwaaaagtgacgcctataatcccagcatcttgggaggtcgaggtgggaggattgcttgaggctgggaggtcaaggctgcagttaactatgattgtgccactgcactgcagcctgggcaacagactgagactctgtctcaggaaaaaaaaaaagtgtttagtaggtacaacggaaagttaacaatgttgggatctgggagttgatgttaggatttatttaatttattttcttaatttctcctagttttccacc

SEQ ID NO: 733386 - DNA, 618 bp, Homo sapiens
ctttgtagaatgagtttggaagtattcactctatcttttgaagtagtttgaataggattggtatcagtttttctttaaatgtttggtagaattaaatagtgaagttgtcaggtcccaggcatttatttgctgggacactttttattatggcttcagtctcattactttttattgggctgttcaggttttggatttcttcrtggcttaattttggtaggttgtgtgtgtctaagaatttcatccacttcttctagattttccaatctattggcatatagttgctcctagtagccactaaagatcctttgagtttctgcagtattgattgtaatgtctcctttcatctctgattttatttatttggatctttttactttctttcttagtctgcctgaaggtttgtcaattttgtttatcttttcaaaaaaccaactttttgtttcattgatgttttgtaattcaatttcatttacttctgctccgatcttgaatatctcttctagtaattttgggtttggtttggtcttgcttttctagttctttaagatgaatcattaagttatttatttgaagtttttcttcctttttgatgtaggcactcatagctataaacttccc

SEQ ID NO: 733387 - DNA, 618 bp, Homo sapiens
ctttgtagaatgagtttggaagtattcactctatcttttgaagtagtttgaataggattggtatcagtttttctttaaatgtttggtagaattaaatagtgaagttgtcaggtcccaggcatttatttgctgggacactttttattatggcttcagtctcattactttttattgggctgttcaggttttggatttcttcatggcttaattttggtaggttgtgtgtgtctaagaatttcatccacttcttctagattttccaatctattggcatatagttgctcctagtagccactaaagatcctttgagtttctgyagtattgattgtaatgtctcctttcatctctgattttatttatttggatctttttactttctttcttagtctgcctgaaggtttgtcaattttgtttatcttttcaaaaaaccaactttttgtttcattgatgttttgtaattcaatttcatttacttctgctccgatcttgaatatctcttctagtaattttgggtttggtttggtcttgcttttctagttctttaagatgaatcattaagttatttatttgaagtttttcttcctttttgatgtaggcactcatagctataaacttccc

SEQ ID NO: 733388 - DNA, 618 bp, Homo sapiens
ctttgtagaatgagtttggaagtattcactctatcttttgaagtagtttgaataggattggtatcagtttttctttaaatgtttggtagaattaaatagtgaagttgtcaggtcccaggcatttatttgctgggacactttttattatggcttcagtctcattactttttattgggctgttcaggttttggatttcttcatggcttaattttggtaggttgtgtgtgtctaagaatttcatccacttcttctagattttccaatctattggcatatagttgctcctagtagccactaaagatcctttgagtttctgcagtattgattgtaatgtctcctttcatctctgattttatttatttggatctttttactttctttcttagtctgcctgaaggtttgtcaattttgtttatcttttcaaaaaaccaactttttgttkcattgatgttttgtaattcaatttcatttacttctgctccgatcttgaatatctcttctagtaattttgggtttggtttggtcttgcttttctagttctttaagatgaatcattaagttatttatttgaagtttttcttcctttttgatgtaggcactcatagctataaacttccc

SEQ ID NO: 733389 - DNA, 578 bp, Homo sapiens
actttccatccctgtctctttctcaacctcttctttaaggccaataactcttggatttgcccttttgaggctattttctagatcttgtgggcatgcctcattcttttttattttttctttagtctcctctgaccgtgtattttcaaatggcctgtcttcaagatcacagattgtttcttctcaatcaattctgcaattaagagactctgatgcattcttcagtatgtcasttgcatttttcaactcccgaatttctgttcaattctaattattttaatctatttgttaaatttattgatagaattatgagttccctttctgtgctatcttgaattttatttagtttcttcaaaacaactattttgaattctctgtctgaaaggttacatatgtctgtttctccaggactggtccttggtcccctatttaattcatttggtgaagtcatggtcttgatgcttgtggatgtttgttgctgtcttggcattgaagagttaggtatttattatagtcttcacagtctgtgcttgtttgtacccatccttcttgggaaggttttccatgtatctgaagggact

SEQ ID NO: 733390 - DNA, 555 bp, Homo sapiens
aactttccatccctgtctctttctcaacctcttctttaaggccaataactcttggatttgcccttttgaggctattttctagatcttgtgggcatgcctcattcttttttattttttctttagtctcctctgaccgtgtattttcaaatggcctgtcttcaagatcacagattgtttcttctcaatcaattctgcaattaagagactctgatgcattcttcagtatgtcagttgcatttttcaactcccgaatttctgttcaattctaattattttaatctmtttgttaaatttattgatagaattatgagttccctttctgtgctatcttgaattttatttagtttcttcaaaacaactattttgaattctctgtctgaaaggttacatatgtctgtttctccaggactggtccttggtcccctatttaattcatttggtgaagtcatggtcttgatgcttgtggatgtttgttgctgtcttggcattgaagagttaggtatttattatagtcttcacagtctgtgcttgtttgtacccatccttcttgggaag

SEQ ID NO: 733391 - DNA, 610 bp, Homo sapiens
agccaccatttataagcatttaccaattaattaatgcaattgagttagcagatttcacagactgatagatagatcatttattcatcccaagacatttgcaaggcaaatagtagtatccctgcttttacagtgcagcatgtataagcaagatagttaagtaaaatgcaratgaccccataagttgtagaaagaggatttaaagtcaggtctgtctgaacctaagccctactcttttcactatggaacatggtgtatttgagaaactcaggtgtacagaatatataaaatgtctgaaggtctcaatgactcacagggaccagtctgtactggatgagttaaagagctgtttcctgaagctgcatccctctgtacgtggcacagcatccccctatcacccggtgctgtgagttttaggaaagaggacattccctactcaaggtctccctgcagcttgaccttccagaagccccatgctttgccccttctgcggaaggcctgatatttcccttctcactttctgacactggcaggttctttttgtggaaggcacctatgctggggtggagcacacatggggctccacctcaagtaatggtactgattgggtgag

SEQ ID NO: 733392 - DNA, 610 bp, Homo sapiens
agccaccatttataagcatttaccaattaattaatgcaattgagttagcagatttcacagactgatagatagatcatttattcatcccaagacatttgcaaggcaaatagtagtatccctgcttttacagtgcagcatgtataagcaagatagttaagtaaaatgcagatgaccccataagttgtagaaagaggatttaaagtcaggtctgtctgaacctaagccctactcttttcactatggaacatggtgtatttgagaaactcaggtgtacagratatataaaatgtctgaaggtctcaatgactcacagggaccagtctgtactggatgagttaaagagctgtttcctgaagctgcatccctctgtacgtggcacagcatccccctatcacccggtgctgtgagttttaggaaagaggacattccctactcaaggtctccctgcagcttgaccttccagaagccccatgctttgccccttctgcggaaggcctgatatttcccttctcactttctgacactggcaggttctttttgtggaaggcacctatgctggggtggagcacacatggggctccacctcaagtaatggtactgattgggtgag

SEQ ID NO: 733393 - DNA, 546 bp, Homo sapiens
tgctatgtcaaataaaaagcaaccctggaggcacaaatcatccttagatacataaaatccctgaccaaggaaaacctgaaacagacccctcccacccgtacctccttcagtctgcccccaaccccaactctgaaattgtggaaaaactaagccaaaaggagacacagaccacactattgtggtcttataagcaaatgattgcttttaggagggccaaaaaatggttgcttataccattccatctctgaggcccccttctcactttagtgcgcgccaatagagtgaactactacatgaaagaaacaaagggaaaccacagaggtgtttgcagctcttaccttttgaagcctgttttccaagaccaaacatgagctgattattaaycagctaaaattatggcccaatgaaaagaggaaatgacatgaaaatcagaatctgagtataccccacttccaaatcatacttataccactaagatcatagtaatttcaaaactcaagattaaagggctatgaaataagcaaatggtattatccaattgctctt

SEQ ID NO: 733394 - DNA, 529 bp, Homo sapiens
agatgaaaggcttttttccttgattttatgtaaaaagaaaatttaaaagctaaaatcctaaatttaagaagtaaatgtataatcattgacacagaaagtactgactcccagtcgataatctaacctggggctggtacagtttggcctgaattgtccaagctggtatccaagaatactaaatgctccgaaagcaacatttcagctacatttcattaaaaatacgtttttctagtgtgttttccctgtcatccacatagcaaaatagcatagayattgttttgcaattacctcaatattaaatttttccatatgatggcctggtatatctcttagaaatctgtatttaattcaaagccaactatatctttcttgatggtgaataaaaaatgggaaagaggtgagaattcctattaagtctcattccctaaacccgggttgattttgttttcaactagagtagtgtcaaaggtggggttgacaaggtgccctccctcctgtttgattttttttttttttgagacctactctc

SEQ ID NO: 733395 - DNA, 643 bp, Homo sapiens
acagagtttcactcttgatgcccaggctggagtgcagtggcacgatcttggcgcatcgcaacttccgcctcccaggttgaagcgattctccttcctgagcctctggagtagctgggattacaggcatgcgccaccacacccagctcattttgtatttttagtagagatggggtcatgttggtcaggctggtctcgaactcctgacctcaggtaattcgcctgcctcagcctcccatagtgctgggattacaggcgtgagtcaccatgccgggcctaagcccacacttcttaatacttaatagatgagcaaagctatggaggaaacataggatatgttcaggttgtggccaggttatagtctttgacaggaatgtmgattttgtgagggaagaagggacataattagtctggaataagaaccgaagaatataagtgttacactgacgactttggccttttgttttaaatgggaggaaaccttgtagaaaatatttcctattcagtcagctccagcccaaactggtttatatgtgtcacattgcctttgtttacaacagttcctgaagccaaattgccctaccagtacaccttttcaaatgctagtaaagcctggtttcaaactcagcttttcaaaatgtttact

SEQ ID NO: 733396 - DNA, 548 bp, Homo sapiens
ataccagtttggcaggaagataacaccttctgtatccttaactggattcagtaatacacaggaatgtgtacacatgaggaaaagaaggtgaatcgatctgtgtggtgatatttttcaaagtgtatgctttagagttaaatattattaatggtttaataataaggtgatttgtaaaatcagtaacaaaaataacatcaggtagctgtgagacagcttcaatgaaaacaagatgatgtcttaaacaatcagcaacaaaagctttgctggatgcttcatcgcgtcaytgcatctatttagaaaatgagatgcaggattcaaggaagaaattagaccagatgagaagtcaagtatgtatgaaactttgcatgccaacaactgttaatctgtagctagttaactaatataaagtgttttggggtactaattttagtggatggctttcttttgtatttttattataattaattttattaaaattttatagtggatggctttcttttgtattttccttattattaattttattaaaattttattataatgcacct

SEQ ID NO: 733397 - DNA, 586 bp, Homo sapiens
aactctctgtacatcacaagtaaacaaatggaacctgcaaaatattaaacaaaggattcgttagaaataataaaatctacattactcaatttagtgcttcgtgtgctaccaactcatccttccattcaaattagaaagttagaatttcattccttatattttcaaaaataaattgtgaagcatttttgaaacaaaacctaaagatttttttttaaagcaaatagtaatatggttaaaggggcaggtttctatattgaggattattataaagtttttaaatcccaccaaaactagtaataggaacatatattatttatgagacatattactattttttatcctgcctaaaaataaatacaaaataaactcatcaattataagttaacagggacataaatasttaaagactcacaaaaaaaaaactacatacttcaatgtaacaatcaacttcaaatttcttaacaaaagatggaaatgtgggggaaaaaaattagtcatctggtatctttcccatttcaacctgcctccattatcttgcaagtgttaaaacgcacagaaataagccccaaacaagaggggcagtcta

SEQ ID NO: 733398 - DNA, 550 bp, Homo sapiens
ctttttaatgtagacataaaaattgtcaaaaatattagcaaatcaaatccagcaacatataagatggacaatgcatcatacccaagggtggtttatactgggaatgcaagactgattcaatattcaaaaaccaatcaaagttattctctatgtaaatagactaaagaagaaaaaccacatgagttcctatagatacagataaagcatttgacaaaattcaatatccattcataatttaaaataagaagaaaaatctcccagcaaagtaggactagaaggaaacttcctcaacaaaacaaggggcatctacaaatgcctgcaatgctatagttaacactgaaagactaaatgctctcatcctaagttgaagaacaagtaaargatattcactctcacctctccaactcaaaatcaacattataccatcatactagaaatcctagccagttcaatatgaaaaagtgtgtgtgtgtgggggggggaggagtggaggacaaaaattgacacagattggaattgaagaaataaaactatctctataattcacaaa

SEQ ID NO: 733399 - DNA, 601 bp, Homo sapiens
ttatttaatattctgttgtcatttcaacaatattcacagcattttcaccaggagtagattccatcttaagtcattttctttacttactcataagaagcatctttttatccatgtaagtttgatgatgagattgcagcagttcagtcccatcttcaggctccacttctaactctggttctcttgctctttccaccacatctctggttccttcctccaccaaagtcttgaacccctcatggtcatccatgagctggaatcaacttcttccaaactcctgtgaatgttgatattttgaccccctctcgtgaatcccaaatgttcttaatgacatctagagtggtgaatttttttctgaaaggttttcaatttactttgcccagatctatctgaggaattactatctatggcagttayggatgtatgaaatatatttcttaaatgagactcaaaagtttagatgactccatgggctgaagaatggttgttgtttcagccggcatgagaacaacattcattctccatcagagctcttgggtgaccaggtgcattgtcgatgagcagtaatattttgaaaggaatattttttgggcagtaggtctca

SEQ ID NO: 733400 - DNA, 613 bp, Homo sapiens
gtcaatgtttctggagttccctcttctctttattctaaactagttcactatacattccttttacccgtgtttctttgaaacatataaacattttattttggcactatcatgctataataggatggttgttttcctgtctgttttcccccaaatcgagtcatttgatgggaactatttggaggaaggttgtgtcatggctctgggtcttcagtggcaactcaggaccttccctgtacataggtaggtgctcactaagaactggttggcctgagaataagttttatgcactcctgtgactgcagtgaccatttataactcagtgactttggactctgagctgggctcatatctttcasctgaactcccgcctgtgtctgacagaggcactgtgtgtaatagtgattgagagcgcaggctctggagctcagcagtgtgttcacattcagttctgccccgacacattgcccatcctcatcagcctctccatccacaaagcagagacgataacatacctgcgacacgacgaaggtgatgcacacaccacaccaggcagagaccgcatgtgacctatgactgctgctatttgtacattcgccagcatgatccagttcta

SEQ ID NO: 733401 - DNA, 533 bp, Homo sapiens
ttgcaggccctctgccgaccatgcttccagcagctgcaagaacccagggaggtctcagtggatcatgacgggatctgcagcacgggctaacaagccaggccccagagacacacactgttcccttcccttccacgaagttcagagccaggcgtagctagactactgcagcmcgagtgttgggtgggtgggcacaggttctgcctggcaaacgtcacatgcttttaccaaggtggtgaccatgtgagtgagtgccttgtgtttacactttgggtattttcttatttgtgttaaacttcaaaaaatgtgaaaacattcgaaagaagacagtgtctcctgggatctgggcagcaggctgggtctgaactctcgcttacctcttgtggatgttaacacagcctggaatttcctggtttgttagtcaaggaatactttacccaggtgcaatccatctgctttcatttttttagtcagtaaattggactcctttctttttgtctgcttgaaatgactaaagcaatgtgtgtgttgttttt

SEQ ID NO: 733402 - DNA, 533 bp, Homo sapiens
ttgcaggccctctgccgaccatgcttccagcagctgcaagaacccagggaggtctcagtggatcatgacgggatctgcagcacgggctaacaagccaggccccagagacacacactgttcccttcccttccacgaagttcagagccaggcgtagctagactactgcagcacgagtgttgggtgggtgggcacaggttctgcctggcaaacgtcacatgcttttaccaaggtggtgaccaygtgagtgagtgccttgtgtttacactttgggtattttcttatttgtgttaaacttcaaaaaatgtgaaaacattcgaaagaagacagtgtctcctgggatctgggcagcaggctgggtctgaactctcgcttacctcttgtggatgttaacacagcctggaatttcctggtttgttagtcaaggaatactttacccaggtgcaatccatctgctttcatttttttagtcagtaaattggactcctttctttttgtctgcttgaaatgactaaagcaatgtgtgtgttgttttt

SEQ ID NO: 733403 - DNA, 502 bp, Homo sapiens
actactcattctccctgtcttttccttttttgaaaaacacgttattgaggtatggttgatgtataaaatactgtacatatttaatgtatacatctcaatgagtttggggataagtatacacccatgaaaccatcaaccatcatcaatctcataaacatatctmtcaccttccaaagttttatccaccccctgtattattatatttgttgttgctttatcataagatctaatctcttagtaattttaagtatacaatagggtattgttagctacaggcactatgctgtctagtagatcttcaaaacttatttatcttgcatagctgaaattttgtactctttaactattactccccagtttctcctaccccaagtccctggcaaccaccatcccactctgcttctatgagtttgactgctttaagttccatatataagtgagatcatatagtatttgtatttctctgtctgcctaaatatttcattttctatccatgatgttg

SEQ ID NO: 733404 - DNA, 636 bp, Homo sapiens
aatggagctttatagttttacactagtctttaataatgcagtaaaaatttacaatttttttttaaataaaaatatggtctttctcaaaaagccaatcattagtgcttgtcatgaaagtgaggaggtcttgagaaaacaatgattctttgaaccagaaaaatagaagttttagatctatacaaaatgaggattagttaattatagtgggacctatagagtctcagataacattcttcttgaatgtttgagttctactgtatactaaaagcataatggagcaacaacaacaaaaacccatggaattaaggaatcatttcaaatactgtctagttgtaagtaacacttcaaaatatttttgtcaactctaaataaaacagtaaacaaaaacttattttcaactcatatcaaaatatttagaaaatctctaccttaaacagaaatattctaaagtcattagaaaacacaaaatggatttyttccttcaaatgcatagtggaataaagtagtatatttaaaagtataccaagcaacaaaatggacattattagcaaaattttctatattttgattccacctacttcatctccaaacactgaaaataataaattaattatttgagaggagtaaatcttagta

SEQ ID NO: 733405 - DNA, 559 bp, Homo sapiens
ctgcctgggttttctctgggtactctggtttcctaccacatcccaaagacgtgcattttaggttaattggagagtccaaattgtccctgtctgagtgagtgtgggttggaggtgtgtatgtgtgtcctgcaatggaatggcatcctgtccagggttggtacctgagctgctgggataggttccagctagctgagaccctgaactacacagtaagtggattggaaaatgaagacataaacagatacaaattattgcaaaataaaaattcataaagtatgtgataattatacaaatgyacaacaataaattcagtatgaaagcactcagcaagcccaccatatttgttattgtttgtttttgaactgcatagtggtagaaggtgcttctcgcaatgttccctttgcaaatatttattccttgatttaacccatcacaactacaaccaccattgctcactggttcaccaaaaattgagtaaataattatcttgtttttcttaatctttcttaaatatatgtatagcccgcatttatttcagtttgtaatgttagaagtgttt

SEQ ID NO: 733406 - DNA, 559 bp, Homo sapiens
ctgcctgggttttctctgggtactctggtttcctaccacatcccaaagacgtgcattttaggttaattggagagtccaaattgtccctgtctgagtgagtgtgggttggaggtgtgtatgtgtgtcctgcaatggaatggcatcctgtccagggttggtacctgagctgctgggataggttccagctagctgagaccctgaactacacagtaagtggattggaaaatgaagacataaacagatacaaattattgcaaaataaaaattcataaagtatgtgataattatacaaatgcacaacaataaatkcagtatgaaagcactcagcaagcccaccatatttgttattgtttgtttttgaactgcatagtggtagaaggtgcttctcgcaatgttccctttgcaaatatttattccttgatttaacccatcacaactacaaccaccattgctcactggttcaccaaaaattgagtaaataattatcttgtttttcttaatctttcttaaatatatgtatagcccgcatttatttcagtttgtaatgttagaagtgttt

SEQ ID NO: 733407 - DNA, 651 bp, Homo sapiens
taaagtctcagtttctaagagcctgtcaacaacattaagtgagaacttactatatatcagtaatcactttgaacagcaacgataaatgcaccaattaaaagacagagattgtcagagtggatgaaaaaaacaagacccaaccataggatgtctacaagaaatctactttaaatataagacatataaattaaaagtaaatgggtggagaaaaatataccctgttaacactaatcaaaagaaagcagaagtagctatattaatttcaaacacagttgacttcaaaaaaggaaagttatcagtgataaaggcattacataatgataaaggagttaattgtccaagaaggtgtaataatccttaacacatgtgcacctaacaagagcatcaaactaggtgagacaaaactgatagagctgcaagaagacatatttaaatccactcttayaattagagacttcaacatccgtctatcagaaatggacagattcagcaggtagaaagccagtaaagacatagatgaattcaacagcatcgtcaatcagctggatgtaatggacatctgtagactactttatccaacaaccacagaaaacacactctttttcaagctcacatggaacattctctaagatagacatattctgggccata

SEQ ID NO: 733408 - DNA, 634 bp, Homo sapiens
gagctgcaagaagacatatttaaatccactcttataattagagacttcaacatccgtctatcagaaatggacagattcagcaggtagaaagccagtaaagacatagatgaattcaacagcatcgtcaatcagctggatgtaatggacatctgtagactactttatccaacaaccacagaaaacacactctttttcaagctcacatggaacattctctaagatagacatattctgggccataaaacagcccttaacaaatttagaagactagaaatcatttaatgtctgctctctgtctacaaaggaattgaaagcaacagaaatataaccagaaaatcccaaaatatacagagattaaacaacacatttctaaaaatacatgggtcaaagaaggaatytcaagacaaattaaaaagtattttgaggctgggcatggtggctcatgcgtataattccagcactttgggagaccaaggcaagaggattgcttaagcccaggagattgaagtcacagtgagctatgatagtgccaccgcctgtctcaaaaacaacaacaacaactaaaaccctttcgattcaatgaaagtgaaaacaacatatcaacatttgtggaatgcagtgaaagcagtgttta

SEQ ID NO: 733409 - DNA, 634 bp, Homo sapiens
gagctgcaagaagacatatttaaatccactcttataattagagacttcaacatccgtctatcagaaatggacagattcagcaggtagaaagccagtaaagacatagatgaattcaacagcatcgtcaatcagctggatgtaatggacatctgtagactactttatccaacaaccacagaaaacacactctttttcaagctcacatggaacattctctaagatagacatattctgggccataaaacagcccttaacaaatttagaagactagaaatcatttaatgtctgctctctgtctacaaaggaattgaaagcaacagaaatataaccagaaaatcccaaaatatacagagattaaacaacacatttctaaaaatacatgggtcaaagaaggaatctcaagacaaattaaaaagtattttgaggctgggcatggtggctcatgcgtataatyccagcactttgggagaccaaggcaagaggattgcttaagcccaggagattgaagtcacagtgagctatgatagtgccaccgcctgtctcaaaaacaacaacaacaactaaaaccctttcgattcaatgaaagtgaaaacaacatatcaacatttgtggaatgcagtgaaagcagtgttta

SEQ ID NO: 733410 - DNA, 555 bp, Homo sapiens
agcataactccaggctgggtctcaaaacaggagcctgaaagcagacctgtcaaacagaggcaacagtggcccaagagagattaccagaggcccgtctcagacagtttcccaggaaagaggctgccagttcatcaaaacaggaggcctctgggattcagtgttcatcctgcctttgatggaacttacacagtgttttacgcaaggccctttggaggcctctttccaggagtcagcactaaattttactggtaatcctttggaaattctttgtgagttagaaggacttcagggatttgaccatctggttatgttaggaggcatctgcgcttgcaaaataaccatcgcctcgycagctatttgaaaataacttattttagaggtgcaagtagaggttttcagctgcattattaaagccactctgaaaagggaaatgtattaattgtttatagttagaagcaaatcacttaatatttaattttatttaaatgaaagtgtttaaacatagtttcccacaactcttcttgatttttaatctagtgctgaggcaattccaaa

SEQ ID NO: 733411 - DNA, 555 bp, Homo sapiens
agcataactccaggctgggtctcaaaacaggagcctgaaagcagacctgtcaaacagaggcaacagtggcccaagagagattaccagaggcccgtctcagacagtttcccaggaaagaggctgccagttcatcaaaacaggaggcctctgggattcagtgttcatcctgcctttgatggaacttacacagtgttttacgcaaggccctttggaggcctctttccaggagtcagcactaaattttactggtaatcctttggaaattctttgtgagttagaaggacttcagggatttgaccatctggttatgttaggaggcatctgcgcttgcaaaataaccatcgcctcgtcagctatytgaaaataacttattttagaggtgcaagtagaggttttcagctgcattattaaagccactctgaaaagggaaatgtattaattgtttatagttagaagcaaatcacttaatatttaattttatttaaatgaaagtgtttaaacatagtttcccacaactcttcttgatttttaatctagtgctgaggcaattccaaa

SEQ ID NO: 733412 - DNA, 616 bp, Homo sapiens
aattccggacacaatatgctatatctaattgaattatatttacaagtattttatattttttgaaggcttttgaaaaggatttttcaccctatttgcaaaaaacctattgctgtaatgaagaatagtaactttagtatttattttgtgcactgcctcattactgaactcttattttttcatttttttttctcttaagatggagtctcactctgtagccaggctccagcgcagtggtgcgatctcggctcagtgcaaccccygcctcccaggttcaagcaatctactgcctcagcctcccaagtagctgggactacaggtgcacgccaccatgcccagctagtttttgtatttttagtagagatggggtttcaccatgttggccaggttggtctcgatctcttgacttcatgatccacccacctggcctcccaaagtgctgggattacaggcgtgagccactgtgcctgggctgaacttcagttatttctaagagctgttttgtttgttcttgtggcatgcagtcataaatttctaagtaacaatgattgtctatccttttcaataattatgactcttatttatattgacttagagataaacaggtatccaaaacaac

SEQ ID NO: 733413 - DNA, 609 bp, Homo sapiens
gatctctatcaaaacattaaattggagtggcaatgagggacattctggccttttcctgaacttaagggaatgtatccagtcttgtaccttccgtattcttacggttttctgtctacatgttttattgattactgagaaagaaggtttaaagtatccaagtataattttggatttgtctatgtatctttttggtttctttagttttgcttcatgtattttgaagctctgtttttaggtgcaaatattctaaggattcttatatttttctgatacattaacacatttatcatcatataatgtccatctttatccttgacaatattccttgctctgtggactacggatctatgttatattaatgtaggttctycagcttttttttgatgagtgttttcatgatgtttatttcctcattcttttaagccatctctatgactgtgataggcagaattctaaggtgggctccaagattcccataaactagtatacatgccctggataatctcttcttctttagtgtgggaagacctgtgaatagaatgaatgacattcctatgattggtttacatggtagaagtgaagggattttgcaaatttaattaaagtctc

SEQ ID NO: 733414 - DNA, 609 bp, Homo sapiens
gatctctatcaaaacattaaattggagtggcaatgagggacattctggccttttcctgaacttaagggaatgtatccagtcttgtaccttccgtattcttacggttttctgtctacatgttttattgattactgagaaagaaggtttaaagtatccaagtataattttggatttgtctatgtatctttttggtttctttagttttgcttcatgtattttgaagctctgtttttaggtgcaaatattctaaggattcttatatttttctgatacattaacacatttatcatcatataatgtccatctttatccttgacaatattccttgctctgtggactacggatctatgttatattaatgtaggttctccagctttyttttgatgagtgttttcatgatgtttatttcctcattcttttaagccatctctatgactgtgataggcagaattctaaggtgggctccaagattcccataaactagtatacatgccctggataatctcttcttctttagtgtgggaagacctgtgaatagaatgaatgacattcctatgattggtttacatggtagaagtgaagggattttgcaaatttaattaaagtctc

SEQ ID NO: 733415 - DNA, 660 bp, Homo sapiens
actttgggacgttgagatagagacaggcaaattcatctcaaactcattattattttagattcttatcattatcaattattattatagcaaaactcatcattttttctgtgtacaatttgtgaattttaacatatgtacagattcatgtaaccaacaccatgatcaggataaagaacagtattgtcaccccacaaatcttccttgggsggtccctttttcagtcacatgctcttcccagccctaaccacagggaaccattgagttgttttccatcactataatttttccattttgagagtatcatatcagtggaatcatgcagtacgtaacctttggggactggcctctttacctcagcataatgatgttaagattataatctgtaaactcctactcaggtcattgcaccactttgatggaatttccattccctttgtcctcaagatttgtctaaagatatttgactttgacagaattttgggttcttcagttttctttttaattataaaatatacatacaaatgaacattaagcatatatagttgtgtgaataattataaaacaaacttaatgtatcaccaaatcaaggaatagctcattgccccagaaacacccccaacccccacatcattcatgtgattgtgtgtatcaatagtttat

SEQ ID NO: 733416 - DNA, 497 bp, Homo sapiens
gtcttcaaagagatcatggaaaagactccaacaagtacaggtttttgataactttaagatcccaccattggcctgggtaagaatttccagaactctaatgaagaaactgactggtttgtaaaactgttaacccgatgttgggcaaaacaaaaattaattggatgggactaaatgaactgatgaaaaaaaatgatgctttaaaaaattaccttttttcaaaacattgctcgttctttaatattttgttttccagatctgaggaaatgttttctcttttatcctacgctatctgtagttgaccacaatctggtagattatgcatttgtaaacagaaataaagcatttrattttctccctacctaatccctccagaatttgaaaatgatgagtgagtattcttacattcatgaccatagttgtttgtataggtccaataagaatctatctgtttgtaacaggacacaatggaaaacattggttacattaccaaagctttg

SEQ ID NO: 733417 - DNA, 642 bp, Homo sapiens
aactttcagaatatgttacaagtctgtgtccatgaaaatactgggcagccaggtattgatgaccacacatttcttttagtcatattttcttttgagctcataaactatttcggagttatgggaagaaagctttaaagctttcagcttctcattctcaaagaaaatgaaatcaaagaacaaaaatgaaatttaccaaaggtcaccaaggtggtgacctttatgtagatacagacttgggtctgtttcccaacttaatatccagggattttttttytaattagactttaagcatgttgactagtaaactataagtaacaatgatcacgtggaagttgtttaatgagttgtttccagggaaggcactagtggctcattttttcagtctacccgaggtccctgtacttgaatgtttgagaagcactttgtttcttttaaagatttattttacttggattttaatttttatctttatttttagagaaaacatcttgctctgttgctcaggctggagcgcaatggtgccatcgtagcttactgtaaccttgaacgtctgtgctcaagcaatcttcctgcctcagcctcctgagtagctgggactacaggtatgcatcacaatgcccagcgaattaaaaacaacctttt

SEQ ID NO: 733418 - DNA, 638 bp, Homo sapiens
aatttgaaccaatggatttaacaggagaaaataccagcttaggggcagcagaaacttgagaaaaatccaataggagggttatttgttggctggatacaccctgcggaggcaggtcagactctggagctgctggttggaggaagaaatgggcaggcctgccatggatggttgtgtggyttgtgcactgaacaaaggcaacagatggaaggtgtaggtggggctgaattccagtatgtgttttgctggccaagccatgtggcatgacataggcttgcttctacccagaggaaaggatgcttgtttctttgcacaaagatgccttctctcaccagactatgcatgcatagtgctgtatctgctcgtttgcatgaggttactgtataggtttgcaggatccagggcttgtgggccaaagtacttgagctctgggagctgagggtggagatggtccacatcccggggtctgcacaatgcattgttctcctggagtggaatgactctcctcctctgagtcagcatcaagaccaccttgaagcatgattgtcaaactgattttcagggctctggctttctggtataccacgcccttcttcagggctgaaacactggtcattttgttagcaaaatacaaatatttc

SEQ ID NO: 733419 - DNA, 638 bp, Homo sapiens
aatttgaaccaatggatttaacaggagaaaataccagcttaggggcagcagaaacttgagaaaaatccaataggagggttatttgttggctggatacaccctgcggaggcaggtcagactctggagctgctggttggaggaagaaatgggcaggcctgccatggatggttgtgtggtttgtgcactgaacaaaggcaacagatggaaggtgtaggtggggctgaattccagtatgtgttttgctggccaagccatgtggcatgacataggcttgcttctacccagaggaaaggatgyttgtttctttgcacaaagatgccttctctcaccagactatgcatgcatagtgctgtatctgctcgtttgcatgaggttactgtataggtttgcaggatccagggcttgtgggccaaagtacttgagctctgggagctgagggtggagatggtccacatcccggggtctgcacaatgcattgttctcctggagtggaatgactctcctcctctgagtcagcatcaagaccaccttgaagcatgattgtcaaactgattttcagggctctggctttctggtataccacgcccttcttcagggctgaaacactggtcattttgttagcaaaatacaaatatttc

SEQ ID NO: 733420 - DNA, 638 bp, Homo sapiens
aatttgaaccaatggatttaacaggagaaaataccagcttaggggcagcagaaacttgagaaaaatccaataggagggttatttgttggctggatacaccctgcggaggcaggtcagactctggagctgctggttggaggaagaaatgggcaggcctgccatggatggttgtgtggtttgtgcactgaacaaaggcaacagatggaaggtgtaggtggggctgaattccagtatgtgttttgctggccaagccatgtggcatgacataggcttgcttctacccagaggaaaggatgcttgtttctttgyacaaagatgccttctctcaccagactatgcatgcatagtgctgtatctgctcgtttgcatgaggttactgtataggtttgcaggatccagggcttgtgggccaaagtacttgagctctgggagctgagggtggagatggtccacatcccggggtctgcacaatgcattgttctcctggagtggaatgactctcctcctctgagtcagcatcaagaccaccttgaagcatgattgtcaaactgattttcagggctctggctttctggtataccacgcccttcttcagggctgaaacactggtcattttgttagcaaaatacaaatatttc

SEQ ID NO: 733421 - DNA, 619 bp, Homo sapiens
tcactgggcattatttggtgccagtgaaagaggctttgatcccaaggacacaagacatcagagaaagaacaaatcaaaggctatttctggatgttgagattatctgatttcaaggtactgaaggacaaaaacttggatggcctcaaaaggttcttgaacaccactgtgattctccaaggacgaattacgtaaattatactttcatacaaaggagacgataaggcagtaaacatggagacacgggggacagcgtccacactcagagggcctgggccacagccccgatgtttcttttcagaactcagcccctttcctgattttacttctaagaggaaaattattttggggaggaactacacagtcgtgattagaatttatctgatggttttgtattataacttgtaagacctgccagaatgctagtcccgagagtgtcagacaaggaagaartccctgggcctcttccccttacccggcccttagatttcatggagcagccacttagcattgaattgcactaccctgagctaaacgtgtctgtgctttctaagataagagcttgatccctttcttctatcttaagacagcacctcctgaaaagaatcgaagttgtcacaac

SEQ ID NO: 733422 - DNA, 648 bp, Homo sapiens
atttctgtgtttttacctcgacttaaaattttttacgtaaagttttaagattttgtattgacaaattatagttgtgtgtatttatggatgcaaaatgacactatgatttttgtaatttgagttttcccttctaacgggcttcttaatctcttcttagtcttaatcaactgttaccactctgatgctttctgctcaaacaaagggcattaatgacattagtcaagcttttgctgtggccccagagcccctattccttgcatgactttctgtacttcaatgcaactcatmttttgaaaactggtttatttcttggtttgcagaaccccacaccattctggcttctctcatactctgagcattctgctttctggtgtttttcatactctgaaaattccatttttgtttctttgtttggtctttcttgcttctcctggcctttttaacaataggcgtcatattctgaaattcaatttttggactttctgctattcttgttttgagctcgctcaagcaaattattcattatttcagtgcagaagacccttaaatctatatttccacatcattctttttatctaggtggcagtcctatatttcagctgtcctaggggatttcaataccagtatcttgcaatcagcccaaactca

SEQ ID NO: 733423 - DNA, 618 bp, Homo sapiens
agaaaaagtattgatatcttttgttttcccagaagtaaattttctaaacactaattaatgaagaaatatacagtcgtaccttggaatctgaggaggactggttccaggacctctcttggatattaaaattcacagatgctgaagtctctgatataaaatgggatagcatttttatataacctatgaacatcctcccatatactttaaatwatctctaggctacttataatacctaatacaatgtaaatactatgtaaacaatcattatactgtattgtttaggaaataatgataaggaaaaaatgcctaaacatgttcagtatagatgcaatggttttctctgaatatttttgatccttgattggttgaatccatgggtgcagagttcatggatacagaggactgactgtatgagtaagtcctataatccttacttattgctttgactacattttaaaagaaacatttcttagttgttcagggttccaacaccttgaactagtctttctttcttttcacatctggtatattgtggagtatgctcttgacatttaaatggagacatttagtgatttatttggtttagtatattttcaatttcccagtaggatgaaaatc

SEQ ID NO: 733424 - DNA, 524 bp, Homo sapiens
ttgttcggagaaggtatgtattggctcctggccaatgtgggctaggactcttcttgtcactacagtgtctaacagcatgtacagaacaatatcccaattagatctttaagtgttagaaacatgatacaccagtgcattttttctcagaggctgatctgtgggaagtttcaaaaacacacagaagctaagcttcagtctaatcctttaaacatcagcccaagaaggcagcccaaaaagctgaaaatataacaagataatgtcaacatctctttggcttgtaattttgtttatcttaacaacaactcttaggtgagaatgatcaaaccatcatttccgaaaagcttttttttgtttgtttttgttattgtcaccttcccagawacaactttatttttctggtaacaaagggaactttatttttctgcctctaaattcgtaatgttttattgccagctgaagatttctgatcaattaacataggggtgctttaaacaaacatgtgactcacattccttttcaggtta

SEQ ID NO: 733425 - DNA, 657 bp, Homo sapiens
aaattaccatcaatcccacaaaaatacaaaaaatcctcaaaaactattatgaaaacccctatgcacacaaactagaaaatctagaggaaatggataaataactggaaacacacaagctctcaagactgaatcaggaagaaagcgaaactcacaacagaccaatatcaagttctgaaatgtaatcagtaagaaaaaaatctaccagccaaaaaaatttccagaccagatggattcacatcaaaattctatcagatgtacaatgaagaaatggtatcaattgtactgaaagtattaaaaaaaatgggatgaaggacttctccctaattcattctacaaagtcagtatcagcctgataccaaaacctggcaaagacacagtgaaaaaagaaaattacagggcmatatccctgatgaacatagatgcaaaaattctcaacaaaatactagcaaactgaatccaacagtatatcaaaaagttaattcaccatgatcaaataggcttcattcccagaatgcaaaggtagttcgacatatgcaaatcaataaaggtgattcaccacataaacagaattacaaacaaaaaccatatgatcatctcaacagatatggaaaaagctttcaataaaattcaacatcccttcatgataaaaaccctcaa

SEQ ID NO: 733426 - DNA, 657 bp, Homo sapiens
aaattaccatcaatcccacaaaaatacaaaaaatcctcaaaaactattatgaaaacccctatgcacacaaactagaaaatctagaggaaatggataaataactggaaacacacaagctctcaagactgaatcaggaagaaagcgaaactcacaacagaccaatatcaagttctgaaatgtaatcagtaagaaaaaaatctaccagccaaaaaaatttccagaccagatggattcacatcaaaattctatcagatgtacaatgaagaaatggtatcaattgtactgaaagtattaaaaaaaatgggatgaaggacttctccctaattcattctacaaagtcagtatcagcctgataccaaaacctggcaaagacacagtgaaaaaagaaaattacagggccatatccctgatgaacatagatgcaaaaattctcaacaaaatactagcaaactgaatccaacagtrtatcaaaaagttaattcaccatgatcaaataggcttcattcccagaatgcaaaggtagttcgacatatgcaaatcaataaaggtgattcaccacataaacagaattacaaacaaaaaccatatgatcatctcaacagatatggaaaaagctttcaataaaattcaacatcccttcatgataaaaaccctcaa

SEQ ID NO: 733427 - DNA, 616 bp, Homo sapiens
tattgaaaacttaattttaagttcactttttaatattaatcaaatcagtgaactagtctatgataaaacagagggttccaataatagcaaaaaaaaaaaaaattgtgtctctgcctgtgtctctctttctccacatgttctcttaggacaaatagcctcttttaagtccctcttccaacgcattcactcaaaacacaaacacacacacactctactacataatgatttctggagtccccaggggagtctcagatgatgtagacttcacttgctctgtgttctgctactgtcagaacggctggcaccagagtttccaattcaccaaaacaaggtgaccagatttctttttcctattacacagctcccaaagcacagcagttttaagtccscaactctctcctgtctgctctgctcaaagccctctcccatgaatcagttttgtggattgggccacaggaggctctgaatgataattgtcatgttatcctcagctccattctcctctacaaaaccagaatcttactagaccaaacttggcttgactctctcattacatagtatgaggtgccttttttttcctcttacaaatctccacttccagagcctgttgccacaa

SEQ ID NO: 733428 - DNA, 531 bp, Homo sapiens
tgttcaatgaagcggcatacatagattatgcatacagttgtcatgaaggtaagtcaaatgacttgaccccactatctgattcaccattttaaaccgagtgccctaagcagttttaactttgccattgacacttttctcagccagcaatgtggtcagtgactacacatcaccaaaagtgatatgaagaatatgaaattgggctgagcatcgtggcactcacctgtaatcccagctactcaggaagttgaggtgggaggattgcttgagcccagaagtttgagattgcagtgagctatgattatgccacagcactctagcctgtgtgacagarcaagaccctgtctgaagaaaagaaaagaaaagaatgtgaaattgacttgctatctcatcctaaacaatagagcaatcctaaaagatacggtttaaacttttctcatagattagatgagaaataaatataaatcacaggtcagttgtcatattaacaatacatatttccataagaaataacaaaaaaaatcctatagtttt

SEQ ID NO: 733429 - DNA, 635 bp, Homo sapiens
gtattctaaatctggaaaattaccactgggacttttcattaaaaaggattattggcttgagctgcttagggaataaataaattggctataatttttttaaaaaaactttttagagagttctcatcttaaacagctatcttattggtacctattagaaaaaacaaacaaacaaacaaacaatagccttaaaaaaaatcccttgaaaaaatcaaaagaaaaaaaatagcagaaatcagttttcaaacaaagttaaaatcctttgtatactcaaactgyctgctttgggtcccctgcgagatttgcaaagaagggactctagccagtactctcatggctaggattccatacttaaaccaccatggtctgggtgtgagtcctgtctgggagccagttccttggaaatgtaagtcctttaaatcaaaaggaaaaaaaaatctataaaaactggtttgatatttgtatgactcttaacttttagggtatccattgttttgtaatcctttttgccctcagggacagtttttgatgtcctgtcttacagacgggtgtctcttgtaatcttccatctacggggcacactagatgtcaggcctttgtgtgcagatggtcagctaagaagctgagactccagagaa

SEQ ID NO: 733430 - DNA, 477 bp, Homo sapiens
aaattaaattaggaggtgtaaaatgctgtgggaagaaaaacaaaccaagatgacaaaagcaggtgccaaaaggcgtttgttcacaacccccatcacagtttcatttttatgtgtatgattagcagctcagctgccttagggcacatttcatacttctttgatcttttaatgtcttgaaaagaaaaagaaacagcacctgctgatgaaagatattccaagagaatagcaggctctgttytccaacaatctcaaaagcttaactatcctactctgtggacagttttaaagactgtgtattttagaaaccaatctcttcaagaactagctgaacagtataaaacaactgtccttttattgttattttccaatttattgccagaggattatctgttaatgagccttagcttattagaaagacttaaggaagctagaaactttcaccacaatagcactgattggtttgtcatagtctgaagt

SEQ ID NO: 733431 - DNA, 627 bp, Homo sapiens
tgctcacccatctcagggcctatgtgtcatctatttactcttccaaagagactcgtctgttttcctgctctacatctcagtagttccactcatccttcaaatctgaaattaaatattattttgtaagagatggcttsatttgaaatactccaactcaaatcaagtaccagtattgtaatttgtcatcaaacattatatttctaatccatagtatttatcaaaatttgtaatggatattgtatttgtattttatatctgtctcccctaacaaacataatcttcatgtttatgttgttcaccatcatgataggcagcttttcacatggctcccagtgatccacaaatcctggtattcatactcttgtatcatactctccatttgagcatgggctggacctagtgactcacctgaaataaatatgtcaaaagtgatggaatatcatttccataattaggttgtaaaagactgtgagttgtgtcttgctagctgactctattagcttctcaagttgcatgctttgacaaagcaagctgccaagttgaaaggatgcaaatggcaaataattgagggcaatcactgcccaacagccatcaacaaagtaaatcctgccaacaattatgtatgtg

SEQ ID NO: 733432 - DNA, 503 bp, Homo sapiens
aaaagttttcctttacatgccaaattccgcagcccctgcagatccaataattcataataatttctttgtagatacagttacaaactgacaactggagccaggggttcccagttgtgacagcacccagaataatctggaagcaaacataggtacactgacccactgaactggaaactctgggaatgggaactggagatctacatttttcaaatctccaggtgattgcttaaagcagaaaggattggaaatctstttttaggtcattccaaattagtacctatattccctctaagctactcagatattgtctttaaagaactgcctggtcagtaagtctcaacccaattccactagagcttcctcatatgagatcttcccaacagcattccagaaatccacatttggagctctaagacataaggaaatgataaaggattcctatgaaagaagacaaaaacttggtttgcgttagctgatactctcatctttccaatggtcatcac

SEQ ID NO: 733433 - DNA, 631 bp, Homo sapiens
ccttttctttgtccttcatggccactaccccttctaccaggaacattacccttcaggctgaactttcaactattccaaaaatatttattgggagctttgtgtgtgtttgcgggttgggggcacagaaggaaacaagacagcccaggttcctgttcccatggagcaatctcacaacttggcagttagctgcaaatgcaggaaccacttggcttaggtttgaatcatgcctctcccgcattccaatcgtgtgacttttgggaaatttgcttaatttttctaagcttcacttttgcattygtaaaatggagataagaatatgacatctccaaagagctatggtgaggatcaagtaatataaatgtcaagtgcttcagaacattgtcaggcacatagtaaatatttagtaaatgttagtgattgtcaactattaaattgtcaccatctgccagtcactgtgtaaggcactgggtgtggagagaataaaacacatggtccttgccattatgaaacttttattttgctgggggtgacagccaatagactaacaaccaggtgaatgtacagtaagtcagatgataactagtaatatggagaaaaataaaggaataatgaaaaagaaagaatcatgaaa

SEQ ID NO: 733434 - DNA, 366 bp, Homo sapiens
catggtgttggtgggcatcatctaatcacttgaaagcctttatgagttttgacaaatttttatacctgtgtaaccccttttactatcagaatatagaacatttccccagtagtcattttccaaatattctcttgtgccccattccagttaattctccccaaactccagccccagaaaacttctgactcgcttcctgactgccaagcaagaaggaattytgccagcagatggccttcagacttgaaatgcaatactgactcttcccttgatctccagcttgctggcctatcttgcagatttttggccttctggcttccattattgcaagagccacttcaattaatctctccatatatatatatctat

SEQ ID NO: 733435 - DNA, 535 bp, Homo sapiens
aagaccatcagacaagagaaagtctctcttttgcaagagaggtcaaatttttgttctctttggactctattagtggatgattaatatatttctccacattaggaagggtgatctttattactcaaagtaccaaattaaatgttaagctcatacaagaatatgaaaatataagaataccctcacagaaatacctggaataatggktgaccaaatgtctgggtatctttcagcccagtcaaccttttttttttttcttttagaccaggcctggctctgtcgccctggctggagtgcagtagtgcaatcttggctcagtgcatcctcagcttccagggctcaagtgaatgtcctgcttcaacctcctgagtagctgagactgcagatatatgccaccatgcatggctaatttttactttttttttttttatacagatgggggtctcactatgttgccccagcttgttttgaactcctgggctcaactgatcctattgccttggcttcccaaagtgctgggattacaggcatgagccac

SEQ ID NO: 733436 - DNA, 496 bp, Homo sapiens
caaacttgttttattgtctcctatagctacattctgctcctttcatataggaggtcaaagaataaattaggatcttccaggtatcagggtttagaaaagtgctggtagtaaaaagaaaaaggtgttaatagtcattttttttcttgattccttctaagagaagagtgaatcataacacattggtggtgggtgagaatggyatgactctgttgatagccctcagttttgtttttttgtttttttttttttttttacgcaattgaatgagtggtggaagacctgcttctttttcttctccctaactaaagctcagagaaagctgaaacatgtgagaatctgcagtggcattcaaatcttgctctgaggaatgaggactctgaggatgtgtgtctggggctattctgtatgagagaggagttaagagtgctggtttttggttccactcgcattacttcaacaataacttctgttttcacatgttttgtacatttggtat

SEQ ID NO: 733437 - DNA, 613 bp, Homo sapiens
ttgtttcttgttcactatgatgttagctgtggagttgtcataaatggcctttattgtgttgagatacataccatctgtaagcactttttgagagttatatcataaaggtatattgacttttgtcaagtgctttttctgtatctattgaaatgatcatatggtttttatctttccttttgttaatgtgatatattattacacaatttgttgatctgcatatgctacatcattcttgtatctctgggatgaattccacttgatcrtggtgaatgatctttttagtgtgctgttggatttggtttgctagtatcttgttgagaatttttaaatctatgttcactacctgtagttttatttttttgctgtgttcttgtctggttttggaaacagggtaatgctggcctcataaaatgagtttagaagtactccctcctcctcaattttctggaactgtttgaggagaattgatgtttgttctttaaatgtttggtagaattttgcactgaaaccatcaggtccagagattttctttgatggaagactttgtattgccttttcaatttcctcacttgttactggcctgttcagattttatatttctttataatttaat

SEQ ID NO: 733438 - DNA, 606 bp, Homo sapiens
gtttagaccaccttctattagtagccaataaaaggccacttaaaagtatatatatttatgtaatacaaagtatcctaataactgaaattgatataatacattggagttttcatacattatctcacctgaatattgcccaaaccctataatgtaggctctctcaactccattttataaataatgaccctgaggctcagagagattagaattagtataaaaaagggctgattttcttttcttttcttttcttttctttttttttttgagatggagtctcgctctgtcgcccaggctggagtgcagtggcgtgatctctgctcactgcaacctccgtctcccaggttcacatcattatcttgcctcatcctcccaagcagctggcactgaaggcgcctgccaccacgcctggttaatttttttttttgtatttttagtaragacagggtttcactgtgttagccagcatggtctcgatctcctgacctcgtgatctgcccaccttggcctcccaaagtgctgggattacaggtgtgagccaccgcacccagccaaaaaggctgattttctacctcatatcttcagattccaagttatcttcccctttta

SEQ ID NO: 733439 - DNA, 621 bp, Homo sapiens
atgtattcaaatctaaacacagtgccaatcttaaaagatctgtatgcataggattatagaacacctattctctttttacacttagaagataaataactgcttttcagtaaacccaatggggcaattgtgactcacaatcataagctactaaaatattaatactatcatctagaaagtatttattaattcatttttcttacttatgaaacacaatcataatttctagttgacataacactagatttgaggtgctgtggctgtagtaactagaaatgtcatggttgactcagctttaccttctgcctatttctcacaaacacagcaaaacaaggaaggccagaaatcctacaccttgattgcaaacacaccagtacccttctagggagaatatatgtttgaacatattaacttgaaattcctggcatcttttcttgaagaacagactttttttttttttttttttttttttgagstggagtttttctcttgttgcccaggctggagggtaatgtcgctgtgtcggctgaccgcaacctctgcctcctaggtacaagcgattctcctgcctcagccttctgagtggctgggattacaagcacctgccaccatgtctggctaatt

SEQ ID NO: 733440 - DNA, 635 bp, Homo sapiens
cagagttctggttaattgaggtcatacagtattttcatgtatttcaactccacgcgtgtatgcattgtgtccctactgcatgccagataccgcatcaggccctggggcaatccagctccctcagggagctgacagtccaatgagggagtctataaagttcaggccagacraaagcagagagaaccggagaacaggctggatgtgtaacatggcagccccacctaatctgtgagcggtgggtgcaacaggaccacttccttgaggaagtgacatttaagcagagccctaaaggatgaaaagaaatcagaacaggcccttctggaatcttgcctcttgagggaaagcctgcatctgggaccctgaggctcctggtctgcagatgttcccagcactgagtgtgttgctgccctggaggaggtgcggcaacaccaaggttccacctcctctgttgcctgtgcctgtcctgctggtctcatgaggaccacagactccctcctgggttgatccaacctgtctatccccctgactcctctgtttccttccccaccaaaccctgatgaggccgcaggatattttaaaaggctggagggaaaggagtgtcttggccatgatctggccaatgtagaagaagcaga

SEQ ID NO: 733441 - DNA, 635 bp, Homo sapiens
cagagttctggttaattgaggtcatacagtattttcatgtatttcaactccacgcgtgtatgcattgtgtccctactgcatgccagataccgcatcaggccctggggcaatccagctccctcagggagctgacagtccaatgagggagtctataaagttcaggccagacgaaagcagagagaaccggagaacaggctggatgygtaacatggcagccccacctaatctgtgagcggtgggtgcaacaggaccacttccttgaggaagtgacatttaagcagagccctaaaggatgaaaagaaatcagaacaggcccttctggaatcttgcctcttgagggaaagcctgcatctgggaccctgaggctcctggtctgcagatgttcccagcactgagtgtgttgctgccctggaggaggtgcggcaacaccaaggttccacctcctctgttgcctgtgcctgtcctgctggtctcatgaggaccacagactccctcctgggttgatccaacctgtctatccccctgactcctctgtttccttccccaccaaaccctgatgaggccgcaggatattttaaaaggctggagggaaaggagtgtcttggccatgatctggccaatgtagaagaagcaga

SEQ ID NO: 733442 - DNA, 494 bp, Homo sapiens
ctattggctcttaatgacctcctcaaattaagcaagtggggaagtaccagtgtcaaggggctcagacctggaaagcacaagatcagcacctgcttccatctcatagaagagctctggggctcacacctgtgcccagaggcacctggcaggttctgcactcygaaccgtggcaaaggctaggatttcagaatcctgctctgcattggagactgagcccttcttgcccagaggtggtgctgtgtggccatgatgagtgctgccagcaggtcttctatagggcaagaaccatgggtggtacccccaaggcatcaaaataaaagcagaagaatccagcaccatgctttcattattcagttcatcaccacctctgggtgtgtttccaaggagctctaccaacctctgagaaactgccagaacagacttaactgtcactatgaggaactactagatccttacaggtggaaaggtgatttaggagagttcaagatctaaca

SEQ ID NO: 733443 - DNA, 508 bp, Homo sapiens
ccgcaggaaggcaaataaccccagcctatacaagcgctgagaaaattgtaacactgagttggtctggtgaaattatctccaaccttctccctgtagccagttacaacaataaattccagtctttgctagtcagtctgcttctcactgggccatgagaaaacgcagctgaacccagcttggttccgggaacaaagctgcctttccttttgtccctaaaagcagatagctagagataacaaggtaaatctctacacaggtacctattctgtatttgtcttgtcatatgtaaagtgytgatttactgagtccaagagggatgtgccattgactatcccctacctgctccttttctcttacaacgtattgattaccaatatcctcacctttctccctccagcccgcttttcctctttcaagaatggcacagaccagaggctgtgagtctgtttcttcctcctgggcatgtcttgtaaccttggaaaaataaactaagttgactgagaattgt

SEQ ID NO: 733444 - DNA, 667 bp, Homo sapiens
acatctcttctacattgtattttgtacctactcaccaggaagtaggtggcccaatacttagtgcatattttcgactttggaggcaacagagaccctatttgtgtactgaacagacccacttgccaggttacatataagttgccaagatgaagtggagcccagaataagagtgggattgaccacagatgcagcctgccctactactarggccttatggtgtcgcatgttcagagacactgctgttgtctacgctatctgcagccttacagtcgtgaaaatcctagctgtctagattgtggttaagtccatgtcctattctcctgaaaaagtctctggcttgctgctgggctctgctagagactgaagctgactgtaggaaaccacatgactgagagacttggtggctcaagtaaaatccagtttatgacagccagctcaggtcacagtattaggcatcatgatagtgcatcatgaaataacaaagaccaattctgaactccgggaggcacagtgtatctcatgagcaagcagctcagaatcccatggtaaattttgttgctttgccaactctcaacccacctgctgcctttagggatgtttctgattaactcaagaagtgtgcaaacctgggtacagatggatcctgcagagtatgcttgtaatacta

SEQ ID NO: 733445 - DNA, 597 bp, Homo sapiens
catagagatggatccagctaattgggaggtagagaaatcaacgttattcacttatgaatcatggggacccatgtgctctcttaagttttggaaatacagacttctcttagcagcccctcccatcctcaggctgcctcctgctgtaggtccattcctgaatcagcctgtccagggcagatgtatgtgaagagcactcaagggggtgttcaatcccactacattagtgagagaccacttaagtctcctgtgtggagatacagataagtaacttgtcactaggaccatcttttccttgtgggagtggttaacctttccacgaagtttccttccagagtcccaagtggcaatgagaaataagggaacccccaaggggttgttcaattccactacagctctstttagtgcatgaaattttctgtgggttgtaggtatattgagtgaaacaggtttgtttcattgaagaattttcttcctagactataccctttaacccttgtacctgctgaaaaactgtagatatcaactcaatgtgttgaaacactttaaatggaaagcaagtatgaccttcagcgctcaggttgggacctgaaatcacta

SEQ ID NO: 733446 - DNA, 625 bp, Homo sapiens
tcccatttgtcccctgtctgtaacaacttttattggtgccaatggcatccagagaaactacagggaacatccaaccccaagcttctagtgttcagatggcttgacgaaaatttcaggagcagtacctgaatcctaacagcttcggagaaaacacagatgtatgtcaaaaccttcaaccttggtcaatgtcycctcagcctgttacactggaaggagggccttgagtgaactgtccaggtccttggcgtttttaacacaacacagaagcaaagtaacaaaggaatgaaacacaaacgatgcagcaaaagccaatatcaaagtgagaaagcatccatggggtgggagtgggcctcagcaagtggcacaagagccgggttacaaagttctctgggttttaagttctccttttgaggtccccatctgttaccccttatctggataaaggatttggtccatggctaattaaggactgaggtgaactggcaccctctgcagataaacagatggtccctgcataacctgcatccaagccagtacacacacttcctttcctctgccacgtggtggacaggggaagatagagggagaatagccttggatcctttgctactcttgtgggggagat

SEQ ID NO: 733447 - DNA, 584 bp, Homo sapiens
aacaggagaatatcatagctacatttgagccttctccttttaaaatacttaaagaatttaaacaagctatcaatatggaccaggttcttttgtaatgggaccgttaaagaatgttgctgtctccagtcagatgatgccagcagggactgtasgattatttctaggtaggtctagtttaaatttaaaaggagtacaagtacatacaggagtcattaattcagattacaatggggaaattcaaattgttatatatctacttctgttccccggaaagcagagccgggagagtgtatagcacagctcctgattgtgctgtatgtggaaattgggaaaagtgaaactaaatgaaaaggaggatttggaagaacaaaccaacaaggcaaagcagcttattgggtgaatcaaattactgataaacgttctgcctgcgaaatagctattcagggaaaaaaaattaaaggattgatagatacaggagcagccatttcaatcatttctctacagcactttctgtccatgtggccaattcaacccactcaatttaacatagttggagttggtaaagcccctgacatatcaaagca

SEQ ID NO: 733448 - DNA, 634 bp, Homo sapiens
ttttatcacagcctctgttgccctgtgatctgcaggtcctgggagatgcatagctaagttgccaggacatcctggaagctgggaaatgacacattggttatcagcaaatcagatgctgatattgaggaaaggcagagatgattcccaccctctggattttttcagatttgtgaagaaattttttccaaaggaaaacaacccatcccagtaaggtagtgcaagaacctgcaaaacaaaatgtatctgaggcccacagtgggaaggaatctcccratatgttcaaatgggagttgctccagtttcctgatacttgagtgaagaacatgtacacaggtcaagaagctcaaactgacagaaactgttgacattcagggatggggtcatagaattctctggaggaatggaaatacctggaacccttctcagcaggctttgcatagtcaagtaacaatagaggactacaaaaacatggtctctctgggtcttgccatctccatgctggacctggtgacctttttggaggcaaaggaaagagccctggaacatgagtgaggagatagtagccatacagctagttctgggatacatgtgcaggacatgcaggtttgttccatgggtgaatgtgtgccatggt

SEQ ID NO: 733449 - DNA, 634 bp, Homo sapiens
ttttatcacagcctctgttgccctgtgatctgcaggtcctgggagatgcatagctaagttgccaggacatcctggaagctgggaaatgacacattggttatcagcaaatcagatgctgatattgaggaaaggcagagatgattcccaccctctggattttttcagatttgtgaagaaattttttccaaaggaaaacaacccatcccagtaaggtagtgcaagaacctgcaaaacaaaatgtatctgaggcccacagtgggaaggaatctcccgatatgttcaaatgggagttgctccagtttcctgatacttgagtgaagaacatgtacacaggtcaagaagctcaaactgacagaaactgttgacattcagggatggggtcatagaattctctggaggaatggaaatacctggaacccttctcagcaggctttgcatagtcaagtaacaatagaggactayaaaaacatggtctctctgggtcttgccatctccatgctggacctggtgacctttttggaggcaaaggaaagagccctggaacatgagtgaggagatagtagccatacagctagttctgggatacatgtgcaggacatgcaggtttgttccatgggtgaatgtgtgccatggt

SEQ ID NO: 733450 - DNA, 628 bp, Homo sapiens
ccatgctcagccattagcaaggggctatctgggacttctgagacctcggcaagaaagccgagatgagtcctaaaggagctagtatctggaggagtcagctcactgtactccttgcacctacggcaagttgtttcttgaaggatggtccaagccgtgcccctccatggcttctacagccatattcttccccattgccaagcctggcctcctagaagccccccttgtgtcaaacactgggggttcccgcatgcttggaaacagggctsttacatcccctgggctactgcaggcagggagaaataaaatgaatggagtgtcaatatgaagaaagaagacactcatagaagtaagaagagaattaattatctctatggcaactttagtgggcacagaatgtttggtaataatcgtcatgtttttgctgtgcatatattatgcattctgtactgtgcaaggtatttgctataagaaacccagaactgtcaaattataaactcgcaagggactctggtgcctagttaagtttccctcccacagagcaggaatcccttctagaatgccccacaggttcagtgtcctcttacatacatccagtgatggcagacttttcacatccagctatctcctt

SEQ ID NO: 733451 - DNA, 418 bp, Homo sapiens
tttctgtgatgaggtgccccaaatttcccacatgactctgaggaggcatggaaagccattgagttgagaagcagtaaactttccataggaccctccagcaaggggtgagagccaggtacaggacagagaccagggcagagactggaggtgatgtatctgtggcacttgagaggtcagagagaagactgaattagtaagcatcccaggccctcataaagctgagaggctrggggaaatgagagggtgggggaaagagggagagataccagagagagagaagaggagagagagacctgagttgcccagctgcagccctagcagcaggggacaggtcaatgcccaggaatacaggctgttgccaacaacagtggaaatagccagcccaaatagcagctctgaatggcccctccacagaaga

SEQ ID NO: 733452 - DNA, 680 bp, Homo sapiens
gcatgagctgtgggagtgtggctacatccacctagatttcaaaggatgcccccggaaacttgaggcccaggcaaagaactgccacagtggtagagcggctccagagggccccactagggcaatgcccagtgaagccatgggagcaggtccaccccaaagaccccggactgataaagccaccagcattcaatttyagcctggaagagctataggcatgagactccaacctgtgagagttgcagcatgggttaatgtcgtgggctggagcccccttcgggccttggagggccaacctcccactccactctgtccagaggtgaggctttgaatcaaagaactttattcaggccaggttcagtggctcatgcctgcaattccagcactttgggaggccaagttgggaggattacttgagcccaggagttagagacagcggtcagctatgaccatgccactgcactccagcctgggcatcagagtaagaccctgactcctaaaaaagaagaagtttattctaaagccttaagatttaatgtttgcctgattgggttttgggtttggtagggacctattacttatttcttctttcctatttctctctttgaagggggagtaactattcaatgcctgaccaccattctattttagaaacacataacatgtttaatttcacaggctca

SEQ ID NO: 733453 - DNA, 566 bp, Homo sapiens
ttgaaaaggggggaaataccaaaacctttctgtctactctttggacctgttttgtccaatagggcagtgactggccatatgtgggtatcaaagacttgaaatgcagctagtccaaattgaaatgtactatctgtaatatacataccagatttcaaagacttagtacgaaagataaaatcttattaataatttytattatcaattattgaaactacattgtagatatatcaggatatattattaattaatttcatctactactacattttaaattttcctaagtggcttgcattacgttgttatggatagcactggtctggtaacaagactgcagggggacaaaagctacagaactcccaaccactaacacggaaaatgaaaactctaaagaaagaactttccaaatcactgtacctatttaaaaccaagagactacattcaggagttctgtttatttctaaaaaactaattgtgttggcaaacattttataaatttagcttttcgaagattaaattagtaaatggaaaacacagcttctatttccaatttttaaagtttacatttc

SEQ ID NO: 733454 - DNA, 566 bp, Homo sapiens
ttgaaaaggggggaaataccaaaacctttctgtctactctttggacctgttttgtccaatagggcagtgactggccatatgtgggtatcaaagacttgaaatgcagctagtccaaattgaaatgtactatctgtaatatacataccagatttcaaagacttagtacgaaagataaaatcttattaataatttttattatcaattattgaaactacattgtagatatatcaggatatattattaattaatttcatctactactacattttaaattttcctaagtggcttgcattacgttgttatggatagcactggtctggtaacaagactgcagggggacaaaagctacagaactcccawccactaacacggaaaatgaaaactctaaagaaagaactttccaaatcactgtacctatttaaaaccaagagactacattcaggagttctgtttatttctaaaaaactaattgtgttggcaaacattttataaatttagcttttcgaagattaaattagtaaatggaaaacacagcttctatttccaatttttaaagtttacatttc

SEQ ID NO: 733455 - DNA, 627 bp, Homo sapiens
ctttataatgaaggttgcaaaaaccttaaaatacattagaatgacataaaaaataaatgttacagtcaatttttactactttattctaatttgttgagtttgctagatctccatatcttaaacacaagcctaagagtccttatttactagagaatgtgcaacatttttgtctccattcttaatggtttttcaaattcacctattagaccatcacagaacttgtttaaactgtatttcaattttggcttgggcctgacacttccaaaacccatttcactgaactttgaagtaaaatgattactactgctaaacctgagactcatccttcaaaaactaattgaatcattaattgatcattaattgaatcctacaagaatgtcttattcttggccaggcrcagtggctcatgcctgtaatcctagcacattgggaggccgagctgggagggtcacttaaggtcaggagtttgagaccagcctgggcaaagtagtgagacctcatctctacaaataattttaaaaattagccaggcatggtggcacatgcctgtggttccagctactcacgaggccgaggtaggaggatcacttgagcctaggaggttgaagctgcagtgaggcatgacca

SEQ ID NO: 733456 - DNA, 607 bp, Homo sapiens
agacataaccagctgtggtagagtaacaatccatctatctagcaccatcagtaaatctacatatacttctatatataaatacattactaaaaaatgaaaactcctctcttaaagaataaaaacttttcatttaaaaatattgagatagaaattttaaaacatggagtgtaaacatccctatatttaaactaaatttgttttaaccycttcttggtagctaggaacaagttgatgaacagaaattactcactctaacatacactgaggacctaggctctgatactgtctcagtttctgcttgacatgtagatataaataccatacttggcactcttgtgtctcagtagctgatctgcaagctcccttccagctctgtagttctctcagtttatacaatctattggtctgtctaatgtctaaatgaaagccaacatttatacagcacttagcatgtgacaggcactgttcttagtactttatgtacagtaatatactcaatctccttaaaagccctattaaatggccactaccattatttccattttacagttgaggaaattattggagaagggggttatctgataggtacaaagtgaaagaacagaga

SEQ ID NO: 733457 - DNA, 607 bp, Homo sapiens
agacataaccagctgtggtagagtaacaatccatctatctagcaccatcagtaaatctacatatacttctatatataaatacattactaaaaaatgaaaactcctctcttaaagaataaaaacttttcatttaaaaatattgagatagaaattttaaaacatggagtgtaaacatccctatatttaaactaaatttgttttaacctcttcttggtagctaggaacaagttgatgaacagaaattactcactctaacatacactgaggacctaggctctgatactgtctcagtttctgcttgacatgtagatataaataccatacttggcactcttgtgtctcartagctgatctgcaagctcccttccagctctgtagttctctcagtttatacaatctattggtctgtctaatgtctaaatgaaagccaacatttatacagcacttagcatgtgacaggcactgttcttagtactttatgtacagtaatatactcaatctccttaaaagccctattaaatggccactaccattatttccattttacagttgaggaaattattggagaagggggttatctgataggtacaaagtgaaagaacagaga

SEQ ID NO: 733458 - DNA, 607 bp, Homo sapiens
agacataaccagctgtggtagagtaacaatccatctatctagcaccatcagtaaatctacatatacttctatatataaatacattactaaaaaatgaaaactcctctcttaaagaataaaaacttttcatttaaaaatattgagatagaaattttaaaacatggagtgtaaacatccctatatttaaactaaatttgttttaacctcttcttggtagctaggaacaagttgatgaacagaaattactcactctaacatacactgaggacctaggctctgatactgtctcagtttctgcttgacatgtagatataaataccatacttggcactcttgtgtctcagtagctgatctgcaagytcccttccagctctgtagttctctcagtttatacaatctattggtctgtctaatgtctaaatgaaagccaacatttatacagcacttagcatgtgacaggcactgttcttagtactttatgtacagtaatatactcaatctccttaaaagccctattaaatggccactaccattatttccattttacagttgaggaaattattggagaagggggttatctgataggtacaaagtgaaagaacagaga

SEQ ID NO: 733459 - DNA, 608 bp, Homo sapiens
aaactggtaggaacaattaaaaagtaattttgattaattgctggaggctgagtttagattagcttgagagtgagaaactcatatgggtccactcttaggtgaggtctcaacatcttcatgagttttatttctttgaaacacaccatattctcaaggtgaagatcctagacaagaaaaaaattattattttgaaagtactcagagcatttgccataacagaggcctattttcaaaaagaaattttactaagccttagctgacctagagkagggcatttaacaaacttcaaacccatgtaactttccagtttcaccaaaagaaagaaaaaaaaaatagctgagaaacatttccaaagcccagagactctggctgcaaataaaataatattttatcataagattatggaaaacttccctgactcataacttactaccacattaaaaggactctagtataataacactagattacaactgagagttgcaaaatagagataatcgaaaaaggaatcttagagaaaccaaaggcaaaaggagaaaaaacaaaatcctggggaaaactgaaatctctgacacctacgtctataataaatattaaacgcagcccaa

SEQ ID NO: 733460 - DNA, 608 bp, Homo sapiens
aaactggtaggaacaattaaaaagtaattttgattaattgctggaggctgagtttagattagcttgagagtgagaaactcatatgggtccactcttaggtgaggtctcaacatcttcatgagttttatttctttgaaacacaccatattctcaaggtgaagatcctagacaagaaaaaaattattattttgaaagtactcagagcatttgccataacagaggcctattttcaaaaagaaattttactaagccttagctgacctagagtagggcatttaacaaacttcawacccatgtaactttccagtttcaccaaaagaaagaaaaaaaaaatagctgagaaacatttccaaagcccagagactctggctgcaaataaaataatattttatcataagattatggaaaacttccctgactcataacttactaccacattaaaaggactctagtataataacactagattacaactgagagttgcaaaatagagataatcgaaaaaggaatcttagagaaaccaaaggcaaaaggagaaaaaacaaaatcctggggaaaactgaaatctctgacacctacgtctataataaatattaaacgcagcccaa

SEQ ID NO: 733461 - DNA, 608 bp, Homo sapiens
aaactggtaggaacaattaaaaagtaattttgattaattgctggaggctgagtttagattagcttgagagtgagaaactcatatgggtccactcttaggtgaggtctcaacatcttcatgagttttatttctttgaaacacaccatattctcaaggtgaagatcctagacaagaaaaaaattattattttgaaagtactcagagcatttgccataacagaggcctattttcaaaaagaaattttactaagccttagctgacctagagtagggcatttaacaaacttcaaacccatstaactttccagtttcaccaaaagaaagaaaaaaaaaatagctgagaaacatttccaaagcccagagactctggctgcaaataaaataatattttatcataagattatggaaaacttccctgactcataacttactaccacattaaaaggactctagtataataacactagattacaactgagagttgcaaaatagagataatcgaaaaaggaatcttagagaaaccaaaggcaaaaggagaaaaaacaaaatcctggggaaaactgaaatctctgacacctacgtctataataaatattaaacgcagcccaa

SEQ ID NO: 733462 - DNA, 553 bp, Homo sapiens
agtttaagtaacttaattaacatcagagccagtaagtggtagaattagagttcaaaacccaagttcatctctcttcacagcctgtgctttttactactatacagaatgcccaccagggattgaattagcacattagaagatgagaacttgcattcatcttcatcagcattactggcacatagaaagctttttttggtcactgctatattcctagtgcccatggtggtaacggcttagttgtgatttgcagaagaaagaaagaatagagcatatcaatctatgcgactaaagcagtgtttaaataacccagtaaacttaaaagaaaagactatggacatggcaatacgacrtaagtagagattttggttaattagaaacctgtgtgtcattttggtatttgcctgctgcttccctctccacagcccatctaccaagctgcgttagttcagatgcctaatatctctcctaagtgctctgattcactcaatcaccatacacacctctgtagcataggcgacccccatctcctgccttaattcttgcaactgcctat

SEQ ID NO: 733463 - DNA, 504 bp, Homo sapiens
gtacataataatcacatcagggtaaatgggacattcatcacctcaagcacttattctttctttgtgttacaaacaatccaattatacttagttatttttaagtatacaagaaaatattgttgactatagtcacctgttatgttatcaaatactagattttattttattttttgtctaactctattkttgtacccattatctatccccatttctcccactcactcctcactacaccatccagcctctggtaaccactgttctactctctatttctatgagttcaattgctttaatttttagctcccacaaataagtgagaacatgaaaaatttgtctttctgtgcctggcttatttcacttaacataatgacctccagttctactcatgttgttataaatgccaagatctcattctttttttatgaccaaatagtactttattgtgcaaatgtaccatattttctttatccatttgtctgttgatagagacttagactgctttct

SEQ ID NO: 733464 - DNA, 502 bp, Homo sapiens
tagaggaacgcaattcttattccttaaagttagattgaccagcatctaataaaaaagtgtttagttttcttcacttagaaacttacttgaagatataccctggtttttgggtcagtgtcactgcccatcagagaagggtgatgttaatgagctagtgatgattaagaactagagatttcaaggaacttaatccttttatagcctgagaagggctgtaggaaatayattagaccaagaaagaagataacttggaagttttttattgctaataaaagcctgcctaatttccataggcacaactggaaaaaaaaaagagagaggagaaactcttgactggcaggaataaaaactgcatggagaaaaaaaaatgaaaagatgacttttttttaatggtacttttatgttcctcccctccccccttgccgctgcccacagtacttacaggaaggcagtaatttactgagatctagtgcagtatgtttgattaaaggtcatgcaaaca

SEQ ID NO: 733465 - DNA, 502 bp, Homo sapiens
tagaggaacgcaattcttattccttaaagttagattgaccagcatctaataaaaaagtgtttagttttcttcacttagaaacttacttgaagatataccctggtttttgggtcagtgtcactgcccatcagagaagggtgatgttaatgagctagtgatgattaagaactagagatttcaaggaacttaatccttttatagcctgagaagggctgtaggaaatatattagaccmagaaagaagataacttggaagttttttattgctaataaaagcctgcctaatttccataggcacaactggaaaaaaaaaagagagaggagaaactcttgactggcaggaataaaaactgcatggagaaaaaaaaatgaaaagatgacttttttttaatggtacttttatgttcctcccctccccccttgccgctgcccacagtacttacaggaaggcagtaatttactgagatctagtgcagtatgtttgattaaaggtcatgcaaaca

SEQ ID NO: 733466 - DNA, 588 bp, Homo sapiens
acctttaatctttgaggttgctgacctttgaatgggatttttgtttgttttcctttcaactgtttggccatgttgtgtagggctgttgcagttctttgggcatctgccccagtctgtagtcatctaggatttttcagtatctggaggtatcattagtgaaggctgtgaaacaacaaatcagcccacccctttctctgggaggtccatctcaggggaggtgcasacctgttgctggcttgaacacacctgtaggaggtgactggagaccccttttgggaggtctcacctatccagggggaacaggattggggacccacttaaagaagcagtctagccccactttcatagagcagccatgctatgctggggtaccacttctgcccctcatcaggttgtgctctctaaagcctggaggctgaaaaagctaagttgctgaaacagcaaagttgatggcccacccctatctctaggaactctgtcccagaaagttttcaaacttctgttggccagagaacatcagtggaagtggctggaggccctggttgggaagtcccactcagagataaggggcatatcaggatcctacct

SEQ ID NO: 733467 - DNA, 588 bp, Homo sapiens
acctttaatctttgaggttgctgacctttgaatgggatttttgtttgttttcctttcaactgtttggccatgttgtgtagggctgttgcagttctttgggcatctgccccagtctgtagtcatctaggatttttcagtatctggaggtatcattagtgaaggctgtgaaacaacaaatcagcccacccctttctctgggaggtccatctcaggggaggtgcagacctgttgctggcttgaacacacctgtaggaggtgactggagaccccttttgggargtctcacctatccagggggaacaggattggggacccacttaaagaagcagtctagccccactttcatagagcagccatgctatgctggggtaccacttctgcccctcatcaggttgtgctctctaaagcctggaggctgaaaaagctaagttgctgaaacagcaaagttgatggcccacccctatctctaggaactctgtcccagaaagttttcaaacttctgttggccagagaacatcagtggaagtggctggaggccctggttgggaagtcccactcagagataaggggcatatcaggatcctacct

SEQ ID NO: 733468 - DNA, 611 bp, Homo sapiens
taataaacctactaccagctacctggcgaatcaccctagaaatggtgtcatatcaaggactcagtgttgttatgtgctgctgtcagatttaacactcagaactggctgtagccagactggcctttgggattcaaagttgatgctgcttatcccatgcattgcttctatttctgctactatgttcactttgttcataagcccactgggtgatgamgagggtggcagggaaataagaataactgatacccacagaacaagtcattctgtccatgtcattatcaaaatcctgctctgatgtggtcatcccttggtgggcattcacatggaacatacatatctttatgtaacttacccagtgagaggggtttatccacaaaattctttccaattttttttgtcatgaattgtgtaatcatgttccctacatgtcgctgaccatctagccaattcatgggccacagcagtgttgcaggattggggatcataagatctcaaactcctggtctcaagcaaaccctgcctcagcctcttaagtagctgagactataggcgcacaccacaacgcccagctaattttgttgtatttttggtagagatggaattttgctgtg

SEQ ID NO: 733469 - DNA, 594 bp, Homo sapiens
gtcagttgggagtatgttcacagacagaatgtttgtagtttttacagtgggatattcggtttttcactacactcctcaatttgttcagaaatgtccctcatagattctaaaaaaaagtgtttcaaacctgttgaatcaaaaaaatggtgtaactctttgacatgaatctaaacatcagaaagcattttcacaaatagcttctttctagttttcatcatgagatatttggtttttcactatatgcctcatacagtgaaatgtcccttcgtggattctatcaaaagagtgtttcaaacstggtgaatcaaaacacaggtttcattcaatgagatgaatccacataccataaagcattttcgcaaatagcttgtttctagcttttaacatgggaagtttggtttttctttataggcctcaatgggctcagaaatgtcccctcatagattctacaaaaagtgtgcatttatagtgttgcatggaaacaatagtttgacactgtgagataagtccacacaacacaaagcattttcccagataacttctttctaatttttattgcaggatattctgttcattactataggcctcaaggga

SEQ ID NO: 733470 - DNA, 552 bp, Homo sapiens
atctggatctggcattagtctctttcataatctactaattatttacaaaagattggtggtgaccagtattttattaagtatttttggaaaagtctcagttcataaatattctaagctaaaaatatatttagaaagccawatctgaactgaatttttgatgcacgtaactcttcttttcaaaacttactcagccactctgaaaattttccctcccataaaggacatgttgttagcttctcagagcaccttgctttttgtattcaggaaagtctttttattttcaatttgttatttatgtccttcacaatttttctaattttctgttttcagtagataagaaacatactggtatttggattttctataagaggagaatcaataaatgaataaaagaaggaagatggtatcctatgaggatgataattaggagggactgtatgaaagaaaataaattgctatcacctgaaaaaacataccatatttctagtcttggttcaggcaaatttaatgatgggaacttaaataagtctcctgcttcccaaggctgcttct

SEQ ID NO: 733471 - DNA, 552 bp, Homo sapiens
atctggatctggcattagtctctttcataatctactaattatttacaaaagattggtggtgaccagtattttattaagtatttttggaaaagtctcagttcataaatattctaagctaaaaatatatttagaaagccaaatctgaactgaatttttgatgcacrtaactcttcttttcaaaacttactcagccactctgaaaattttccctcccataaaggacatgttgttagcttctcagagcaccttgctttttgtattcaggaaagtctttttattttcaatttgttatttatgtccttcacaatttttctaattttctgttttcagtagataagaaacatactggtatttggattttctataagaggagaatcaataaatgaataaaagaaggaagatggtatcctatgaggatgataattaggagggactgtatgaaagaaaataaattgctatcacctgaaaaaacataccatatttctagtcttggttcaggcaaatttaatgatgggaacttaaataagtctcctgcttcccaaggctgcttct

SEQ ID NO: 733472 - DNA, 552 bp, Homo sapiens
atctggatctggcattagtctctttcataatctactaattatttacaaaagattggtggtgaccagtattttattaagtatttttggaaaagtctcagttcataaatattctaagctaaaaatatatttagaaagccaaatctgaactgaatttttgatgcacgtaactcttcttttcaaaacttactcagccactctgaaaattttccctcccataaaggacatgttgttagcttctcaragcaccttgctttttgtattcaggaaagtctttttattttcaatttgttatttatgtccttcacaatttttctaattttctgttttcagtagataagaaacatactggtatttggattttctataagaggagaatcaataaatgaataaaagaaggaagatggtatcctatgaggatgataattaggagggactgtatgaaagaaaataaattgctatcacctgaaaaaacataccatatttctagtcttggttcaggcaaatttaatgatgggaacttaaataagtctcctgcttcccaaggctgcttct

SEQ ID NO: 733473 - DNA, 539 bp, Homo sapiens
tccaaaggagccaatattttaaatttatattcctctgtcataaagaatacacagctaagaggtctaatcattgcacctgggaaagtacagatttcttctccttggaaatatgttgggtacatactaactgcctggtgagtaaaacctcagaagtttaaattaaataccagcaacttacataccttaaatgattatcaaaaattactgagagatattaaatggcttcaacccacttygggaattcctactgataagctatacaacctgttttctatcttaaagggcaatccagccctggattctcccagatatttaacccctgcagcagaaagggaaatcgaggaaatagagcaagccacctctcagaggcagctaaatcgcattgattcaccttattcaattaaattgtttatctttcccaccaaacactcccctacagggttaatagggcaaatagcccccaggccacacttcctagaatgggttttttgctcacataccgggactaaaacgctatctccctatattcagttcattac

SEQ ID NO: 733474 - DNA, 625 bp, Homo sapiens
attgacttatgaaaatgaacaagttggccaggcgtggtgaatcacgcctgtaatcccagcactttgggaggccgaagcaggcggatcacgaggtcaggagatcgagaccatggtgaaaccccatctctactaagaaaaaaataataataataatacaaaaaaaattagctgggcacggtggcggatgcctgtagtcccagctactcgggaggctgaggcaggagaatggcatgaacccgggaggtggggcttgcagtgagctgggatagtgccactgcactccagcstgggtgacagagcaagactctgtctcaaaaaaaaaaaaaaaagaaaaagaaaattaacaagttgatccagaagtcatgacatcactgcttgaccaagccaccaaatcgcatcaatttttccaccaaaattggagaaatttatctaaacaatttcaacttacccagagactggctaaacaaattatcctgcaatgcctggattgtcagctcacaagcacatcccctccttccacaggtattaacttttgaggactagaaccccaacactcacttaattagtgcacatgctctgcctggaaagtcaactcgatatgtcattaaacatattttaacttttg

SEQ ID NO: 733475 - DNA, 517 bp, Homo sapiens
tgcatggggttgcccaggtgtctttttcattagactaccttgtgttggccagtagtctctcccataaaaatccctggggttgaccgagagtctctcccattaaaatgcctggggtcaaacatgttgctctataattacaatgtctggggttggtcaggggtctctgccataagaatgcctagtgtggcccagctgtctctatcactasactgcctaagttcggcaaaaagtctctcccataataaggcctgtggtcacccaggtgtctctatcataagactgcctgctgttggtcaaggatctcttcccttagaatgcttcggttcacccaggtgtctctataattaggctgcctgaattcagtcaggagtctctcttaagacaatgcctgggttcacccaggaatctctcttattaaaatgatgagggtcaccaacgcgtctctattattagaatgcctgggctcacgcaggtgtctctatcatcagacagcctgtggtcgaccggtagtctctcc

SEQ ID NO: 733476 - DNA, 542 bp, Homo sapiens
atacttgccttgtttctagtttttattgtgggatattcgatttttcaacataggcctgagtgggctcagaaatgtcttttcattgattctacaaaaagagtgtttccaacccgtttaattaaaacaaagatttaactctgtgagatgaatccaaacatcacaaagcatttccacagatagcttgcttctrgtttttatcactggatattccgtttttcactataggcctcaatgagctcagaaatgttccttcatagattctacaaaaagcaagtttccaaggtgatgaatcaaaacaaaagtttaaatctgtgatgtaaatccagaaaacccaaagcattttaacttatagcttgtttctactttttaacatggaatattcagtttttcattataggcctcagtgagctctgaaatgttccttagtagatgctacaaaaagagtgtttcaacctattgaatcaaaacaaatgtgtaactttgtaagaggaattcccacatggcaaagcatttgcacagataggttgtttgtacttttcatt

SEQ ID NO: 733477 - DNA, 626 bp, Homo sapiens
gagatgaatccatgcatcacaaagcatttttacagatagcatttttctacttcttatagcaggatattgggtttctcagtataggcctaaatggactcagaaatgtctcattgtacattctacaaaaacattgtttccaacctggtgaatcaaaacagagattccattcggggagacgaatccacacatcacaaagcaacttcacatattgcgtttttctagtttttatcacaggatcctcggtttttcactatgtgcctcaatgggctcagaaatttcccttcctagattttacaaaaaaagtgtttccaacctggtgactcaaaacccaggtttgattcagtgagaagaatccagatatcacaaagcattttcacatacagcttgtttctatatgtttcttgttttattgtgggatatttgtttctttattataggcctcaatggcctctgaaakgtcccttcatagattctacaaagaaactgtttccaaactgatgaatcaaaacaatggtttaactctgtgagataaatacacacattgcaaagcattttcacagttagcttctttagaatgtttaatgcagtatattcagtttttcagtgtaggacttaatggcctcaaa

SEQ ID NO: 733478 - DNA, 472 bp, Homo sapiens
ctctatcagaatattgataaaataatgcaacactaaatattaaatattatatacttatatataattattatattgcccaaaatagcatattctctaatgcgtattttgcagtaggtttgtaaatagcttctttctctcatgacaatctttcttctttttctaatgtctgatcaagcccatagactttataatcagtctttggttcctggtccatttaattaatggtggtgttttccctaacatccataattgtgcatatgctttgtggcttacagtattaagaataccccaatatataagtgaggataatgaarataaacttgatctgtattatctgccttctgagagtgctcaggggctttaccttcaaccgaagggcaagctggttgctacgtctcatagtgagtgctgagttttgcatttagattgataagtgtgtgctgtatccaatagaagcgaattcttctttaca

SEQ ID NO: 733479 - DNA, 576 bp, Homo sapiens
actgagactatctcaaaaaaataatataggtatttccaatatgccaagtttatgcagtgtctaatttcttcttaccccttttcctggtacctcattttcttctgtgcttcatacttttaatgaattaatttttgcaacaggatctggtttattctgccttggcagggtggtcctgagagtggcaggtgccaccctcttctgggcaaagggaggtccagaaggccagttagggccaatggtgggagaacctgggggtggagtggggttggggatttgggctacagcccctggaatgtggtgaaaccaggatgaggcccagaggcagctstggtaggccagggcagggcggaaggcactggactggaaccaggcaaggtctacagggccaagatcccaggccacacgggcaccctgggaggcggagcacagtgtcccatgacacagagcatgaaacacaggcccagggctcacagtaagcacatgaacaagtggacacagattcacaggccagttgacatccagccatggtgggaccagaggtagacacggtgtcacatacagaccacagggaagaca

SEQ ID NO: 733480 - DNA, 576 bp, Homo sapiens
actgagactatctcaaaaaaataatataggtatttccaatatgccaagtttatgcagtgtctaatttcttcttaccccttttcctggtacctcattttcttctgtgcttcatacttttaatgaattaatttttgcaacaggatctggtttattctgccttggcagggtggtcctgagagtggcaggtgccaccctcttctgggcaaagggaggtccagaaggccagttagggccaatggtgggagaacctgggggtggagtggggttggggatttgggctacagcccctggaatgtggtgaaaccaggatgaggcccagaggcagctgtggtaggccagggcagggyggaaggcactggactggaaccaggcaaggtctacagggccaagatcccaggccacacgggcaccctgggaggcggagcacagtgtcccatgacacagagcatgaaacacaggcccagggctcacagtaagcacatgaacaagtggacacagattcacaggccagttgacatccagccatggtgggaccagaggtagacacggtgtcacatacagaccacagggaagaca

SEQ ID NO: 733481 - DNA, 576 bp, Homo sapiens
actgagactatctcaaaaaaataatataggtatttccaatatgccaagtttatgcagtgtctaatttcttcttaccccttttcctggtacctcattttcttctgtgcttcatacttttaatgaattaatttttgcaacaggatctggtttattctgccttggcagggtggtcctgagagtggcaggtgccaccctcttctgggcaaagggaggtccagaaggccagttagggccaatggtgggagaacctgggggtggagtggggttggggatttgggctacagcccctggaatgtggtgaaaccaggatgaggcccagaggcagctgtggtaggccagggcagggcggaaggcactggactggaacyaggcaaggtctacagggccaagatcccaggccacacgggcaccctgggaggcggagcacagtgtcccatgacacagagcatgaaacacaggcccagggctcacagtaagcacatgaacaagtggacacagattcacaggccagttgacatccagccatggtgggaccagaggtagacacggtgtcacatacagaccacagggaagaca

SEQ ID NO: 733482 - DNA, 589 bp, Homo sapiens
ctttctttctttcttttttttttttttttttttttgacagaattttgctcttgtcccccaggctggagtgcagtggcgcgatcttggctcactacaacctggattcaagcgattctcctgcctcagcctcccgagtagctgggattacaggcatgtgccaccattcccggctaatttttttgtctttttagtagagacggtgtttccccatgttggtcaggctggtctcaaacgcctgactcagatgatccgcccgcctcggccacccaaagtgctgagattacaggcttgaaccacmgcgcctggccctgtgatgtagattttgatgctgccagccaggctgcctgccgggatcgcctgccctggagcaggagcatcagccgtgcgttccaggacgcaggcatggcatgaccggcaggaggcggagtgcccggcgtctcttgggatcggagcctcctgaattccacgctgggaccttaatttggttttaacacaaataaagatctcacataaagataaaaggggatgtgttggcttgtaatttttgttaaaagcaatggtatatgttgtataggatagtgtattggga

SEQ ID NO: 733483 - DNA, 589 bp, Homo sapiens
ctttctttctttcttttttttttttttttttttttgacagaattttgctcttgtcccccaggctggagtgcagtggcgcgatcttggctcactacaacctggattcaagcgattctcctgcctcagcctcccgagtagctgggattacaggcatgtgccaccattcccggctaatttttttgtctttttagtagagacggtgtttccccatgttggtcaggctggtctcaaacgcctgactcagatgatccgcccgcctcggccacccaaagtgctgagattacaggcttgaaccaccgcgcytggccctgtgatgtagattttgatgctgccagccaggctgcctgccgggatcgcctgccctggagcaggagcatcagccgtgcgttccaggacgcaggcatggcatgaccggcaggaggcggagtgcccggcgtctcttgggatcggagcctcctgaattccacgctgggaccttaatttggttttaacacaaataaagatctcacataaagataaaaggggatgtgttggcttgtaatttttgttaaaagcaatggtatatgttgtataggatagtgtattggga

SEQ ID NO: 733484 - DNA, 575 bp, Homo sapiens
taatttaaaaatttttttgtagatatgggatctttctatgttgcccaggctgcacttgaacttctgggctcgaatcatctgccagcctcagcctcccaaagtgctgggattacaggcatgagtcactgcacccggccccctatgttgtttatccactcacccatcaatagacacttgggctgcttccacctcatcactcttatgaataayactgctgtaaatgtgggtttatatgtttcttttttaaaaaattttactttaagttctgggatacatgtgtagaatgtgcaggtttgttacataggtacacatgtgccatagtagtttgctgcacccatcaacacatcatctaggttttaagccctgcatgtattaggtatttgtcctaatggtctccctccctttgccccccacccaccaacaggccctggtgtgtgatgtcctgctccctgtgtccatgtgttctcattgttcaactcccacttatgagtgagaacatgtggtgtttggttttctgttcctgtgttgtttgctgagaatgatggtttccagcttcatccatgtccctgcaaagg

SEQ ID NO: 733485 - DNA, 655 bp, Homo sapiens
cttaagtgatccatctggcttaacctcctaaagtgctaggattacaggcataagccactgcacccggctgctaaaatgttaaacatgattagtcattagggaaatgcaaattaaaaccaaagtgtaataccactacacatctattagaatagcttaaaaaaaaaaaaaaccaacaaacccaagttctggcaagaatgcacagtgactgsaatgctcatataatgtagtagccatacagaataatatagtctctttgggaaacaatttggcagtttcatataaatttcaacatttatcataaaacccagaaatcccactcctaggtatttacccaagagaaatgaaaatttatagctggggatgctggtgtgtacctgtagtcccaactactcaggaggctgaggtgggagaattgcttgagtccaggagtttcggatcagcctgagcaacatagtgagaccagtccctgtccccaaaacaattttttaaaagagaaaatctatgtttatagcagctttattcataaatgaaaaaaattggaaaaaacccagatgtacctaaatcagagcataactaatatgtggtacatccatcagtgaagtgttatttagcaataaaaaggaatgactattgatgtatagagcatcatggacat

SEQ ID NO: 733486 - DNA, 492 bp, Homo sapiens
taagccactatgcccggcccattgtctttcaaagctccatcactatgtatttccgggccagcaaaatcttctaaattcaagatcctttgcagcctgctgattggtggcttgaaatctgagggttagtggactctggtctacatgggaaaagtacraagggcaagagaaagcaagcaggagtccaggtcactgagagagcagctgaccctgcctcctatctccaaatgggcagcggggcctgtgggaggtaaagcccctatctcccactattcctgcaatctattcttctggttcctttgggtaacgccttctttttccaggtggcctgtgaagctgtcaatcatgatgctcgtatatactcatctcccccactctcaccccaggaacagacacgtaagccaggatgacacagccaaacaaactactccttttcacagtccacagtgattcatggagggagggcacacaaccaaatcaaggccaaacaggatc

SEQ ID NO: 733487 - DNA, 622 bp, Homo sapiens
tcacatggttacatgtggctgtagtatactcactattttattattttactttattattattattttttgagacggagtctcgctctgccgcccaggctggagtgcaatggcgcaatctcagctcactgcaacctctgcctcctggttcaagcgattctcatgcctcagcttcccaagtaactggaattacgggtgcccaccaccacacctggctaatycttattattttattagagacagggtttcaccatgttggccaggctggtcttgaactcctgactttgtgatctgcccacctctgccccacaaagtgctgggattagaggcatgtgccaccgaactcagcctattttattttataaagacagggtctcactctgttgcctgggctggagtgagtggcatgatcatagttcaccatagcctcaatttctggggctcaagcgttactcctacctcagccttccaggtagctgggactacaattgcatcttcactcattgctacataataaacagtccattgtatcaatataccacaacatatttctcctttctcctgttaatggacatttggattatttccagtttggagctgttatgaatactgcagagatgaacat

SEQ ID NO: 733488 - DNA, 622 bp, Homo sapiens
tcacatggttacatgtggctgtagtatactcactattttattattttactttattattattattttttgagacggagtctcgctctgccgcccaggctggagtgcaatggcgcaatctcagctcactgcaacctctgcctcctggttcaagcgattctcatgcctcagcttcccaagtaactggaattacgggtgcccaccaccacacctggctaatccttattattttaktagagacagggtttcaccatgttggccaggctggtcttgaactcctgactttgtgatctgcccacctctgccccacaaagtgctgggattagaggcatgtgccaccgaactcagcctattttattttataaagacagggtctcactctgttgcctgggctggagtgagtggcatgatcatagttcaccatagcctcaatttctggggctcaagcgttactcctacctcagccttccaggtagctgggactacaattgcatcttcactcattgctacataataaacagtccattgtatcaatataccacaacatatttctcctttctcctgttaatggacatttggattatttccagtttggagctgttatgaatactgcagagatgaacat

SEQ ID NO: 733489 - DNA, 613 bp, Homo sapiens
agcaattcctattatattcttgatttaaatcactcatcttgccaatacagatgggtcataaacaatgggagtagatgatcatacatttaatcaggaggtgactccaattttagctgctttccaaatgcgaggtctagagcaagtcaatacagtactcggcccttaatgtatacctattaacrgccaggtacgatgactcacgcctgaaatcctcacactttgggaagccaaggcagaaggatcgcttgagtccagatctttgagaccagcctgggcaacatagtgaaaccccacttctacaaaaataaaaaataaaaattagaccgggtgcggtggctcacacctgtaatcctagcactctgggaggccgagacaggtgggtcatttgaggtcaggagttcaagaccagcctgtccaacatggtgaaatcctgtctctactaaaaatacaaaaattagccaggcagtagtggtgcacacctgtaatcccagctacttgggaggctgaggcagaagaatcgcttgagcctgggaggcagaggttgtggtaagccgagatcacacctgcactccggtctgggtgacagagtgagaccctgtctcaaaaaatatat

SEQ ID NO: 733490 - DNA, 557 bp, Homo sapiens
catttctatcaagaaagcctctgaagcaatcaagttgggattcagggttggggtcgaggaaagcaatagaaagacgagatttaaaaaagcacagaatgcttggtgcggtggctcatacctgtatcccagcacttgggaggctgaggtggatgatcacctgatgtcaggagttcgagatcagcctgaccaacatggtgaaaccccgtttctaccaaaaatacaaaaactaagrccgggagtggtggatcacgcctgtaatcccagcactttgggaggccaaggcaggctgataacgaggtcaggagttcgagatcagccatggccaacatggtgaaaccccatctctactaataatacaaaaattagctgtgcatggtggcgggtgcctgtaatcccagctactcaggagactgaggcaggagaatcacttgaacccaggaggcggaagttgcagtgaactgagatcgcatcactgcactccagcctgggcgacagagtgagactctgtctcaaaataaataaataaataaaataataatacaaaataaataataaat

SEQ ID NO: 733491 - DNA, 605 bp, Homo sapiens
ggcctggtggctcaagcctctaatctcagcactttgggaggctgagatggaaggatcacttgagctcaagaactcgagtccagcctggacgatgtatcaagacctcatctctacaaataatgttaaaaattattagtgcagcataagtggcataggcttgtggtcccagctacttgtgaggctgatatggtttggctccgtttccccacacaaacatcatcccaaattgtaacccccacctgttaagggagggtcctggtgggaagtgattggatcatttggacagtttcctccatgctgttctagtgataatgagtgagttctaacaagatctgatggttcggctgggcgcggtggctcaagcctgtaatcccagcactttgggaggccgaggcgggtggatcaygaggccaggagatcgagaccatcctggctaacacggtgaaaccccgtctctactaaaaatacaaaaaattagccgggcgtgatggcgggcacctgtggtcccagctactcgggaggctgaggcaggagaatggcgtgaacccgggaggcagagcttgcattgagccgagatcgcgccactgcactccagcctgggcgac

SEQ ID NO: 733492 - DNA, 574 bp, Homo sapiens
aaacaaagcagtatccttgaaaaagagaaattatgctaaattaagagacttaagaagaaagtgcgatctgaagtagatattgtcgtggacaagccagctataaaagatgtcttagggacagttgaaaaataatcatataaaagggggggcatggtggttcgtgcctgtaatctcagcacttcgggaggccgaggaagaatcagtagagcccaggagttggagaccagcctgagcaacatagcaagaccccatctttacaaacagaaacaaaacagataaaggtcgggtattccttatggtacatattgtataatgtggagactgctaactgaaaaaagaaaaaaatktataaaaaatatgtatttacacccatgttcattgatgcataattcacaatagtcaaaaggtgaaagcaatccagatgtcctctgtggaatgactggataaacaaaatgaagtatagacctacaatggaatattattcagccttaaaaagaaagaaaattctgacccatgccacaacgcggaggaagcttgaagacattatgctaagtgaaatacaccagacacaaaa

SEQ ID NO: 733493 - DNA, 560 bp, Homo sapiens
tttaattaaaaattcaaataattttgcactgagtaatacatgtttatgataaaagttataacagtatagaaatgtaaaacagaagagtcctgtttcccctccctgcttttcattctcacttcctacaggtaatcctgttaagattacgccaaaaaaaaaaaaaaaaaaatctgtcgagcacttaccatatgccakggactgtgctgggcttgggaatagaatcaggagcccagagccacggagtgggaggatgcacaaataatagcatcaattaacgtgttattgcaagagaaggtaagtgctctgaaggaaagggtcaaggttctgtgagagtatgtaacaaaggaatgctaagagtttcttgcaataactcttagttacaataatttgtggcgcattcttgtaaaattacagcttatacttctgtagcacttgcactttataaagcactttcatccgtattatttcacttgctttggctgcgcaatagaatatttattatgatgatgtcctcttacagacacagaggcttggagaaattaagaaactgggtaagttcc

SEQ ID NO: 733494 - DNA, 573 bp, Homo sapiens
aaggtcagcagtgtgggccacgtgggaggagaggctgggccctgggaattccctgtctggtggggggaccctagatccagagacagctgggcaaagccgaagctggcttcttgcatgggtgagggtggcagtggttcagggcctgtgctgggccaaggggctcactgtcttggggtgcgtctctccacgcttgcrtccagaaccagctgctaggccctgatgagaacgctaagacctacatcgccagccagggttgtctggaggccacggtcaatgacttctggcagatggcgtggcaggagaacagccgtgtcatcgtcatgaccacccgagaggtggagaaaggccgggtagggcgcccccccttccccgcatccgcccccgtgcttgtggtcatgccattaagtcgaagagcagtcagatgccagggcagaaagggatctcaggggtgagggtccggcccttgttgggaaactgagggctagtgacaaagtctcgactacacaacgtgacccccagatccctgcatgcatccctgggctcttctgagctccagacccaggttccaggctg

SEQ ID NO: 733495 - DNA, 573 bp, Homo sapiens
aaggtcagcagtgtgggccacgtgggaggagaggctgggccctgggaattccctgtctggtggggggaccctagatccagagacagctgggcaaagccgaagctggcttcttgcatgggtgagggtggcagtggttcagggcctgtgctgggccaaggggctcactgtcttggggtgcgtctctccacgcttgcgtccagaaccagctgctaggccctgatgagaacgctaagacctacatcgccagccagggytgtctggaggccacggtcaatgacttctggcagatggcgtggcaggagaacagccgtgtcatcgtcatgaccacccgagaggtggagaaaggccgggtagggcgcccccccttccccgcatccgcccccgtgcttgtggtcatgccattaagtcgaagagcagtcagatgccagggcagaaagggatctcaggggtgagggtccggcccttgttgggaaactgagggctagtgacaaagtctcgactacacaacgtgacccccagatccctgcatgcatccctgggctcttctgagctccagacccaggttccaggctg

SEQ ID NO: 733496 - DNA, 588 bp, Homo sapiens
ggaaataagacagatgcttgcattaagcaaagacctcaattccgacccctgcaattcagcagctacttaacatggaacacatgcagattagggcaggggtgcagcaatgagtaacacatggtttctgctcgcacttagggatccagagcgctgagcagcagctatgattagaacaaaaggtcagggaacccagaggaatcattcttgayaggaggagtatcggagaagccaattttttatttatttatttttgagacggagtcttgctctgttgctcaggctggagtgcagtggcatgatctcagctcactgcaacttccgcctcctgggttcaagtgattctcctgcctcagcctcctgcgtagctgggaatatagctaaacgccaccacagcgggctcattatcttttgtatttttagtagagatggggtttcaccatgttggccaggctggtctcgaactcctgacctcaggtgatccacccaccttggcctcccaaagtgcggggattacatgcgtgagccaccgcgccggccagagaagccaatctgagtagaaaccggaacaagcaaggttcgaattccctc

SEQ ID NO: 733497 - DNA, 478 bp, Homo sapiens
tacagggtagtgccagataagctaacccgagctgtctcaaaagaaactatacacaactcggctgggtgcggtggcttacgcctgtaatcctaacactttgggaggccgaggtgggtggatcacgaggtcaggagatcgagaccatcctggctaacacggtgaaaccctgtctctagtaaaaatacaaaaaattagccrggcatggtggcgggcgcatgtggtcccagctactcgggaggctgaggcaggagaatggcatgaacccgggaggcagagcttacagtgagctgagattgtgccactgcactccagcctgggtgacagagcgagactgcgtctcaaaaaaaaaaaaaaaaagaaactatacacggctcacacaacataaaaaaccctggctccctggaagacaggaaacacagttagatgatggggttggtgggtgggcagggggttggaaatggatgttactaacaacagt

SEQ ID NO: 733498 - DNA, 538 bp, Homo sapiens
gcatcgataaatgttcctgcctccagcaattacatgaaaaccacccttgttaatttatcagttttgatgctaatggaaataggtaaatagaagcttcttataagaatctctgtgtttgggggcaatttttgtttgcttacagttttatgaatttttcagcatttatttcatttaatcaaagatttaggccgggtgcggtggctcacacctgtaatccagcactttgggaggccgaggcgggtggatcacctgaggtcgggagtttgagaccagcctgaccaacatggagaaaccctaactctactaaaaatacaaaattagccaggygtggtggcgcgtgcctctaatcccagctacttgggaggctgaggcaggagaatcatttgaacccgggaggtggaggttgcggtgaactgagatcacgccaatgcactccaacctgggcaacaaaacaagagcgaaacccagtctcaaaaaaaaaaaaaagatttaacattttaagtagaataaaaatggcagagtatatgaaagaattctg

SEQ ID NO: 733499 - DNA, 538 bp, Homo sapiens
gcatcgataaatgttcctgcctccagcaattacatgaaaaccacccttgttaatttatcagttttgatgctaatggaaataggtaaatagaagcttcttataagaatctctgtgtttgggggcaatttttgtttgcttacagttttatgaatttttcagcatttatttcatttaatcaaagatttaggccgggtgcggtggctcacacctgtaatccagcactttgggaggccgaggcgggtggatcacctgaggtcgggagtttgagaccagcctgaccaacatggagaaaccctaactctactaaaaatacaaaattagccaggcgyggtggcgcgtgcctctaatcccagctacttgggaggctgaggcaggagaatcatttgaacccgggaggtggaggttgcggtgaactgagatcacgccaatgcactccaacctgggcaacaaaacaagagcgaaacccagtctcaaaaaaaaaaaaaagatttaacattttaagtagaataaaaatggcagagtatatgaaagaattctg

SEQ ID NO: 733500 - DNA, 534 bp, Homo sapiens
cagtctcaaaaaaaaaaaaaagatttaacattttaagtagaataaaaatggcagagtatatgaaagaattctgagaaaccatgaagaaatgctaatgaggccaactatatgaaacatgcttagaaggcagtccaatagaatgagaccaaaagaaacctctgtgacagccaagatgacagataatggataacttgaagaaaaataaataagaaatgagaagactgtamgttagaagactaattaaacagaattttagagataataagtaaccacagaagggcaatctaattggaagaacgtaacaggaaacgtgagcttgcaatacaagataatggaaaagagatcatcacaataaaccaatacacggtggaacaggtgtatttaacccattgtctcggacacacatttcatgactggagttgcttagacacaagagaaaaaactacctgaccccctgtgagaggacagctcagccatgacgctcatataaatgaaggctgagactgcacttctgcctggaagaataattttaaa

SEQ ID NO: 733501 - DNA, 534 bp, Homo sapiens
cagtctcaaaaaaaaaaaaaagatttaacattttaagtagaataaaaatggcagagtatatgaaagaattctgagaaaccatgaagaaatgctaatgaggccaactatatgaaacatgcttagaaggcagtccaatagaatgagaccaaaagaaacctctgtgacagccaagatgacagataatggataacttgaagaaaaataaataagaaatgagaagactgtacgttagaagactaattaaacagaattttagagataataagtaaccacagaagggcaatctaattggaagaacgtaacaggaaacgtgagcttgcaatacaagataatggaaaagagatcatcacaataaaccaatayacggtggaacaggtgtatttaacccattgtctcggacacacatttcatgactggagttgcttagacacaagagaaaaaactacctgaccccctgtgagaggacagctcagccatgacgctcatataaatgaaggctgagactgcacttctgcctggaagaataattttaaa

SEQ ID NO: 733502 - DNA, 616 bp, Homo sapiens
cagatatagacagtgaactctaatacaataagataagtgctatgtcagacttacgaataaaatagacaaaacagagacactgtgactgcaaaggatctcaatagagggtgagggagtaaagaaagagcctaacattcatagggctcctactacatgctagatattgtgctggggactttatattgcatttaatctttacaccagtctgagaggtaggttattatcactgttttacagaagaggaaagaaggcccagaactgttcactaacttgttcagggtcacatggctattaaatgacaggttagatatgatttctamgttcatgcttttcaacccacttcctcccttgccccaaacagtaagtgtgctgcctattgtaaatatggttgtatcttccctaaactatacccaaattcctcagttttgaaaatggttgctgcaaatattctgttttcccttcacccaatttatagactgtctaaacctaaaatcaagcatcagcgaccttaccttcttcctaccctgactctcttccatttttaactagagtacaagtctaatcccatctgtactgttgcctacactgtatttccctcctatataaaatacgctct

SEQ ID NO: 733503 - DNA, 586 bp, Homo sapiens
ctgcccaggttgatctcgaactcctggcctcaaacaaccctcccaccttgccttcccaaagtgttgagatcacaggctcgagccaccaagccacactctttctagcctttcaaattccaagttaaagtggaacttgccacatgtcgttttgtatcactttccccaacccctttcttttcttttttttttttttttttgagacggaatttcrctcttgttgcccaggctggagtgcaatgttatgctctcagctcactgcagcctccacctccccagttcaagtgattttcctgcctcagcctcccgagtagctgagattataggcgcccaccaccatgcctggctaatttttgtatttttggtagagacagggtttcgccatgttgactaggctggtctcgagctcctacggatcggcctcccaaagtgctgggattacaggtgtgagccgctgcaccagccccaacccctttcaattagcattgcaaataattccccttatcatgaaaacattatttttaatggcagcagagtattgctttatattaacatgacagtttattcaaccgaactctttatggggcat

SEQ ID NO: 733504 - DNA, 586 bp, Homo sapiens
ctgcccaggttgatctcgaactcctggcctcaaacaaccctcccaccttgccttcccaaagtgttgagatcacaggctcgagccaccaagccacactctttctagcctttcaaattccaagttaaagtggaacttgccacatgtcgttttgtatcactttccccaacccctttcttttcttttttttttttttttttgagacggaatttcgctcttgttgcccaggctggagtgcaatgttatgctctcagctcactgcagcctccacctccccagttcaagtgattttcctgcctcagcctcccgagtagctgagattataggcgcccaccaccatgcctggctaatttttgtatttttggkagagacagggtttcgccatgttgactaggctggtctcgagctcctacggatcggcctcccaaagtgctgggattacaggtgtgagccgctgcaccagccccaacccctttcaattagcattgcaaataattccccttatcatgaaaacattatttttaatggcagcagagtattgctttatattaacatgacagtttattcaaccgaactctttatggggcat

SEQ ID NO: 733505 - DNA, 565 bp, Homo sapiens
tggcaaagactgaaatgctgtggcattttccagaccccctaactgttaatttccaaatgtgatttaggttcaatgcatctggtgatcttgtgcgagactttggtttgtaactaagttacttaaatagagaagcagggtgggaggcatccattttcctggtacaacttaggtaagaggcagcatggtcctggagtcagcaactgtagtggcagcgtcctaattctttagtttcctggttaggcagaggagtagctcttttggtggtcsaggtctgcagtgtagctttggcagttgttcctggaagaccagccaggattcaatttgggcgcattttctattctgcttaataaactccttagctagaacagattctgttgtctgcaaccaaaagtctccatcaatactgtacacatggattcctttcctatggaactagctagtatcttcatgaagaaattgaagctcaaagaagttaaaagacttgtcaaagtcactgagttttgtacatggtaaagcaggaactcaaacttagttctgttcaacttcaaagcctgaccattaacca

SEQ ID NO: 733506 - DNA, 600 bp, Homo sapiens
tttcagtcctagcttcttttttaaatatgagattgtgcatttccaagcctaatttttatatgcccatttaaaaattgcattttcccatgtactctcatcgccaccagccccctttcattatgagctcaggcgaaagctgtggactcttacccacatcacacaggtttatttcacatgacacacggcttcactgagatagagaaggccctgccttcatacagagacytaagtcaaagcaaagggaataaaatctaatcccatgcgttcattcagcacatatttgccaagcatctacaacatgccaggcactgctttgcagatccagcaatgaaccactgttctgtgtagggagccagaaccaagcaggcaggtgagcagcagttagcatgtgttaggtaggggagagtcaaggagaaaactaactcgagtcatgggaatggggagtacctggaatgaggatgctaacaggtgagggaaggccttgctgcaaaagtgatgtttgagcagagatctgaaggagctgaggaagctgatcatggggctccaggcacaggtaggagcaggagcaaaggccctgaggtgggtgtgtgcttggcaagc

SEQ ID NO: 733507 - DNA, 553 bp, Homo sapiens
gagctcacccgctgtcctcccacagtcttgagcctggtgaagtggagagacggggagaggaatgcccagagacagaaaaagtgtaggttttagacttgaaaagatattgatttaattgtgtttcccttaaaattaaggtagaaatttgatcaagaattaaggagcaaaaattctatttttaagtccatgaaatttagtttatgaaatctacttttagagccaaggcagagagtgtagattatgtagtccaccccactacccctttattattggatrtggaaacagaagctcagatcagcctaggagctgttttccatgtaagaaagagggtttatatgcctcaggcaaggagttcgcaatctttagacagtcatatatgatgggaagagcatacaatacgagaactattttcactgcggtcatggaattttattgacttttaaaatttcatacatccttaaagctgaacatgagatttgtgtgctttttcaaagtgagagtatacacctgacccaagcttcttcaaaagtatcatggtcagaaaagataggga

SEQ ID NO: 733508 - DNA, 483 bp, Homo sapiens
ctttgacctcatcctgggccggatcctttacacactcatgctactccttgtgctttaaaagtgaagcatggctgggcgcagtggctcacgcctgtaatcccagcactttgggaggctgaggtgggcagatcacgaggttaggagatcgagaccatcctggccaacatggtgaaaccccatctctactaaaatacaaaaaaaaaaaaagaaagaaaattagccaggcatggtggtgcrccctgtagtccccagccacttggaggctgaggcaggggaatcgcttgaacctgggatgcagaggttgcagtgagccgagatcatgccactgcactccagcctggtgatagagcgagactccatcaaaaaaaaaaaaaaaaaaaaaagcagcatacatcccactcctggcccaattcccctcctcatccagcatctcctcacccctcagagacctctgagactccacccgccagggcaacactgcca

SEQ ID NO: 733509 - DNA, 517 bp, Homo sapiens
ctgagctgtgttttgaaggataagtaggagatgttaaattaaacaaggggaaaggaaaaaataaaaaataaaaataaatttaaaaaataaataaggggaaaggcgttgtaggctgcctggcatattaagtggatcagcatggtgctgggaggggtgcatgcaccaggtaggggaaatgaggggagagggggktggtgagatacaggggctggatcattaggggatcagcatggagctgggaaggtggagcttcatcctgaaaagtgagcatgtaagcaggagaataatgagataaggagatgcttctggaagctctcagactgcaacatggtccatgggctggagcaggtccaggtggggcaaagaagccaggcaggagggcttagaccaagcaatagtgggagagacaaggaggtggaaatcatcgggaagttatttaggatctcagagtagtaggactctctgatcagtcagttgtggagggtgatggtgaagaggaatcctgtatgattagcag

SEQ ID NO: 733510 - DNA, 583 bp, Homo sapiens
aattaaatagtcatttcctcggtcacactagccatattttgagttctcagaagccacattttgaccagtggctactactgcgttggaaagcatacttctacaaccttgatgtttgagctcatttttaatcaaattccccgtmaccaaggacacagtactgtgttagcaagcgaccacctctctttagatggcgcacaaaatctaccgctacaagactggagacctgccttatagttgtttccctgtttccagtcaagagagtcactctaattctctgggcctctatttattcatttgtcaaagagggactattatctcaaacatctcctccagctctcaaatgctgtattatttctctcttctaaaagaggaaggaatgagggcattggtaaagccctgggcctgaaggtacacacacaagctctcttcaataaaatctgtaaagagtggaatatgttgccactctttagcacctgccaacgtgctgtggcaatctggaggcgcttggtgctctctccttttatgcagtactaaggatccagctaattctgtctccagaatccccagaataaagacaaaggga

SEQ ID NO: 733511 - DNA, 593 bp, Homo sapiens
atgggctcaagggatcaccctgcctcagcctccaaagtagctagaactacaggtgtgcacgagcataactggctacttttttttttttttgtattttttctagagctggggtctcactatgctgcccaggctggtctcaaactcctgggctcaagcaatccacctgtctcagcttcccaaagtgttgggattacaggtgygagctgccacaccccgcctatagcatgcactcttgattttctgagaaacgatcaacaaagtttaaccctgctactgcctaagctctcaaagtgtctgtcaaactcttgagtttatatgtatttttgaagttcagtagttgaggtcaaaacacccacctttggggttggatctgatcgaatttgatgttaacattcttgagggaagcttgagttcactcccaagttctcacatatggtgtctgataagacatcagactcgaaggaagaggggagttcattccacatcaaactatgtaactttctggggttattgcaaagctatataacataatgcaacagagagcaacatctggggctttggagtcaagcaattaagggcttgaatccagattt

SEQ ID NO: 733512 - DNA, 593 bp, Homo sapiens
atgggctcaagggatcaccctgcctcagcctccaaagtagctagaactacaggtgtgcacgagcataactggctacttttttttttttttgtattttttctagagctggggtctcactatgctgcccaggctggtctcaaactcctgggctcaagcaatccacctgtctcagcttcccaaagtgttgggattacaggtgcgagctgccacaccccgcctatagcatgcactcttgattttctgagaaacgatcaacaaagtttaaccctgctactgcctaagctctcaaagtgtctgtcaaactcttgagtttatatgtatttttgaagttcagtagttgaggtcaaaacacccacctttggggttggatctgatcgaatttgawgttaacattcttgagggaagcttgagttcactcccaagttctcacatatggtgtctgataagacatcagactcgaaggaagaggggagttcattccacatcaaactatgtaactttctggggttattgcaaagctatataacataatgcaacagagagcaacatctggggctttggagtcaagcaattaagggcttgaatccagattt

SEQ ID NO: 733513 - DNA, 438 bp, Homo sapiens
caggaggctgagtcagaagaatcacttgaacacagaagtcagaggttgcagtgagccgagatcacaccactgcactccagcctggggtgacagagagagactctgtctcaaaaaaataaaaaaagaagatctgggcacagtggcccacacctgtaatcccagcaatttgggaggctggggcaggtagatcacctgaggtcaggagttcgagactagcctggccaacatggtaaaacctcatctttactaaaaatacaaaaattagctgggcgtggttgcaggcrcctgtaatcccagctattcaggaggctgagacaggagaatcgcttgaacccaggaagcagaggttgcagtaagcagagatcttgccactgcactccagcctgggcgatagaacaagactctgtctcaaagaaaaaaaaaaaaaaaaacggccag

SEQ ID NO: 733514 - DNA, 548 bp, Homo sapiens
gtctttgttcaaccgtggccctgttcatacacacctgcgggcttgctacccaattttctaaagctaaataggtgacaaaagagaaagagaggccgggcacagtggctcacgcctgtaatcccagcactctgggagggcgaggtgggcggatcacgaggtcaggagattgagaccatcctggccaacatggtgaaaccccgtctctactaaaaaatacaaaaattaaaaattagctgggcatggtggcggcgcctataatcccagctacttcccagctactcaggaggctgaggcaggagaatcgcttgaacccgggagacggaggttgcagtgagccaagatcacaccattgcactccagcctyagcgactgagcaagactctgtctcaaaaaaaaaaaaaaaaagatgaaagagactgatacacttttagttaaactccacagcaacagatttcttttttccaatgtcctcagcaaatttgtatcttcattacaatatctaaacacactcttccaagaacatttccatgtctgcctgctggcttagt

SEQ ID NO: 733515 - DNA, 548 bp, Homo sapiens
gtctttgttcaaccgtggccctgttcatacacacctgcgggcttgctacccaattttctaaagctaaataggtgacaaaagagaaagagaggccgggcacagtggctcacgcctgtaatcccagcactctgggagggcgaggtgggcggatcacgaggtcaggagattgagaccatcctggccaacatggtgaaaccccgtctctactaaaaaatacaaaaattaaaaattagctgggcatggtggcggcgcctataatcccagctacttcccagctactcaggaggctgaggcaggagaatcgcttgaacccgggagacggaggttgcagtgagccaagatcacaccattgcactccagcctcrgcgactgagcaagactctgtctcaaaaaaaaaaaaaaaaagatgaaagagactgatacacttttagttaaactccacagcaacagatttcttttttccaatgtcctcagcaaatttgtatcttcattacaatatctaaacacactcttccaagaacatttccatgtctgcctgctggcttagt

SEQ ID NO: 733516 - DNA, 529 bp, Homo sapiens
aatcggcactctgtatctagctcaaggtttgtaaatacaccagtcagcaccctgtgtttagctcaaggtttgtgagtgcaccaattgacactctttatctagctgctctggtggggccttggagaatctgtgtgtggaaactctgtatctaactaatctgatgggcacgtggagaacatttgtatctggctcagggattgtaaacgcaccaatcagcmccctgacaaaacaggccactcggctctaccaatcagcaggatgtgggtggggccagataagagaataaaagcaggctgcccaagcccgcattggcaaccagcttgggtgtcctttcaaactgttgaagctttgttgtttcactctttgcaataaatcttgctactgctcactttttatgtccacgttgcttttatgagctgtaactctcaccgcaaaggtctgcagcttcatttttgagcccagcgagactacgaggccaccggaaggaacgaacgactcctgacgcgctgccttaagagctgcgacactc

SEQ ID NO: 733517 - DNA, 614 bp, Homo sapiens
cttcaagagacccatctcacatgtaatgttactgttaggctcaaagtaaagggttgtagaaggatctgtaacacaaatagaaaagaaaaaaagaaagaatcactattcctatataagataaaacagattttaaaccaacaacagtaaaaaaatgacacagaaaggcactacataataataaagkgttcaattcaacaagaagacttaactgccccaaatatacatgcactcagcattggagcaccaagattcatgaaacaagtacctccaaacctataaaaagatttagatacccactcaataatattgggggacttcaacaccccactgagaagattggacagatcattgaggcagaaaactaacaaggaaattctggactcttgaaaaaacgctcaaataattaggcattgaaggaacatacctcaaaataataagagccatctatgacaaaactacagctaacattacactgaacatgcaaaaactgaaagcattccccttgagaactggaacaagaaaagggtccccactcccatcactcctattcaacatagtattgaaagtcctagccaggacaatcaggcaagaaaaaaaaaggcatccaaatagaa

SEQ ID NO: 733518 - DNA, 614 bp, Homo sapiens
cttcaagagacccatctcacatgtaatgttactgttaggctcaaagtaaagggttgtagaaggatctgtaacacaaatagaaaagaaaaaaagaaagaatcactattcctatataagataaaacagattttaaaccaacaacagtaaaaaaatgacacagaaaggcactacataataataaagtgttcaattcaacaagaagacttaactgccccaaatatacatgcactcagcattggagcaccmagattcatgaaacaagtacctccaaacctataaaaagatttagatacccactcaataatattgggggacttcaacaccccactgagaagattggacagatcattgaggcagaaaactaacaaggaaattctggactcttgaaaaaacgctcaaataattaggcattgaaggaacatacctcaaaataataagagccatctatgacaaaactacagctaacattacactgaacatgcaaaaactgaaagcattccccttgagaactggaacaagaaaagggtccccactcccatcactcctattcaacatagtattgaaagtcctagccaggacaatcaggcaagaaaaaaaaaggcatccaaatagaa

SEQ ID NO: 733519 - DNA, 614 bp, Homo sapiens
cttcaagagacccatctcacatgtaatgttactgttaggctcaaagtaaagggttgtagaaggatctgtaacacaaatagaaaagaaaaaaagaaagaatcactattcctatataagataaaacagattttaaaccaacaacagtaaaaaaatgacacagaaaggcactacataataataaagtgttcaattcaacaagaagacttaactgccccaaatatacatgcactcagcattggagcaccaagattcatgaaacaagtacctccaaacctataaaaagatttagatacccactcaataatattgggggacttcaacaccccactgagaagattggacagatcattgaggcagaaaaytaacaaggaaattctggactcttgaaaaaacgctcaaataattaggcattgaaggaacatacctcaaaataataagagccatctatgacaaaactacagctaacattacactgaacatgcaaaaactgaaagcattccccttgagaactggaacaagaaaagggtccccactcccatcactcctattcaacatagtattgaaagtcctagccaggacaatcaggcaagaaaaaaaaaggcatccaaatagaa

SEQ ID NO: 733520 - DNA, 639 bp, Homo sapiens
tagcattgagaagttaaagagggatcctagctgacagactttaacatctattttcattgcagaaacactttaatctagaatgttagtttattgattatttctgtctctactagaaaacagatgaaatactgggaaacttatgacatcatttcctgtatgtctttctatgagaagtgagcaaacacaaacctacttaggcagatatttcttaaatttcattttctttcctttgtttaaatactttttaccattctttagaaccttacatcttttacaggcatttgtccttgagttatgccactgattattactgatcaagagaaatgactatactcttcagatttataaatcaagaacaggatactgcgatactgtcytattttctgacaacttatattttgaatagttgctgactttatctcctaccccattctaaactcttcactatatccattgggatccctagtaaaccattagcagaagccatatattctcatttgtttctctaacagttcactttattttcttcatttgaactcgaggttctggaacttttttgttcaatggactactttgccagtctggtgcatgctataatttcagaataatgtttttaagtgcatgaaataaaaatatttg

SEQ ID NO: 733521 - DNA, 622 bp, Homo sapiens
acaagggattggattctgtaggtttttgagggtagagtcaacaaaatttgctgatgccttaaagataggttctgaaagagagaaaatattgactccatttttttttagtctaagcatctgaaagtctgaagtggtcattagcagaagagggaaagactgtagaagaaacaaatctgacaattgggggaagagcagtattttgatttggacatgttagttcaagttcctgttaggcatccaaatgaagatgtcaaatagtctatyagagaaaggattcggagaccagcgttgagatctcagctgaaagattaaatgttggcatcatcagcacacagaaaataagtaaggccatgagtagatgaacttacctaagaagtgggagttaaaagagaaggaaaaaaacgtaaatttagacccttattttatactgtacacaaaaattaactcataagtaattgatcatagagaaaaaaacttaagaaataagatactaacagatactgagacattgtacaaaacgcaagaaatcaaaaatgggttagtaaaccataattctatctatgtatttcttcacttatatcattatctaattatatatagatcatcatataattaaaattcc

SEQ ID NO: 733522 - DNA, 649 bp, Homo sapiens
ggtatataaaaaatgctcaacatcactcatcatcagggaaatgcaaattaaaaacacaatatcatccttctccagttagaatgggtattattaaaaagaaaaaaaaaacagatgctggtgaggattcaaggaaaaactcttacataccgttggtgggaatgtaaattagtacagtcactatggaaacaatatggagatttctcaaaataactaaaaatggaatgaccatatgatccagcaatttcrcttctggctatttatccaaagaaacagaaatgaggacatcaaagggatacctatattcaaatgttgactgcagcactattcaccatagcaaagatatggaatcaacctaagtgtccgtcagtggacaaatggattaaaaaaaaacagtggtatatatacacaatgtaatactattcagccataaaaaaagaataaaatcatgtaatttgtagcaacatggatggaactggagggcattatgttaagggaaataagccaggcacagaaaaacaaacagtgcatgttctcacttatgttgatcacacagaggtagagaatagaataatggctacaagagatggaccagtgtttgtgaggcaggaggacaagtatgaagagaggttcattaatgggttcaaacata

SEQ ID NO: 733523 - DNA, 644 bp, Homo sapiens
ttatttatagcctggaaaaattataattattatcctttagtgagtgatacctgaaatgtttggctgaaattgctcccatgcaaattcaaagagattttatatcatgaatttgcaacaggcttcttgctgtagctctatatttggatcttcaaattgagttttgaatagggagtcayaaaaaaagagataaatgtttaataaaaacccaactgtgtaaataaaacttcattttcatcatgtaagttataaataagccacaaatcagttctcccagatgcaaagaaattttcactttggaagtaattagtacaattagattgtagatatttaacatttagtcagaggataataattcttgtcttcatttaaacggctaattagggaaggatataatacaaatctaattagaaatgacttttttttaggcaggcacatgataatatttactaagaatttgctttcttttcaattgttcctcagaagtgaaatatgccaggtaaagatttgttatctttagtttttttttaatgtgacaaatacccttgaagacaattcatttcctgaatcactgtctcttgtataataagcattgtaatctaaaattaagaaaatttaaattttacattattctagttccaatcaac

SEQ ID NO: 733524 - DNA, 607 bp, Homo sapiens
ccatttcatcccttcttgaaataacatatctacttgtgaactgctgatttcttcagccattatccatatgaacttttcagaaagcatcagtggttttaccttctttcatgcaagcttaaccataaattttctctttgttttcactttaattttagaaaaatgtattttgctcttataggggatgttttgaaactcctgtcttatttttcattattccttgaaatagctcctattcagacatcttacagcatatcagtttaggttcattttgatgccaaaaaatgtggaatccttttatggtatttcttaatataacatacattttcatgaactttttaaagacctactacattacaggaaggcctttcaataatataagaattgctacaggtaacattgaattttctagttgattaggcagattaamtttctgtttttctgctgacataaatagtgatgtgggttgagaaggaatataataccagtggtcaaatattctgcagctatgtggaaagtcaaacagttgcaactaagtgtcacatgctttaagggagtcatagagtagctgcttgggcctagcaggtaccctgatgttaacaggatgatt

SEQ ID NO: 733525 - DNA, 628 bp, Homo sapiens
aacaagagaagggagaatgccttttgttgatttctttcatccttgtagtcaggatactctttaggggtctctatggaacaaaaggctttcttcttctaaggaaacacttcacaaatcttaacatcttcagaaaagcttccctcaacttgctatttcccataattagaatgaatgaatggcttgatgggaaaatgacagttactatgtcaccaatcatcaacactaattttccctgaggaatcagagcgctagaggtcataacaagaaagactgggtagtacacgatgaggaggagcagaaagatgatcactgcctttatggccctcatgtgggcctctgtactggggtctctgaaccctgtagcatgcagtcgaatctgcttggtgtgtctaactagggagaaaagtaacaagaaaaatgagatcaggcaaaggataaagggaaccatcrcccccaggttcagggttaactgtttgaaagtacctggaattttactcactttgaatttccaagtaatgttttcttcatgactgactttgaaaaggtgataccacatatcatcattctttggaacactaataattaaagagataagaaaggaccccagaagaatcgcaagcatgacctt

SEQ ID NO: 733526 - DNA, 635 bp, Homo sapiens
cacttgtgataagatccaaatttcatgcctcagctctttcacacccacatgcctcactcttttttgaaaaccaggaagctctctgaatggaacagaaagtagaatcttcttcgacttcaccatgctctagtttgcctggaacactaaagatggtttgccaggaaagatgaacattgacagagggaataaacttctctgagagtcagtgagtttcattgggtcgctgtggtctggcagtgttatgaattggcagaattattctattaattgcaccaactaagcattctgataatacagttagcaaataaacacaatagtctctgagacttcaacttgctttgacttgtctaaaaagtttggtgacactattatggccaattaactattaaaaatatcttctatatttttaaatttgatgttagtggtccataaatatatatatttcacaattaatttagcatatttcttttttttttttttgagatggtgtcttgctctgtcacccaggttggggtgcagtggcatgatctcagctcactgcaacttccacctcccgggttcaagcaattctcctgcctcagcctcccaagtagctgggattacaggyccctcgccaccatgactgactaattttt

SEQ ID NO: 733527 - DNA, 621 bp, Homo sapiens
tgttagtggtccataaatatatatatttcacaattaatttagcatatttcttttttttttttttgagatggtgtcttgctctgtcacccaggttggggtgcagtggcatgatctcagctcactgcaacttccacctcccgggttcaagcaattctcctgcctcagcctcccaagtagctgggattacaggtccctcgccaccatgactgactaattttttcccatctctactaaaaatacaaaaaaaaaattatatctaaagaaattaagtcacatggctarggtcactgtagtaaatgaggaaaaattaagttgattttctcttctctttgtaattccagtttaaccggatgttgtcgatgttgttttcaatttagaaaatatagcaaattgttcattagccatgagtatcactctgctatccaccactttctaagaaggcgcttattttagaacaaggctaacactaaattacaggaaattaagtaattgtggcaaactagagaagcatagtatgtataataggtcttactcagttagatccacctgtcaaggctgagtccctttctggagtctctagagaagcacccattttttgtccacattccttggccttcttcc

SEQ ID NO: 733528 - DNA, 643 bp, Homo sapiens
tatatttatggagtacaaagtgatgttatgatttaagaataaaatgtgaaatattaataattacattaagctaattaatatatccatgacttcaaatacttattttttgtgaggaaaacattttaaatttactctcagtaattttaaaatgtgcaatacactattattarccatgttaaccatttgtgcaaaagaattaaaaaaataccttattactcctgtctgattttgtacgctttggccatgatcttcccatttcccccaccccagcttctattaccacaactctctgcttctgagttcaattgttttagatgtcacatgtcagtaaaaacattaggtatttgtctttccgttcctggcttatttcatttagcagcatgttcttcagtttaatccatgttgtcacaaatgacagaatttccctcttttttttttaaggctgaatagtattctattggaaagcaggtgacatttttgagaggtttagctatgaatggtggcacagaaatagggtagtaagtcagctttaagaactgaacatccccatcacttttgaaacccttcctgtgtctcctttcctcttctctacatgcagcaactacatttaattcttgttaatcattacttgtctttttagctt

SEQ ID NO: 733529 - DNA, 616 bp, Homo sapiens
caaatttttcaaacgtttatgctttgcttccttttgaatgctctgtgctttgtcactaagaaatttcttctgccagattaccctatatcttctttcttgagttcaaagttccacagttctctatggcagggtcaaaatgccaccagtctctttgctaaagcatagcaagagagacytttgctccaattcccaacaagttcctcatctccatctgagaccacctcagcctggacttcattgtccctatcactgagaatttaatcaattaaatcaatactgggcaaagcgtgtctatggtagtaatggaagcaggtaaggctactatgtacctaatagtcagatgttatctttatgataatggtgaacttttgaaagttatttgaaaatgtcctttctaaagaaatttccatgaatctaaaaatagtaaggctaagaaatgcttttgtttacatatacaagagcagaattagatgtgatcataataagtaaatgtggtgttaaaatggcagtcttgctccttgagaggaaaaggcattggaacagccatttttaatgtgtcttttacttaaatgttgccaaaaattcttccatccaagtacatgtccttttgcaaatg

SEQ ID NO: 733530 - DNA, 616 bp, Homo sapiens
caaatttttcaaacgtttatgctttgcttccttttgaatgctctgtgctttgtcactaagaaatttcttctgccagattaccctatatcttctttcttgagttcaaagttccacagttctctatggcagggtcaaaatgccaccagtctctttgctaaagcatagcaagagagacctttgctccaattcccaacaagttcctcatctccatctgagaccacctcagcctggacttcattgtccctatcactgagaatttaatcaattaaatcaatactgggcaaagcgtgtctatggtagtaatggaagcaggtaaggctactatgtacytaatagtcagatgttatctttatgataatggtgaacttttgaaagttatttgaaaatgtcctttctaaagaaatttccatgaatctaaaaatagtaaggctaagaaatgcttttgtttacatatacaagagcagaattagatgtgatcataataagtaaatgtggtgttaaaatggcagtcttgctccttgagaggaaaaggcattggaacagccatttttaatgtgtcttttacttaaatgttgccaaaaattcttccatccaagtacatgtccttttgcaaatg

SEQ ID NO: 733531 - DNA, 539 bp, Homo sapiens
attgatctgcatatggtgaatcattcttgcatcccaggaataaatcccatttgatcatgatgaatgatctttctaatgtattgttgagttcagtttgctagtattttgctgaggatttttgcatcagtattcatcagagatgttggactgtagtttactttttttktcttaatgtgtctttgtctgattttggtattggagtaatgctggcctcatagaatgagcttggatatattctctcctcctgaatatttcagaatattttgagtaggattagtattaattcttctttaaaggtttgatagagttcattagtgaaaccatgaggtgctggggttttctttactgggagacctttgggagacttttttttttatttttttgagtcagggtctcgctctgtcacccaggctggagtgcagtggtgtgatctcagctcactgcaacctctgcctcctgggttcaagtgattcttgtgccccagcttcccagatggctgggattacaggtgcccacctcccaaagtgttgggattacag

SEQ ID NO: 733532 - DNA, 520 bp, Homo sapiens
ttcttctggcaaaacttaaggtatccctaaagtgtaacagttctatcccatgagtattgctagcttggacagtccttcctgatgttttcatgatgatatgtgtagtggggttgcacagcatctccccagaatacccatccatctcgaaccttagagtgtgaccttatttggaaataaggtctttgcagatgtaattagttaaggtaaaattaagtgatactggattatgatggaccctaaattcattgaccagtatcctaataagaagacgatctatagccaggcgtggtggactgcacctgtagtcccagctatttgggtggctgagataggagaatcrcttgagcctaggagttggaggccgcagtgaaccatgatcatgccactggactctagtctgtgcaacagagtgagaccccaactctagaagaagaaggaggaggaggaggggagaagaagagaaggaggaggaggacgaggaggagtattgggcacagagagaaagagaccatgtgacagt

SEQ ID NO: 733533 - DNA, 538 bp, Homo sapiens
aggatccccttgaaaacaagtgaagttttctctgaaccttctctggggcagacgctaatgaatgcaatactttcattgctcctgtaagattcacttcaaggctgctggcaaaggaacttttcttccatgagcacgaattggtttcctgtattaaaaaatgaggaaaatcattcaattgatataaaagccactttgagcaggctggtcaggaaatacaaaagtagaaattctcattgcatcatcttactaattgtatagcaccccagttgcaataaacattaccagctggctttttgcattttttttctactatgcaattttagtctgttgagtcctattaaccacaaatcatgtgaaaaggtgcgggaaaaatagattgagaatggcataacaagcatttgcagaamtatcagtcctggtcccaagtgatattataagggcaatagataggcataatgtaataacaccaagataccgtttgaaagggacccaaagaacccttgtctcctgaaagaaaaagtgtaaagatatttggtta

SEQ ID NO: 733534 - DNA, 538 bp, Homo sapiens
aggatccccttgaaaacaagtgaagttttctctgaaccttctctggggcagacgctaatgaatgcaatactttcattgctcctgtaagattcacttcaaggctgctggcaaaggaacttttcttccatgagcacgaattggtttcctgtattaaaaaatgaggaaaatcattcaattgatataaaagccactttgagcaggctggtcaggaaatacaaaagtagaaattctcattgcatcatcttactaattgtatagcaccccagttgcaataaacattaccagctggctttttgcattttttttctactatgcaattttagtctgttgagtcctattaaccacaaatcatgtgaaaaggtgcgggaaaaatagattgagaatggcataacaagcatttgcagaaakatcagtcctggtcccaagtgatattataagggcaatagataggcataatgtaataacaccaagataccgtttgaaagggacccaaagaacccttgtctcctgaaagaaaaagtgtaaagatatttggtta

SEQ ID NO: 733535 - DNA, 574 bp, Homo sapiens
acacaaggcaaaatagaaaagcagatcagacaaagggtcccttttgtgaaatgacttctcaatatgggctttcccaaacctgtgtaggctcacacaatagaaggtaatttctaaaagggcactgttgcacacttaaggacaaggtcactaaaggactttgatttataaattattgccaaatataaagtcaatatataatcttctgcaggagaaccttgagaatccttgaaactgtcagcctgaatccataattcattccctccaaacctacttacactactaaagatatttctttctttgtaattataattaatcccttgctttttcttctgatgataaaagttytagtaagaacacacacacacacacacacacacacgtgccttgaccaaggtggtctatatcattaaataaatcaaattttagaagagttaggccatatatatatatatatatatttatgagattttgaagttaatcttttacctgcattgaatgaatcattcctttggtgaaacgatagggatacaagatgttgtgaattttaactgctaagctctcagcctggccactg

SEQ ID NO: 733536 - DNA, 508 bp, Homo sapiens
gagcagaactctgagaatgctgtgagaataaagtgttttggaattgttaaccagtccttagtttttgctttctatctcattttcattgagaatttaaagtggaatttataacgaatttgtcagatctggtaagcatttgatayatgctagtttagtgactaaccaaacccaaccaaccagtcttctagggctgattaagcaaaatcctgataactgtttatgattattactatacctagggctgccataacaaaatacctcagactgagtagcttaagcagcagaagtctatttcctctcagttctagagactggaagtctgagatcaaggtgttggcagcaacgatttctcctgaggcctctctccttggcttgtagatggccattttcacagggtctttgatttttgcacacgtgtctatagccaatatgttctcttataagaacaccagtcagattggattagggcccaccctcacagcctcatttaatcttaatcacctcttta

SEQ ID NO: 733537 - DNA, 572 bp, Homo sapiens
accatttgtaatggtgcagcattggaaacattgccacggtccgactgtttttctggtatctggaagggtcctactcctctaccgctttagaagttaggcttggccatggcacttgctttgaaatgctagtgaacagaatacrtgttgctttagggtggaagctcccaaagcttgttcctcctgccttagtgatcctggaagtagctgaccatggaggtgcagagcctcaattagcctggatccctgagaaacaataaatggatgcctcctcagccctaagacttgtgttggacatgaaatgtgagtgagaaataaatttctattgtgttaagccactagattttgggatcgtttgttactgtaatataccttgacctatcctgaatgttacatccaatgcagtcagaaatgaatcaatgcttctactcttctacaatgtactggaagttacaactaatgcaataaaaatttaaagacaagcaagaggtttaaggattggaaaggaagaggccaaattgccatagtttctggtgatgcgatcatccacctggaaaactcaacagcaacaattg

SEQ ID NO: 733538 - DNA, 461 bp, Homo sapiens
gtttcatggtggcatcatgagagttagaaggggtcctatgataagcacattgtttttgattgacatccagtagtagtgtgaccaaccatcccagttgtcccagcactgaggtgtttcctttggcatgaaaatttcaatgctaaaaccaaaaccataaattatggaccacaaattaagagtttgatccactaagaaatataccaaaaggacagctatagaaaggcttcaaatctacttcttagtaaacacatcacttcaataaacatccattgaacatctactttatgctagcaaagtrtaggaattaaagaggtaagtaaaaattgtgtggtcctttctctgcaatcatttagagtttaagggaaaggcagatcctatgcaaataattacaataaatggcaatatgtctgcagctaatgttcctgttgctgtaagaacattaggagggggacctgacccat

SEQ ID NO: 733539 - DNA, 573 bp, Homo sapiens
tgcatgacaccatacctggctaattttttttttttgagttggaaattcgctcttgttgcccaggctggagtgcaatggcgtgatctcggctcgctgcaacctctgcctcccaggttcaagtgattctcctgccttggcctcccaagtagctgggattacaggcatgcaccactgcatctggctaattttgtacttttagtagagatggggtttctccatgttggccaggctggtctccaactcgacctcgtaatccacccccctcggcctcccaaagtgctgggattacaggcatgagccactgcacctggcctatatatatattttactactatatrtatatgtatatatgtgtatatatagcatatatatgtatatatgtgtatatatagcatatatatgtatatatactagtaacagtatatatatacacattttcactacactagtcaaagtatacacacacacacacttagcagtatatattatatatatattccagtatatatatctacatgtaaaagatatatagatatatatatagatacataaaatatatatggatacatacac

SEQ ID NO: 733540 - DNA, 618 bp, Homo sapiens
aaaatgtgccaattatatttagacatttagaactggaaagaactttcaagattaacctagtttaagatcctcattttataagtaagaaaaaatgaacacactctaggtcatcagtagaacatgcacagctagtcatgtttttattttattttttactgtattatgtgccactcttcaaaatgtacaatacatgggccaggcgcagtggctcaygcctgtaatcccagcactttgggaggctgaggtgggtggatcatctgaggtcaggagttcaagaccagcctggccaacatggtgaaaccctgtctctattaaaaatacaaaattagctggacatggtggtgcatgcctgtaatcccagctactcgggaggctgaggcaggagaatcgcttgaacccaggaggcggaggttgcagtgagtcgagatcgagccattccactccagcctgggggacaagagcgaaactccgtctcaaaaaaaaaaaaaaaaaagtacaatacaccaatacacgaaacttgcagggtctattctacctattctaagaaagggcacagaagttcattttgctctcacaaaagacacactccaaacatccaaactcatggaaataagtata

SEQ ID NO: 733541 - DNA, 618 bp, Homo sapiens
aaaatgtgccaattatatttagacatttagaactggaaagaactttcaagattaacctagtttaagatcctcattttataagtaagaaaaaatgaacacactctaggtcatcagtagaacatgcacagctagtcatgtttttattttattttttactgtattatgtgccactcttcaaaatgtacaatacatgggccaggcgcagtggctcatgcctgtaatcccagcactttgggaggctgaggtgggtggatcatctgaggtcaggagttcaagaccagcctggccaacatggtgaaaccctgtctctattaaaaatacaaaattagctggacatggtggtgcatgcctgtaatcccagctactcgggaggctgaggcaggagaatcgcttgaacccaggaggcrgaggttgcagtgagtcgagatcgagccattccactccagcctgggggacaagagcgaaactccgtctcaaaaaaaaaaaaaaaaaagtacaatacaccaatacacgaaacttgcagggtctattctacctattctaagaaagggcacagaagttcattttgctctcacaaaagacacactccaaacatccaaactcatggaaataagtata

SEQ ID NO: 733542 - DNA, 613 bp, Homo sapiens
aaataagccatttggtatgcagaattctgttagatatttttatttttatttttttgagacggagtcttgctttgttgccaggctggagtgcagtggtgcgatctcggctcactgcaacctccacctcccaggctcaagcgattcttctgcctcagcctctggagtagctgggactacaggcacgcaccaccacgcctggctaacttttgtatttttagtacagaacttttgcatttttagtagagatggggtttcaccatattggccaggctggtctcaaactcctgccctsgtgatccgccctcctcagcctcccaaagtgctgggattacaggcgtgagccaccgcgcccagcatcttttttaaaaaaaattgagacagggtcttgctctgtcacccaagctggagtgcagtggtgcaatcacggctcactgcaacatccacctcccaggctcaagcaatcctcccacctcagcctctcgctagctgggaccacaggtgcacaccaccatgcccggctaatttttcaaattttttctaaagacgaggtcctgctatgttgcccaggctggtcttgaactcttgacctcaagctatcatccggccttggcct

SEQ ID NO: 733543 - DNA, 471 bp, Homo sapiens
ttcaacacaatttttttttcctctggttgagttgtctccattttttatttttaaattaaagaaatatcattatggaacactaatgatcttaaatatcagggcttatctccaagctctcctttgtatgtattctgttacattctttgaagaatacaargatttagaagaaaatgacttttaaaaaacctatctgactcactcaaacaaaattgctcactttcctgatctattgttgcttttctggtctttggaaagagatgatgtcttctacccggccttggatttttttcttttttgtccttcctttttttttggtgggggcaatttttggaagtaaatgtcacaatcgatcagtcaatctgagtaggcatggtctagtctgtcctaagtattttatatgagtaccatttgacaaagtcagaattctataatgattcttaacatttttttttttttttttgagatagtctc

SEQ ID NO: 733544 - DNA, 488 bp, Homo sapiens
tagcaaatattcacagcatacaagtttcgaaagtcagaatggctcggtgggagcctatggtgtcaccatacggaacacagtttgaaatgtgtgctcaaaccacgaagtattcccatatgcaaaggttcccacaggtctcaattgaatctgtataaaaaattaaaaaataaaaataaagttcccacaggtacaaagcgcagaataccttttctcagttctttccccttctttaggacttgaaaatcagaaatgcctctagtagartctccgtgtcagcagaccatttaaaatatggctcatatgttttgctgctattcagttttaaggtcatttcctaagtttcaaactttgtgggaaacaggtgcaactgtgaaccttcgtgtggcagggaagagctggagcagtgaaacatgaaactacaaatcagttctctgagtcacaaatctcttgggctgctgtggaagacagtgatgactcagcagaattgc

SEQ ID NO: 733545 - DNA, 584 bp, Homo sapiens
taagggcaggggctggtgcctgtctagccctggggtgcttcgacattctgtgttggtagccctaaccctgcccataccctgtagacagccccaatccccctgtctgagtgtggcccctgtcgcctgcctgccaggacactggcagtgtgtcctgmcaatttagtgacatacccacgaaactgtatttacgacatggtgcatcaggacgagagctgacagacaccattttggagaatgaggggaaggggccaaaagcagaaagcatcgtaagtgggactctggggactccagctggcaaaatggaggctcaacaccagaacaggcccctttgggaagcgagacctctgagcatagcagtttcccagattcagctggggccctggggctgaggctgcacaaccagctgaggccagagaacagtgagggggaccccagcctggctcccaggaggaagagctcaaggctgcccttcacaggcccaggcattagcgtgtccaggtgcgcagacaggcatctcaggaaggctggggcagggtgcctgctcccaccccgcccccgaaccctgcagcctgagacctgggctt

SEQ ID NO: 733546 - DNA, 621 bp, Homo sapiens
gcggatcacgaggtcaggagctagagaccatcctggccaacatggtgaaaccccatctcaactaaaatacaaaaaattagcctggcatggtggtgcacacctgtagtcccagctacttgggaggcggaggcaggggaattgcttgaacccrggaggcagagattgcagtgagctgagatcgtgccactgcactccagcctggcaacagagcgacactctgtctcaaaagaaaaaaaaaaaaaaaagactccagcccagctgggcccagtgggtcacacctttaatcccagcactttgggaggccgagcaggcagatcacctgaggtcaggaatttgaggccagcttggacaacgtggtgaaaacccatctttactaaaaatacaaaaaagtagcccggcgtggtggcacacaaccgtagtcccagctacttgggaggctgaggcaggagaatcacttgaacccgggaggcggagggtgcagtaggccgagatctggccactgcactccagcctggacaatagagcgagattacgtcttaaaaaaaaaaaagaaaagacttcatccagcaagaaagaaatctgtcataccggattcctaaaagtcaattggaatctcatcct

SEQ ID NO: 733547 - DNA, 536 bp, Homo sapiens
cgcatgtgatgtgtttgattcttgctcccagtagctcacatttatgacgcatgcttcctatgctaggttatactctggtgtgttgtttattcatagccagtatttccacttgatgagatcctatgggattttgcaacttatgtaacaaactcttagggagcatttgctgtgagctgaatacttttttaggtgtttatctagtcctcataatggtcctatgaagtaagtatartcattatccacattttatggaaagctgaagcacagagagatgaagtaaacctgccaggaagtgaggaggtgggattcaaacccaggctccctggctcctgagcctgtgccatcgccctcagctaagctgcctctcctgggttttctcatttccaaccattctctcttttttggatgttgtatgcctgccttgatcatcataaagtagtctccaaactttttgatcatacactccatcagtaaacattttggagcatgttttcctccaatatatgtatggaatgcctgcaaattatatacaagca

SEQ ID NO: 733548 - DNA, 416 bp, Homo sapiens
ctgtctctctcccagaccagcggttctcgatggatgtgctgagacacttggtgttgtctcacatggagtggggggaggccagggacgctgctcagtgccctggagtgcccaggacggctccatcccagaggatgatccggcctcaacatccacagctcccactgggagaaagctggactagaagaggaggacctgaagagcctgtgggtgcaccaggcccttgacacaacaccgtctcatgacctcggcgcagygacctatgcggcaggactggggatggaggtgttcactcaaggccactggagccacaggcacggcaggatccgcgcccggcaggcgcctgacctgcccccacactcaagatcagaggcgttcagtgtcttggttcccctaaaatgcctctacatgaggtgaac

SEQ ID NO: 733549 - DNA, 486 bp, Homo sapiens
gtttccctggctcggtgacggccaccaaggaccccaaccccagggagatggaggggctgctggagggagcccccggaacacccgaggccaatttcggcagcatggtgtattccctaccaaggctgtcggcatccaggcagcrctcaatgaatgcctgctaagggtgcagccgctcctgggctggaggagggctgcagttttatggatggaaagttctagaaaataagggtgatgctgtggtctgaaggaagaagcaagacaactgataatatgccgtgacatcctgatctttgcacagcgggttagatattgtcacccacacctggtgctgacatttggggccaatggctgtggtagggggctgtgctgagtaccgcagggtgctgaggagcatccctggcctccatcctctctatgctgggaacacccctcaaccgcaaatgtccccagacattgccaaatgtcccctgggaagtaggatcattc

SEQ ID NO: 733550 - DNA, 463 bp, Homo sapiens
ttcacattacacagatagggaagctgaggtcctgtgggttcctgcctttgtaaaatagggctcttagtgcctgtccgacctcctcagccagctgcggtaagtacacggtacagcggggccctcgaggtctcttgagggaartgctgaaatgttcccgtaaccccctggcatccttctcgtgaaagtccaaactcttcccacagcccaccaggcactgtttgacccctgctggcgaccttcaacttcactggccaccttccctctcctccctccactcctcccagccaggcctcacctgttcctgctttgacacctttgctggtccccctgtccagtgctccgtcccaggtccccttggagctggcctctcccccgcttcccacatcagcaaacacgtcagcttctgagtcagacctcagaaggcctgggactcccagccacgtcacttttgtgatgcaggttt

SEQ ID NO: 733551 - DNA, 577 bp, Homo sapiens
cactccctaatctcaagtgcccagggacacaaaacactgtggaaggccgcagggacctctgcctaggaaagccaggtattgtgcaaggtttttccccatgtgatagtctgaaatatgacctcatggcaagggaaagacctgaccatcccccagccygacacccataaagggtctgtgctgaggaggattagtaaaagagaaagtcctctttgcagttgagataagaggaaggcatctgtctcctgctcctccctgggcaatggaatgtctcagtgtaaaacctgattgtatattccatctactgagataggagaaaacccccttaacgctggaggtgagaagtgctggtggcaatactgctctttaatgcaccagatatgtttatgtatgtgcacatcaaaacacagcacattttctaaccttgtttctgacactgagacatttcttcacgttttcctgctgacccttcccccgctattaccctattgtcctgccacatctccctctctgagatggtagtgataatgatcagtaaataactagggaactcagagattggtgccggtgccggtcctcc

SEQ ID NO: 733552 - DNA, 577 bp, Homo sapiens
cactccctaatctcaagtgcccagggacacaaaacactgtggaaggccgcagggacctctgcctaggaaagccaggtattgtgcaaggtttttccccatgtgatagtctgaaatatgacctcatggcaagggaaagacctgaccatcccccagcctgacacccataaagggtctgtgctgaggaggattagtaaaagagaaagtcctctttgcagttgagataagaggaaggcatctgtctcctgctcctccctgggcaatggaatgtctcagtgtaaaacctgattgtatattccatctactgagataggagaaaacccccttaacgctggaggtgagamgtgctggtggcaatactgctctttaatgcaccagatatgtttatgtatgtgcacatcaaaacacagcacattttctaaccttgtttctgacactgagacatttcttcacgttttcctgctgacccttcccccgctattaccctattgtcctgccacatctccctctctgagatggtagtgataatgatcagtaaataactagggaactcagagattggtgccggtgccggtcctcc

SEQ ID NO: 733553 - DNA, 603 bp, Homo sapiens
tatatttctttggctatatacccagttgtggggctcctgggtcaaatgaggattctgtttttagttctgtgaggaatcgccacactgctttttacagtttttgaactaatttacactcccaccagaagagtataagcattcccttttctctgcaaccttgccagcatctgttattttttgactttttaaaaatagccattctgactggtgtgtrgtggtgtctcattgtgatttttcttttaatttctctaatgattagcgatgaccactttttttcatatgctagttagcttcatatatgtcttcttttgaaaagcatctgttcatatattttgcctaatttttaatgaggttgttcggttttttcttgtaagcttgtaggttgtctgtttactctgttgatagtttcctttctgttaggaagctcttaagttcaaatgggtcccattggtcaatttttgcttttgttgcagtagcttttggtagcttcctcatgaagtctttcccagtttttatgtctagaatggtatttcctaggttatcatggctgggtttcttataattttaagtttttcatttaattttttaatttatcttcagttg

SEQ ID NO: 733554 - DNA, 610 bp, Homo sapiens
aataatggaaatgaaagtggtgttccagcctaagtttctggggttctcttctttttgagatggagtctcgctctgtcacccaggctaaagtgcagtgacgtgatctcggctcactgcaacctccgcctcccaggttcaagtgattctcctccctcagcctctcgagtagctgggactacaggcgtccatcaccacgcctggctaattttmtgtatttttagtagagacagggttttgccatgttggtcagactagtctcaaactcctgacctcaagtgatcctcctgccttggcctcccaaagtgctgggattacaggcatgagccaccacgcccggcctccagcctcagtttctactgacaacgatgacatggaaaaagtactactggatgcccagcaagaagtctggatggagttgctccacgagttgtcaccgtgacagcccacctcactcacagacacaaggaaccaacagagcttctgaaacacccaaggcattggagagaaaaacagttattagtctgtggaagattatattgacagaaagaaagaaattgaaagcatattgaaggaatactcagattagatatgggattggttaagtgagcaa

SEQ ID NO: 733555 - DNA, 610 bp, Homo sapiens
aataatggaaatgaaagtggtgttccagcctaagtttctggggttctcttctttttgagatggagtctcgctctgtcacccaggctaaagtgcagtgacgtgatctcggctcactgcaacctccgcctcccaggttcaagtgattctcctccctcagcctctcgagtagctgggactacaggcgtccatcaccacgcctggctaattttatgtatttttagtagagacagggttttgccatgttggtcagactagtctcaaactcctgacctcaagtgatcctcctgccttggcctcccaaagtgctgggattacaggcatgagccaccacgcccggcctccagcctcagtttctactgacaacgatgacatggaaaaagtactactggatgcccagcaagaagtctggatggagttgctccacgagttgtcaccgtgacagccyacctcactcacagacacaaggaaccaacagagcttctgaaacacccaaggcattggagagaaaaacagttattagtctgtggaagattatattgacagaaagaaagaaattgaaagcatattgaaggaatactcagattagatatgggattggttaagtgagcaa

SEQ ID NO: 733556 - DNA, 596 bp, Homo sapiens
tacatcctcaaatgcctcaaagacacctaggtgattttgagggaattcccagtgaccctgggctgatagtccagtgataagccactctggagagactcaggctgattctaaatagaaaatggaactgccttggtggaactccagaacctggatcatttgtccttatttgctagctcttggataaaagaaagaacaaaaatactaatttttcaggtaaaatacaaaaatcacattttamaggcaaatatagttgtggtcatggctctggatgttttgcggccttgatctctcactcctaagatgcttatttatagttacagattctgccatcagattctatttcctcctgggtcctctcacataactgtagcaggtgaacaagatatgaaaaatctcaaagaaccacactcccgaatgggggctgtaagatgtgtatgttgatatctcacaatgcagaaaatgccttttgttagttttctgtacattctttatccaaactccggcccttatttgtaaatccgaagcagagcccagaccttatctgcagattctaggtaggatccacctggctctgcatcctttggtgttacagcaag

SEQ ID NO: 733557 - DNA, 596 bp, Homo sapiens
tacatcctcaaatgcctcaaagacacctaggtgattttgagggaattcccagtgaccctgggctgatagtccagtgataagccactctggagagactcaggctgattctaaatagaaaatggaactgccttggtggaactccagaacctggatcatttgtccttatttgctagctcttggataaaagaaagaacaaaaatactaatttttcaggtaaaatacaaaaatcacattttaaaggcaaatatagttgtggtcatggctctggatrttttgcggccttgatctctcactcctaagatgcttatttatagttacagattctgccatcagattctatttcctcctgggtcctctcacataactgtagcaggtgaacaagatatgaaaaatctcaaagaaccacactcccgaatgggggctgtaagatgtgtatgttgatatctcacaatgcagaaaatgccttttgttagttttctgtacattctttatccaaactccggcccttatttgtaaatccgaagcagagcccagaccttatctgcagattctaggtaggatccacctggctctgcatcctttggtgttacagcaag

SEQ ID NO: 733558 - DNA, 616 bp, Homo sapiens
catacactgagacagaagcagaattaaccactcttgtcagcctgacacaattctgcattgtacatcctcaaatgcctcaaagacacctaggtgattttgagggaattcccagtgaccctgggctgatagtccagtgataagccactctggagagactcaggctgattctaaatagaaaatggaactgccttggtggaactccagaacctggatcatttgtccttatttgctagctcttggataaaagaaagaacaaaaatactaatttttcaggtaaaatacaaaaatcacattttaaaggcaaatatagttgtggtcatggctctggatgttttgcggccttgatctctcactcctaagatgcttatttatagttacagattctgccatcagattctatttcctcctgggtcctctcacataactgtagcaggtgaacawgatatgaaaaatctcaaagaaccacactcccgaatgggggctgtaagatgtgtatgttgatatctcacaatgcagaaaatgccttttgttagttttctgtacattctttatccaaactccggcccttatttgtaaatccgaagcagagcccagaccttatctgcagattctaggt

SEQ ID NO: 733559 - DNA, 616 bp, Homo sapiens
catacactgagacagaagcagaattaaccactcttgtcagcctgacacaattctgcattgtacatcctcaaatgcctcaaagacacctaggtgattttgagggaattcccagtgaccctgggctgatagtccagtgataagccactctggagagactcaggctgattctaaatagaaaatggaactgccttggtggaactccagaacctggatcatttgtccttatttgctagctcttggataaaagaaagaacaaaaatactaatttttcaggtaaaatacaaaaatcacattttaaaggcaaatatagttgtggtcatggctctggatgttttgcggccttgatctctcactcctaagatgcttatttatagttacagattctgccatcagattctatttcctcctgggtcctctcacataactgtagcaggtgaacaaratatgaaaaatctcaaagaaccacactcccgaatgggggctgtaagatgtgtatgttgatatctcacaatgcagaaaatgccttttgttagttttctgtacattctttatccaaactccggcccttatttgtaaatccgaagcagagcccagaccttatctgcagattctaggt

SEQ ID NO: 733560 - DNA, 596 bp, Homo sapiens
tacatcctcaaatgcctcaaagacacctaggtgattttgagggaattcccagtgaccctgggctgatagtccagtgataagccactctggagagactcaggctgattctaaatagaaaatggaactgccttggtggaactccagaacctggatcatttgtccttatttgctagctcttggataaaagaaagaacaaaaatactaatttttcaggtaaaatacaaaaatcacattttaaaggcaaatatagttgtggtcatggctctggatgttttgcggccttgatctctcactcctaagatgcttatttatagttacagattctgccatcagattctatttcctcctgggtcctctcacataactgtagcaggtgaacaagatatgaaaaatctcaaagarccacactcccgaatgggggctgtaagatgtgtatgttgatatctcacaatgcagaaaatgccttttgttagttttctgtacattctttatccaaactccggcccttatttgtaaatccgaagcagagcccagaccttatctgcagattctaggtaggatccacctggctctgcatcctttggtgttacagcaag

SEQ ID NO: 733561 - DNA, 587 bp, Homo sapiens
ccagctcctgtggttctgcagtaccaagtggcagcccctgggatcctctgctcatagactcatggttttcaagggatagctttagggtgtccttctcctagacctcaaatgacctctccctgtctgtgttccgaactccatcctggacccttctttgctttgggccctaatttgtgtctggttgtccacaggtaggtcctctctgctctttctttcagagtgaaagaatcaaagtatccctggaaggcacaacaccactttgcaagcataaattccctaatcatagttgcccttaataataataataatgccctaaaatataatcatctactagatatgatgtgggcattgagctaaacattttttacatcaaactcaatctcagaaagactggtgktgttagccacattgtcggccagtgaaactgaggctcgaaggagaaataacttgctcaggtcatacagttagtttgtagctgagttgtgactaaaacccaggtctctcggattccaaagcttgtgctcagaacccctgcagtgtacaaagtacccaaatagtgcccattacagatcaacttccgagaactg

SEQ ID NO: 733562 - DNA, 621 bp, Homo sapiens
acattgactggttaatgtagcctgtttctttttagtgctgaataatattctattgtctggatgtgctgcagtttatttatccactcgcctcctaaaggacatcttggttgcttccaggttttggcaattatgaatgaagctgttataaacatacatgtgcaggtgtttttgtggatatgttttcaactccttttagtagatactgaggactgtgatagctgggaggaraattttttttattatttgaaattttgtttttgaactaaaatggtttttaaggaataaaaagaggaaaattgttgtgctgggatctctgcgtgtctcagcaggttatagcaacactgtccacaacagcatcagacactcagccagatgtgagtcgagttgcctcccgtgtagctgggagcagactcaattgcagagctggtgtcttatactcgtagagctcctctatcctccttgaaccttcaggctctgtctccatgcttctcacacaatgatctcctttgcacaacctcagagcacaacagtgcttcttttctgcacagagcactcccctgtctggacttttgtcgtcctcagccttgcctttttctctccaaatgtagcagagcagttggc

SEQ ID NO: 733563 - DNA, 542 bp, Homo sapiens
tacatgctgtgcctagagtatgaaaagaaatgaaattggaggattctcacatcacactatgaaatctttgtcacttgtttcagtttagagatatgcaaagtcactgaaaagaagcaagttggatcccaggtctggagtatggctttaacctgtctaaaaagaatgtgtctatttacaagggtcttggrcagcctggaagcccaggaaaaaggtaatcccagaggtcaaccattccagccgttgagcaattgcaattgatcacacatacactcatggagttccagtgggaccccgatgagaagggcattgtggtaaacttgagcttcataatgctgcagctgcagcaatttggggaacactgagatctctccatggctcttccgagcctctcaaaaacatttaacacaatcatcaggattagggacctgacagccaagaggtaagtttggcagccctgaggcatttgcttttaacaagctcccatgatgatgtcaactccccaatttatatctctagccctcttgcttgaacttcagactatt

SEQ ID NO: 733564 - DNA, 610 bp, Homo sapiens
tcctgtaggaggccacttagctcccagctcctgtggttctgcagtaccaagtggcagcccctgggatcctctgctcatagactcatggttttcaagggatagctttagggtgtccttctcctagacctcaaatgacctctccctgtctgtgttccgaactccatcctggacccttctttgctttgggccctaatttgtgtctggttgtccacaggtaggtcctctctgctctttctttcagagtgaaagaatcaaagtatccctggaaggcacaacaccactttgcaagcataaattccctaatcatagttgcccttaataataataataatgccctaaaatataatcatctactagatatgatgtgggcattgagctaaacattttttacatcaaactcaatctcagaaagactggtgktgttagccacattgtcggccagtgaaactgaggctcgaaggagaaataacttgctcaggtcatacagttagtttgtagctgagttgtgactaaaacccaggtctctcggattccaaagcttgtgctcagaacccctgcagtgtacaaagtacccaaatagtgcccattacagatcaacttccgagaactg

SEQ ID NO: 733565 - DNA, 622 bp, Homo sapiens
acattgactggttaatgtagcctgtttctttttagtgctgaataatattctattgtctggatgtgctgcagtttatttatccactcgcctcctaaaggacatcttggttgcttccaggttttggcaattatgaatgaagctgttataaacatacatgtgcaggtgtttttgtggatatgttttcaactccttttagtagatactgaggactgtgatagctgggaggaraattttttttattatttgaaattttgtttttgaactaaaatggtttttaaggaataaaaagaggaaaattgttgtgctgggatctctgcgtgtctcagcaggttatagcaacactgtccacaacagcatcagacactcagccagatgtgagtcgagttgcctcccgtgtagctgggagcagactcaattgcagagctggtgtcttatactcgtagagctcctctatcctccttgaaccttcaggctctgtctccatgcttctcacacaatgatctcctttgcacaacctcagagcacaacagtgcttcttttctgcacagagcactcccctgtctggacttttgtcgtcctcagccttgcctttttctctccaaatgtagcagagcagttggct

SEQ ID NO: 733566 - DNA, 543 bp, Homo sapiens
tacatgctgtgcctagagtatgaaaagaaatgaaattggaggattctcacatcacactatgaaatctttgtcacttgtttcagtttagagatatgcaaagtcactgaaaagaagcaagttggatcccaggtctggagtatggctttaacctgtctaaaaagaatgtgtctatttacaagggtcttggrcagcctggaagcccaggaaaaaggtaatcccagaggtcaaccattccagccgttgagcaattgcaattgatcacacatacactcatggagttccagtgggaccccgatgagaagggcattgtggtaaacttgagcttcataatgctgcagctgcagcaatttggggaacactgagatctctccatggctcttccgagcctctcaaaaacatttaacacaatcatcaggattagggacctgacagccaagaggtaagtttggcagccctgaggcatttgcttttaacaagctcccatgatgatgtcaactccccaatttatatctctagccctcttgcttgaacttcagactattg

SEQ ID NO: 733567 - DNA, 501 bp, Homo sapiens
aaaccccctctcctccgagccttctctaatcagaaggagtcattggtttcccttttcaaaggagcctgtctacttggcctcatcccagggtcgagagtagctcaatgattaaattcagtgacagaatgtagcagctcttcctgctggaacctttccagactacttccaccacagccattaatttcttgaaattaatttttccttttatytaagcagtacacacatatctttaaaagttaatgacagaagtctcctatgaaaaaacagcagtctcctgccccatccactcctttattcttattaagtttttttctttgccgtttatctctatttttattctatttgatatgtgcgtatcattggtttgaggcatcaattttaaactttatcttttggctttctcatgaactacaagagatataactttctttctgttctgatttcagatttatattttttatatattatttcattatattattttatattataaaatgttat

SEQ ID NO: 733568 - DNA, 501 bp, Homo sapiens
aaaccccctctcctccgagccttctctaatcagaaggagtcattggtttcccttttcaaaggagcctgtctacttggcctcatcccagggtcgagagtagctcaatgattaaattcagtgacagaatgtagcagctcttcctgctggaacctttccagactacttccaccacagccattaatttcttgaaattaatttttccttttatctaagcagtacacacatatctttaaaagttaatgacagaagtctcctatgaaaaaacagcagtctcctgccccatccactcctttattcttattaagtttttttytttgccgtttatctctatttttattctatttgatatgtgcgtatcattggtttgaggcatcaattttaaactttatcttttggctttctcatgaactacaagagatataactttctttctgttctgatttcagatttatattttttatatattatttcattatattattttatattataaaatgttat

SEQ ID NO: 733569 - DNA, 623 bp, Homo sapiens
tggattgccaaaggatgtgaggtttttgcacacttaggtggatcttgttttccagatgaggctatgaaagcagagcttctatgctgggatcacttgtttcatgctaggcactgactgttctaagtgttttaactgccacatcacctcatgcacgagggagctactaatatccccatttcatgcatagagagactgaagtacagaaaggtaaagcagcttgctctatgtcacacagccaagaaatggtcatactgggatgggaaactggtagtcaggctccagggaactccaatacatgctgctataccaaccatctggacacataagagctagtctgtgttctcatttgtgaagggactgccaggaatccctgcctgacagggagcaagggagagaatgcacatgaaagcacttggtaagttgcaatgtgcaccataaatgttagctgttactgataattattataacctgcagktcaggattctagctgggggcctgtggccgaggctacccagcttgtcattctctctccagctacagctcgggctgcaagaaggggaaagggtgttattagcaccgattcttggaattccaacgtggtatgaataaggaatcaattacag

SEQ ID NO: 733570 - DNA, 592 bp, Homo sapiens
cacagcctctggacaccaagggcctcatccatcagataaagaagttggagcttcaggggtctgtgagttcacatacagcatccaagaacatggagggacagcaataggcccagaaagagacccctcacgtgactaccacggtctcatcacaagtgattttgatcattgtcagacatcctgtgcctttccacagaataaagcacaggctgtgttgagaagaacagargggaattgagcctttgatcctcttgtaatctgtgtgagaaagatcatggaacacctctgtgacattcaacaatactcatgccaggtaagcaaagatgaatgacgtgcatagttcacttggaggggagacagagaggtaaatgtatttaatttcactgtgataggggttatgaaggtgttacgcatggaaactgactggaggtggctgtgcagagaagagaggctcaggagggtttcccagagaaggggacaactgggctcaattgtgactacattagctaagtgaggtgtgcattgagaggaggggaaagaaagtcaggggagggtgctctaggaaagagtacagcacgaataaaggcttgcagca

SEQ ID NO: 733571 - DNA, 592 bp, Homo sapiens
cacagcctctggacaccaagggcctcatccatcagataaagaagttggagcttcaggggtctgtgagttcacatacagcatccaagaacatggagggacagcaataggcccagaaagagacccctcacgtgactaccacggtctcatcacaagtgattttgatcattgtcagacatcctgtgcctttccacagaataaagcacaggctgtgttgagaagaacagaagggaattgrgcctttgatcctcttgtaatctgtgtgagaaagatcatggaacacctctgtgacattcaacaatactcatgccaggtaagcaaagatgaatgacgtgcatagttcacttggaggggagacagagaggtaaatgtatttaatttcactgtgataggggttatgaaggtgttacgcatggaaactgactggaggtggctgtgcagagaagagaggctcaggagggtttcccagagaaggggacaactgggctcaattgtgactacattagctaagtgaggtgtgcattgagaggaggggaaagaaagtcaggggagggtgctctaggaaagagtacagcacgaataaaggcttgcagca

SEQ ID NO: 733572 - DNA, 622 bp, Homo sapiens
aattggaaataaggcaagcatatccactctcatcactcttattcaacacgttgctggaagttgtagccagtgcaataaggcaagaagaagaaataaaaagcatgtagattggaaaggaagaaatataagtatctctgtttgcagatgacattattgtctaagtggaaaatcccaaggaacctaccatctattaggacctcttggacctaataagtgaactcagcaaattcacaggatasaagataaacatacaaaattcaattgtattttgatatactatcaatgagcacatggacagtaaaattaaaatacaatgccatttatgattcctccaaataaaatatttaggtataaatctaatgaaacatctacaggacttatatactgaaactacacaatgccgatgaaagaaatcaaatatctaaataaatgaaggggcaggatgtcaattttctttaaattgatatataggtttaatgcacttcatatcaaaatcccagcaagactttttatagaaatagacaagagtacttgaatatttacatagaaaagcctataatctatttcaagagttattatatagtcatagcaatcaggactgcatggtatctttgaagagata

SEQ ID NO: 733573 - DNA, 613 bp, Homo sapiens
taagtatctttgcagcaattagtaggtgtgtacttagaagataggttaggcacagtggctcaggcctgcaatcccagcactttgggaggctgaggcaggcagatcactcaggagttaaagaccccgggcaacatggtgaaacttcatttctacaaaaaaatacaaaaattagtcaggcatagtggcacacccctgtggtcccagctactcaggaggctgaggtgggagggtcacttgaacctggcaggtagacattccagtgaatcacagtcacgccactgcactccagcctgggggacaaagcaagaacctatcgaaaaaaataataataattttttatcctaggttcacacaataaaagcaataaaaggatcagtgmggatgggatgagttgtcattgtttcttctttggaggaatcctacattgatgatcacttcacaaagagatcatgttaaacactacattctatgagtctttcactgttcagagcatggaaaatgtgtggcatgtcataaaagttaaggcaattcgaagtgttaacaaatccaaaatttctaaggcttaagacaagagaagtttatttcttgtccagtcactaattggttatgagag

SEQ ID NO: 733574 - DNA, 616 bp, Homo sapiens
acctagaagaggataaatcaagtaaccttaaattcatgagaactgcttttgtttctagcagcaatcagagggttgagaagatgtgggctggatgaggagccaaggtactgtatactaatgctaggactgtcctaggccccaggaaataagaagaggaactcggccaacaacggggcagccctgaatggagctcacggtttagcaaaggaggctgatttaagggagtaggcctacactgtgacttcctggcagtgctgaccttggaattgcccaagaatcagagatagccttaaaattgtgacaaggcaacgagggagaagtacaaggcccagaggaaaatgggttggtcgatgtttggtggcataaggactcccacaacatccatctgcagaacctcagaggagtcartaggaacccttagaattaatcacaggaatgagtgttgccattttccaggtctctatgatatgcttgtggccaggcacttcccatacatcatctcacttaaaataagggtcagacacttgacactccacttttgaaaggttgatgacccataattagagtgtgcgggaggggtccctacttaaagtttggatacagaacatgctttcat

SEQ ID NO: 733575 - DNA, 616 bp, Homo sapiens
taagtatctttgcagcaattagtaggtgtgtacttagaagataggttaggcacagtggctcaggcctgcaatcccagcactttgggaggctgaggcaggcagatcactcaggagttaaagaccccgggcaacatggtgaaacttcatttctacaaaaaaatacaaaaattagtcaggcatagtggcacacccctgtggtcccagctactcaggaggctgaggtgggagggtcacttgaacctggcaggtagacattccagtgaatcacagtcacgccactgcactccagcctgggggacaaagcaagaacctatcgaaaaaaataataataattttttatcctaggttcacacaataaaagcaataaaaggatcagtgmggatgggatgagttgtcattgtttcttctttggaggaatcctacattgatgatcacttcacaaagagatcatgttaaacactacattctatgagtctttcactgttcagagcatggaaaatgtgtggcatgtcataaaagttaaggcaattcgaagtgttaacaaatccaaaatttctaaggcttaagacaagagaagtttatttcttgtccagtcactaattggttatgagagcag

SEQ ID NO: 733576 - DNA, 616 bp, Homo sapiens
aaataaggcaagcatatccactctcatcactcttattcaacacgttgctggaagttgtagccagtgcaataaggcaagaagaagaaataaaaagcatgtagattggaaaggaagaaatataagtatctctgtttgcagatgacattattgtctaagtggaaaatcccaaggaacctaccatctattaggacctcttggacctaataagtgaactcagcaaattcacaggatasaagataaacatacaaaattcaattgtattttgatatactatcaatgagcacatggacagtaaaattaaaatacaatgccatttatgattcctccaaataaaatatttaggtataaatctaatgaaacatctacaggacttatatactgaaactacacaatgccgatgaaagaaatcaaatatctaaataaatgaaggggcaggatgtcaattttctttaaattgatatataggtttaatgcacttcatatcaaaatcccagcaagactttttatagaaatagacaagagtacttgaatatttacatagaaaagcctataatctatttcaagagttattatatagtcatagcaatcaggactgcatggtatctttgaagagata

SEQ ID NO: 733577 - DNA, 598 bp, Homo sapiens
acctagaagaggataaatcaagtaaccttaaattcatgagaactgcttttgtttctagcagtaatcagagggttgagaagatgtgggctggatgaggagccaaggtactgtatactaatgctaggactgtcctaggccccaggaaataagaagaggaactcggccaacaacggggcagccctgaatggagctcacggtttagcaaaggaggctgatttaagggagtaggcctacactgtgacttcctggcagtgctgaccttggaattgcccaagaatcagagatagccttaaaattgtgacaaggcaacgagggagaagtacaaggcccagaggaaaatgggttggtcgatgtttggtggcataaggactcccacaacatccatctgcagaacctcagaggagtcartaggaacccttagaattaatcacaggaatgagtgttgccattttccaggtctctatgatatgcttgtggccaggcacttcccatacatcatctcacttaaaataagggtcagacacttgacactccacttttgaaaggttgatgacccataattagagtgtgcgggaggggtccctacttaaagtttgga

SEQ ID NO: 733578 - DNA, 459 bp, Homo sapiens
gacattttcaggaaactgaatccacaggctggagccttctgcttccccacaacccaaacggcccccagccagccaaacagccacgagaacccagctgctagcaactgccagcaggaaacccactaccagccgctcacagatggacagcccatcccaggagctggccccacctccccgcccctctsctgaccaacccagcagctccttgggtgggtgtggccaccctgctgccccaacctgctcccggaccctgtgccaggaggtgcttcgcctcagcggggccttgcctcccccagagccgctctgctgcctgaccttgcaatgtcatgggtcctctgggcaccggcgcagttgggtgggatcagctttggccagcaggtggggggcaggtgggtaaatcctccctctctgccatctccgcttccttcctcctgcccggcttccctgcctttttcctac

SEQ ID NO: 733579 - DNA, 459 bp, Homo sapiens
gacattttcaggaaactgaatccacaggctggagccttctgcttccccacaacccaaacggcccccagccagccaaacagccacgagaacccagctgctagcaactgccagcaggaaacccactaccagccgctcacagatggacagcccatcccaggagctggccccacctccccgcccctctcctgaccaacccagcagctccttgggtgggtgtggccaccctgctgccccaacctgctcccggaccctgtgccaggaggtgcttcrcctcagcggggccttgcctcccccagagccgctctgctgcctgaccttgcaatgtcatgggtcctctgggcaccggcgcagttgggtgggatcagctttggccagcaggtggggggcaggtgggtaaatcctccctctctgccatctccgcttccttcctcctgcccggcttccctgcctttttcctac

SEQ ID NO: 733580 - DNA, 640 bp, Homo sapiens
ccccgggtctgcggagccgagggcaggtctctggtgcgtaggttgctgggcctggctctctctcaagcttgtttgctgtttgggtcctcctctttggggccagggccacacgcacctctgcgacattagcttggtgcctgtgaggggctgggtatctcaggagatcgcagcaggtcctagcactaccctgttgcattcttcaaggactccccgcagcccagtgtctgtggagtggggcgtgaggtgctgcctcccatgttsctgcttagaaggacgcagccctggaaaccctcactgtggagtctctgagcccctcatccgcagagcagcagttgctgctgtttgcacagacagcaaatccggggcatgtttgtttagtaagattacctctgctggggcctggcccaagggacaggccaggcacagaggggtgggggctctgtgcatactgaacacccccccgagagtggctctgtctacagccggaccactctggaagtgacggcactgcgggcctggagggctggggcagtccaattgggcaccatgccctcacaaacaacacacacaccagcggtggggttgcgagggggcgctgagggaggatcctggctgccctgcttaagccctgcagcctgtg

SEQ ID NO: 733581 - DNA, 640 bp, Homo sapiens
ccccgggtctgcggagccgagggcaggtctctggtgcgtaggttgctgggcctggctctctctcaagcttgtttgctgtttgggtcctcctctttggggccagggccacacgcacctctgcgacattagcttggtgcctgtgaggggctgggtatctcaggagatcgcagcaggtcctagcactaccctgttgcattcttcaaggactccccgcagcccagtgtctgtggagtggggcgtgaggtgctgcctcccatgttgctgcttagaaggacgcagccctggaaaccctcactgtggagtctctgagcccctcatccgcagagcagcagttgctgctgtttgcacagacagcaaatccggggcaygtttgtttagtaagattacctctgctggggcctggcccaagggacaggccaggcacagaggggtgggggctctgtgcatactgaacacccccccgagagtggctctgtctacagccggaccactctggaagtgacggcactgcgggcctggagggctggggcagtccaattgggcaccatgccctcacaaacaacacacacaccagcggtggggttgcgagggggcgctgagggaggatcctggctgccctgcttaagccctgcagcctgtg

SEQ ID NO: 733582 - DNA, 584 bp, Homo sapiens
agtggcacagacacagagactaccagcgaggcagggatgtggccccagaaggtcctgagcttgcaaaggattgttctggctgtctcagccagctcttgctgttccacctgccccagaacctccgcatcagttgagggtcgtggggttggaatgtgtggcgaagtaggtctgtggcagtggagttgggccatgctgagcctgtgactgcccaggagagaattggaaactaaaaggtgcaaaagcagtcagagactccctaccaccccctcactgtgaacattggcccagcggcctctggggcagtcgctgtaaccatccrcgtggcatcctcggttctcagaggctgagacctccgtggctggagatgcttattttctgctcagttgttgttctgtagaacttatttctgtctacatcctgcctcatccctgagcctgccccacctggtccacattgcctttttttttttgataaagttttattgagatatgactgactagcggcacagttcacccatttaaagtgtatcattcagtaggtttcgtttcattcacagagttgagcaactgtcatcactacctaat

SEQ ID NO: 733583 - DNA, 584 bp, Homo sapiens
agtggcacagacacagagactaccagcgaggcagggatgtggccccagaaggtcctgagcttgcaaaggattgttctggctgtctcagccagctcttgctgttccacctgccccagaacctccgcatcagttgagggtcgtggggttggaatgtgtggcgaagtaggtctgtggcagtggagttgggccatgctgagcctgtgactgcccaggagagaattggaaactaaaaggtgcaaaagcagtcagagactccctaccaccccctcactgtgaacattggcccagcggcctctggggcagtcgctgtaaccatccacgtggcaycctcggttctcagaggctgagacctccgtggctggagatgcttattttctgctcagttgttgttctgtagaacttatttctgtctacatcctgcctcatccctgagcctgccccacctggtccacattgcctttttttttttgataaagttttattgagatatgactgactagcggcacagttcacccatttaaagtgtatcattcagtaggtttcgtttcattcacagagttgagcaactgtcatcactacctaat

SEQ ID NO: 733584 - DNA, 508 bp, Homo sapiens
ttatctgttgtggtgccatcttaaagtttctttctttttttttttagacagagtcttgctgttgttgcccaggctggagtgcagtggcgcaatctcagctcactgcaacctctgcctcccaggttcaagcgattctcttgcctcagcctccagagtagctgggaytacaggcacacaccaccatgcccagctaatttttgtaatttttgtagagacggagtttcaccatgttggccaggatgatctcaatctcttgacctcgtgacctgcccacgttggcctcccaaagtgttgggattacaggcgtgagccaccgtgcctggcctaaagtttctatcaagttgtccgggttcagcttaaagggcttcaggaaatgggaagttttaatttttagcggttccaggccagaagggtgggaaaaaaactggaaacatcagtttagagaaaatcaaatattggaggaaactagaagaattcaggatccaatccagtttgtaggtaaatatca

SEQ ID NO: 733585 - DNA, 508 bp, Homo sapiens
ttatctgttgtggtgccatcttaaagtttctttctttttttttttagacagagtcttgctgttgttgcccaggctggagtgcagtggcgcaatctcagctcactgcaacctctgcctcccaggttcaagcgattctcttgcctcagcctccagagtagctgggactacaggcacacaccaccatgcccagctaatttttgtaattttwgtagagacggagtttcaccatgttggccaggatgatctcaatctcttgacctcgtgacctgcccacgttggcctcccaaagtgttgggattacaggcgtgagccaccgtgcctggcctaaagtttctatcaagttgtccgggttcagcttaaagggcttcaggaaatgggaagttttaatttttagcggttccaggccagaagggtgggaaaaaaactggaaacatcagtttagagaaaatcaaatattggaggaaactagaagaattcaggatccaatccagtttgtaggtaaatatca

SEQ ID NO: 733586 - DNA, 534 bp, Homo sapiens
gtgtcatgaagtctgcccacaaattatctgttgtggtgccatcttaaagtttctttctttttttttttagacagagtcttgctgttgttgcccaggctggagtgcagtggcgcaatctcagctcactgcaacctctgcctcccaggttcaagcgattctcttgcctcagcctccagagtagctgggactacaggcacacaccaccatgcccagctaatttttgtaatttttgtagagacggagtttcaccatgttggccaggatgatctcaatctcttgacctcgtgacctgcccacgttggcctcycaaagtgttgggattacaggcgtgagccaccgtgcctggcctaaagtttctatcaagttgtccgggttcagcttaaagggcttcaggaaatgggaagttttaatttttagcggttccaggccagaagggtgggaaaaaaactggaaacatcagtttagagaaaatcaaatattggaggaaactagaagaattcaggatccaatccagtttgtaggtaaatatcaaaa

SEQ ID NO: 733587 - DNA, 508 bp, Homo sapiens
ttatctgttgtggtgccatcttaaagtttctttctttttttttttagacagagtcttgctgttgttgcccaggctggagtgcagtggcgcaatctcagctcactgcaacctctgcctcccaggttcaagcgattctcttgcctcagcctccagagtagctgggactacaggcacacaccaccatgcccagctaatttttgtaatttttgtagagacggagtttcaccatgttggccaggatgatctcaatctcttgacctcgtgacctgcccacgttggcctcccaaagtgttgggattacaggcgtgagccaccgtgccyggcctaaagtttctatcaagttgtccgggttcagcttaaagggcttcaggaaatgggaagttttaatttttagcggttccaggccagaagggtgggaaaaaaactggaaacatcagtttagagaaaatcaaatattggaggaaactagaagaattcaggatccaatccagtttgtaggtaaatatca

SEQ ID NO: 733588 - DNA, 680 bp, Homo sapiens
tgttttgatgcctaaaaagtcctcttagggaatattattttgaagccctttactatgctgttaatagtgcttggcttttaacttggtaccagggaattggaaggtttctgtcattttgtgacgatatttttaaatttctttgcaggtagaagaagaaaggtgccactccggcatgaagacagactcgcttagtcgccagtcacttaagctgagtgcattgtgatttccaataattgaggcagtggttctaaaagctgtctacattaatgaaaagagcaatgtggccagcttgactaagccgccagcgcacagcgcggcaggacgcgcccgggtctcagcggacttgtgcatgttagctgtgtagatttatgtgagggcttgtaaaactctggtcttgtaaactagtcttaagcgcttttaatatggagacagatkagagcccctctccgctcccgtgtgggcccgcaggagaagcggtgatggagagccgagctcgccccttccaagcgctgccccgtgagcagtctccaccacctcccctgcaaacgtccagtggtgcagaggtaatggacgttggctctggtggtgatggacagtccgaactccctgctgaggaccccttcaacttctacggagcttctcttctctccaaaggatccttctctaagggccgcctcctc

SEQ ID NO: 733589 - DNA, 583 bp, Homo sapiens
ctgattagatggtgcccacccagattgagggtgggcctgcctctttcagtccaccgactcaaatgttaatcttttttggcaacactctcacagacacactgaggaacaatactttgcatccttcgatccagtcaagttgacactcattattaaacatcacacctacctatcaccacatacaaaaattaattcaagatgtattaaagacttaagtgaaagattgcaaactaatcaaaatcctataagaaaacytaggaaatatccttctaaatataagcctgggcaaataatctgtggctatgtcctcaaaagcaattgctacaaaaacaaaaattaacaagtgagacctaattaactaaagagcttctccacagcaaaggaaactatcaaggaagtaaacagacaacctacataatggaagaaagtatttgcaaaccatgcattcaacaaaagtcaagtatccagaatctataagtaatttaaacaattgaacaagcaaaaagcaaataaccccattaaaaagaaggcaaaggacataaacagccacttctcaaaaaaagacatacaagaatatttatgaaaa

SEQ ID NO: 733590 - DNA, 583 bp, Homo sapiens
ctgattagatggtgcccacccagattgagggtgggcctgcctctttcagtccaccgactcaaatgttaatcttttttggcaacactctcacagacacactgaggaacaatactttgcatccttcgatccagtcaagttgacactcattattaaacatcacacctacctatcaccacatacaaaaattaattcaagatgtattaaagacttaagtgaaagattgcaaactaatcaaaatcctataagaaaacctaggaaatatccttytaaatataagcctgggcaaataatctgtggctatgtcctcaaaagcaattgctacaaaaacaaaaattaacaagtgagacctaattaactaaagagcttctccacagcaaaggaaactatcaaggaagtaaacagacaacctacataatggaagaaagtatttgcaaaccatgcattcaacaaaagtcaagtatccagaatctataagtaatttaaacaattgaacaagcaaaaagcaaataaccccattaaaaagaaggcaaaggacataaacagccacttctcaaaaaaagacatacaagaatatttatgaaaa

SEQ ID NO: 733591 - DNA, 583 bp, Homo sapiens
ctgattagatggtgcccacccagattgagggtgggcctgcctctttcagtccaccgactcaaatgttaatcttttttggcaacactctcacagacacactgaggaacaatactttgcatccttcgatccagtcaagttgacactcattattaaacatcacacctacctatcaccacatacaaaaattaattcaagatgtattaaagacttaagtgaaagattgcaaactaatcaaaatcctataagaaaacctaggaaatatccttctaaatataagcctgggcaaataatctgtggctatgtcctcaaaagcaattgctacaaaaacaaaaattaacaagtgagacytaattaactaaagagcttctccacagcaaaggaaactatcaaggaagtaaacagacaacctacataatggaagaaagtatttgcaaaccatgcattcaacaaaagtcaagtatccagaatctataagtaatttaaacaattgaacaagcaaaaagcaaataaccccattaaaaagaaggcaaaggacataaacagccacttctcaaaaaaagacatacaagaatatttatgaaaa

SEQ ID NO: 733592 - DNA, 593 bp, Homo sapiens
gggagcagctgccatactctggcctcagtctgaaagtgggagcccttgcaggtatcagctgccctgctggtctaaggatctaattcctttgcttctcaagaccacctttaaccttccttctcaactattccaacgtttgatggccttgcctctcccctgaccaaaaaatgccagggctgaaaaggtccatgtccactgtggcctgtgggccttgggwccccgggtcagcaaggtagctcctcatgttccaggattgagggaaacagcccagaggctagaaggaagaggctgaggaccatgagtaagtgtgagagtggaaatctgttgggagcccgggtctgaggggcaggaagagactgaggatgcttgctggcaactgctcctagcaagggggtgaaggtggggaccatggccagccaaaggcacaggtgggccccaagcaggcaaaggatgtatattgatcaggcctctgctctctatgtaagggatgcggtccctgatattacagagctttagagtgtggcggagcagctctgaggcactgtcctggccccactctggttttggtggcccgagtcacagcttggcgcccc

SEQ ID NO: 733593 - DNA, 479 bp, Homo sapiens
aagcttggtgggggtagggcatccgccattactgaggcatgaataggcggttttcccctcatagtgtaaacaaaccctccaggaagttctaactgggcaaagcccaccacagctcagcaaagccactgaggccagactgcctctctagattcttcctctctgggcaggrcatctctgaaaaaaaggctacagtccgagtcaggggtttatagataaaaccccatctgcctgggacagagcacctgggggaaggggcagctgtgggcgcagtttcagcagacttacaaaacgttctgcctgtggctctgaagaaagcagcatatctcccagcacaacgcccgagccctgctaagggacagactgcctcctcaagcaggtccctgacccctgtccctcctgactggagaaacctcccagcaggcatcgacagacacctcatacaggagagctccagctggcatctggcaggtgctgctctg

SEQ ID NO: 733594 - DNA, 621 bp, Homo sapiens
cactgtctcagccccaaatctccttaagctgataaacaacttcagtgaagtctcagaataaaaaatccacgtgcaaaaatcacaagtattcctataaaccagtaatagccaaatcctgagtgaactcccaatcacaattgcttcaaagagaataaaatgcctaggaatagaacttacaagggatgrgaaggacctcttcaaggagaactacacaccactgctcaaggaaataagagaggacacaaacaaatggaaaaacattccatgctcatggataggaagaatcaatatcgtgaaaatggccatactgcccaaagaaatttacaaattcaatgctattcccatcaagctaccattgacttcacagaattagaaaaatctactttaaatttcataaggaaccaaagaagagcccatatcgccaagacagtcctaagcaaaaagaacaaacatggaggcatcatgctacctgacttaaaactatactatgaggctacaggcaccaaaacatgggactggtaccaaaacagatatactgaccaatggaacagaacagagacctcagaaatcaccacacatctacaaccatctgacttttgacaaggctgacaaaaacaagca

SEQ ID NO: 733595 - DNA, 630 bp, Homo sapiens
tgaacttagccaatgattttcaactacatagaacaaaaaattttttcaaatgtcccacgtttatttacatatgaaatgtgtttcatacagttatgatggatggagtgtataacacctgacagcagcaagacctttcgaggaactgaacattgactacagtatatcatgcaagtacctacatatatacacaaaagaattccttttcttaaaaaaaaaagtacaaaacatgttcagggataaatacaagatataagatgcaaaagaaaacacaagacgaaaccaaaaaatataactctctcagagaactataaacagaagggacagaagagtacctctactgcattttagtaaagcagaactaccaacattaaatatacctcttgaaatggctgaactaatcccatgtggctcagtgcttaaggtaacggccaattgcgatacacagccggctgcattgataagtcggtggttgaygtcgtgcatcccaactctaagcaccagaacgtttggcagtaacacccagaacaggaaacgccaactcttttgaaaacaaaggattaagtcagctgatttttttttctatcaagagccagagaaatacttgatattcttagttgtgtttctgtaata

SEQ ID NO: 733596 - DNA, 571 bp, Homo sapiens
aggaggccatcctacggtaaaggacatgtgataaacagaaaatcagggccaaactcatccttggttccaaagcccactcacacaataactagcctgttcgccagataatgctatcaatcccgccatgagggtgcacactcacgattttatggtttctaagtccacagtcaacgttggctaattcacatrcatatgtttatatatcaaaaccatggcagcaggcaagggaaaaagaaggaattggagttagaaaagagtaataactgacttctcaagtagtctggcataaatcaaatgagggcctaaattacaatggcacaaaaagaatagatatgcacacacacacgcacacagaaaatctagagaaacattaacacacactatatacttcagtattttctcactttttctcagttattttaaacttggattttagttggcaaagattttcttcattacaattcatacctagagagctcagtaaccatgatcacaattatttgtgtcctcacttgcgcaataaacttcacatattttactcatggattgtatcactgtaggcacatggtag

SEQ ID NO: 733597 - DNA, 466 bp, Homo sapiens
gagatcatacataatcttaaaataccagcaacagtaaggtcataattacccctaacataataaactatccttcctacaactggaaatgcaccaatccccaacccaaatactattacataaagtaaacaatacttaaatgctgatatgaggtsagcaaatctatgttacctgataaagaaaagggaaatgaaatgaagatattttcttagtacaagtgcatacatgcacaaacatgtttttaacaaaagaagaaggaaatactcatgatagttccagtcctcatttctgcagctggtcaggtggtcgtagctggtattgataactactttcttccacttttcattctgtattccctttgccttcagcaagcacctcagcaggtcgtgacccagagaggatctggaccatttgtagtcctacctggattgggtatagtttcccatttaccttaatcagagtgcatgat

SEQ ID NO: 733598 - DNA, 564 bp, Homo sapiens
ggcaagtccccatgaggtcatcagtgcaggccgtgggagagaaggcagggtggcaggagtagagaccgtgggcaattgagccacttcatcatgtaacttacttgtgccccccaggacctgcttgagcccaatcacttatacaccatttccatgtgatgatggaatgctgctgtgcatgacccacgttatggctagatgagtcagaaagcacccagttcaygataggcagttcaggtcgcatggtgacttgttgactcatagtcaaatgttcagtttccacaaaagcccagtataggacaagagctgtctctcaaaaggagagtagttaactggagaagatgaccgggccttgctgcaaaatactagaggcctccaccatgattcacctatggaggcctgccaaagcctcaaagcagcattcctatctgccatggacacctcggggagacccagcctccccttcattcaaggggttctgggtctgtaaactggctcaaggctggaaattgattgaggggccatgaatctctgtttttataatgccaattagtcttttatctgttt

SEQ ID NO: 733599 - DNA, 617 bp, Homo sapiens
atatatatatatatatatatgggtttattacatattaacttacaggatcacaagatcccacagtaggctgtctgcaggcatgaggagtgaggagtaaggagagccagctcgagtctcaaaactaaagaacttggagtccgatgttcaagggtaggaagcatccagcacgggagagagatgtaggctggggggctgggccagactcactttttcacttttttctgcctgctttatattcactggcagctgattaaatggtgcccatagattaagtagggggtctgccttccccagactactgactcaaatattaatctcctttggcaacaccctcacagacacacccaggagcaatgcttacatccttcaatgtaatcaagttgacaatcagtattaactatcacaggattacagacctgagccatcacacacagtgttattstatatttcataccatttcctgattttcccattttatctgtgacttaataaagtttttcagctatgactccaaactggtaatacttgaaagcacattcagatatattttgcaacaattcataactggcaaaatgttgagccttgtggaaagagtcaccttacttccccgtcagctg

SEQ ID NO: 733600 - DNA, 599 bp, Homo sapiens
tacagaacatatttttggagtgaattttcaaaattttaaatcaacctaagactaggttaaataatatatttatacttgtattaggagtgcataggaaagcatcatttttggcagaaaatttacaagaaattacaataaagttgtagaatgtggggctgtcagaaatttcagttagtctcaaaggaatttgatgagtgtaaaagtatttagtgttataataacaatgtctctgtcagtgtgaarttgcttcttttttgaaatgatataaaaagaatttatcagaagcatctttaataaattcaatagaatttactaacaaacttaagacattgttcctaggagtaaaaggaaaaacaattctctgaagatgcacaaagatgataactgtgtcacacatagatctgccattatccagagctatgggtctctttaagacccaggggctaaatgggctgcaccttattcttggcgtgatgatccccatattctatcccctttcctgcctttggtataatttcttatggttctccagcatggagagctgactagtaataccaggtctcattatttcaactaaaatctctgtttcactcgctgac

SEQ ID NO: 733601 - DNA, 599 bp, Homo sapiens
tacagaacatatttttggagtgaattttcaaaattttaaatcaacctaagactaggttaaataatatatttatacttgtattaggagtgcataggaaagcatcatttttggcagaaaatttacaagaaattacaataaagttgtagaatgtggggctgtcagaaatttcagttagtctcaaaggaatttgatgagtgtaaaagtatttagtgttataataacaatgtctctgtcagtgtgaagttgcttcttktttgaaatgatataaaaagaatttatcagaagcatctttaataaattcaatagaatttactaacaaacttaagacattgttcctaggagtaaaaggaaaaacaattctctgaagatgcacaaagatgataactgtgtcacacatagatctgccattatccagagctatgggtctctttaagacccaggggctaaatgggctgcaccttattcttggcgtgatgatccccatattctatcccctttcctgcctttggtataatttcttatggttctccagcatggagagctgactagtaataccaggtctcattatttcaactaaaatctctgtttcactcgctgac

SEQ ID NO: 733602 - DNA, 552 bp, Homo sapiens
cagcgcagagaagggtgactgctctgctgttaaaacaatttattttgctcttcaaaaagctaacagctgtttacagtcagcatgtgggagctgccccctgggtgatggattctgccaatccagccctcccttgccttccggcgaggaggggtcatcccaggcttcgggtcaggatgggcagagcagaccactgggggccaggccatgatgttcctggccactccaygtcccctcggctgccgtcctgtgtgctgccctgggagagtgcaaggaagggtggccccctgaggctgatacgaaatggtacggtgatgtgagggggtcaggagggaggaccactgtgggaggcgtgaggtgcagtggaaaggtcagggagaccttctgagaaggccagcagggagggctgcccagggcctggagagcgtgcatagctgggggcagggtgggggcagccggcaagggcaaagcccagtgggtgtggcgatgccctgggggatgggccccgatgcccctaaactggttcggctctctagaccagactagtgtgctatg

SEQ ID NO: 733603 - DNA, 528 bp, Homo sapiens
cccaagcgctcctgatgcctgctcacccttcttgtctttgttagcgccccgttagcagaggcctgcttaacttgtctctggtcttgcttctcaggagccgtgtcacattcaacagtggcagcacagaggccctgctcagccccagtccctcaccctaggcctccactgccagatgtggtcctggtggtcctgcggactcaagctgtccccccctgcccaaccttcacaggccaccagcaagtcccaggcctcccacaggcatggctctgggcagtatctttaccttcccagcctcagtttccctgatggtgaaacagggtgagatctacttcctagcagagaatccgggggaatggaggccrtgggaggaagaggacttgaggaaaggagcattcctgaggggtcccagagcgggctggggctgacaggactgagtttgcagggcctggggacattccctggggaggtgctaagatgccggtcagctagagcagcggggagtgatccaggatggctgcccggatgagg

SEQ ID NO: 733604 - DNA, 596 bp, Homo sapiens
cctgtagaaaacagtgtggtgggggatgctcggcctgcagatcagacaggccagggtcaaagccccgaactaccacctgaactagtcctggccgagtggcgctgatgctctaggccgagggcccccttgacagaacagccatcatctagctccgccgcagggtaggggaggtggcagtgtgggccrcagccctcggctgaagcgggggccaagcggggctctgcctggtgcagggggtttcctctatggggcaggggctcccaaattagccctggtgacatctggagctcacctctgggggctctgggggctgagagagcaggcggggcccagttctatcaatcatctgccttgttcctgggggatcgcggtcagtcccagcctccccacaagtcctggggcggggcaggcctgctggaaacccaagatgcagagaagagcgccaagcacctgagacagggctctgagcacggaaggcaaggacgcctccctcagcctcagctggggagccagtggccctgcatgcactttctcccatctggggagcctgagccctgacccagtcccgaggcccatgtgtgcacaaaagcctcctg

SEQ ID NO: 733605 - DNA, 393 bp, Homo sapiens
ccatgaccataccactgcactccagactgggtggcagagggagacctggtctcaaaaaaacaaacccaaaaaatcatctgggaccatgggacatctgcctctagacttctccaaatgtgggataatgtagtatcttggtaatgtggcctactgtacatcaactattctgttgcctgaaggcaaaagcactgcacacatacaagaggctccccttggtgagagactaagcattcccacacaaatgtctctgtcycaaaccgatgacttgtctagaattgctttccatctggttctcaagatcttctccttacggctccctttgtccacaattagctcagtctagcatggctacaaatcagggaagagtcttcattattctacaagagacagttt

SEQ ID NO: 733606 - DNA, 527 bp, Homo sapiens
agttcgtccttctgcctacttgcagcttttcctaagtgtgctaagctatccaatatctttcttcttgcttttcactgtttttaaaatggatgtaacaaaagctgtaatttgaacattttcatttggtgtgggagccttttagtttcatgacctctgggatagcctgccagagagtgtatgtgcaggctaccattgcatcaataaatcaggctatacaaaattctagaagagtttgaaaattaacacagagaagttatttcaaaaagtaaaataattaattcaatggcttaatgtcagaaggcttagtttcaaagctagcactttatcatcytgtgaccttaagaactggttaacttttgcaactccattgactcaaatataaaatataaataacagtatccctgtgatccatgatgaaaccttgtatgcttaaatgatttaacagctatgaaaagcatgtagaaaactataaaaaactacaaatataagtctctaccccctactactgaaaatattaagactgaatt

SEQ ID NO: 733607 - DNA, 509 bp, Homo sapiens
ccatgtgtctttggtatttttaacatttttgctgcttctataatttgaaacctaataagattttcagtattatttctcagcttacctctctgttgagattactgctagagtcattatcttcctacatctttggaaataaaattctatattatgtacctgctastgaattttgaatcacaatagagttacttagtctatttctcagatcctcaatttgttaatttttcaaacaggtacaaaaattaatactaatctttctgttttagatatattcagtttttgctgataccattcattttggcaatttttattcttaattaactgaagtctattaaatctattttttctcattaaactaagaaatgaatattttagacataggaaactaaaaatattaaaatacagacaatagaaatcacacagagaaatacagataaactgagaacacaatttaatcagcatcactgcaaactacatttgtgttggttaatatcttacccaataaagat

SEQ ID NO: 733608 - DNA, 520 bp, Homo sapiens
gaaaagaagcaagaaaatgaaggacaaaaattgaatatactttttatgaagtctaaaagaaggcaagaaaagagagaaagaatgcatacaacagctaaagcaaatagaaggtagataataagatagtaaaatcaaacacaactatacaattaagataaatggacttatgctctaattaaaatattatggctgtcaaacttgattaaaaagaaaaaatccaactcttatttattaaagacatatataaaagcaaggaagcaaaatatttgaaagtagaagggtgataaaaaatatgcaaatattatcctccaaatggtggtaaatctatattagacaaaattgattttatataaactaataaaaatatggacaractttaaaataataaaactttgaactcacaaagaagatataacaattgtagtttgtatgtacctaataacacagcttcaaatacataatgcagtattaacaataacacattgcaaaaaaaggcaactacacaatcatagtgaataat

SEQ ID NO: 733609 - DNA, 625 bp, Homo sapiens
catagaaaatatttaataaatggtagcaattatcagtattgtcagagagaggctttataacacctgttatcagaccccaaggatactgactgctctcacttttaaactatcccagcttttctagagaaaaataatttgcaacatactatttatagaatagcatttatgtgatcatttgtatcccacataaaataacctaaatgacacctcatcacttccactatataaatctgcctttacactgatggatgtattattaccactcttgcctgcttcatcgcatcttttcaacataataccttaaaataagtaatatgttgtgacttttaggatatttgtgtttacttgtgtgagaaacaaaaagaaatggctgcattttatttggctttgcatttaaatgttattttagtgataagaattsctacaatatctgaaatctgaaattttctgccaacaattattatctatcatcactctgagatattgagaacactacaaacttcatttgtattactatactcaaaatagatccaaggcatatccctttcatactaccttaattccatgtaggatttctttgagtagttttatctgtttatctttgttctttctttggcttttctat

SEQ ID NO: 733610 - DNA, 624 bp, Homo sapiens
tgtaggatttctttgagtagttttatctgtttatctttgttctttctttggcttttctatttaatggaaaggagataaaagaatatttgacaaaatcggtaatacttttactgatatgtccacagctattttaaaaatatggtctattttctctatttttacttaagatttaatggagaaaagcatcttacaatatttatacattattctactgacaatkttggaagatagttataaataggtaacttgagcatagccaacaggcgaacagtagaatagtagaaaatatatttatttaaacctaatttgtttaaaatgaataataaaataacacccacatcctactaaaatagaacacatttctaaaaactccattaactgtttatgtacatacttagaagtgtcacaagaataaaaataaggctctctataaattttatttgttctttgggaattagaataattaaaatgtatattttcaaatacccttcctcttctttttataaatgttatgcaattgtatttttattcaaatatttaacaattatcataatattttatacttgtttgggtatcatttcttaagtgttttctccactaaattggcactttatatgtcataag

SEQ ID NO: 733611 - DNA, 578 bp, Homo sapiens
ccattttataggaggtgcaagataagactgtgcaaatgagcaggaagacatgaaggtttgtaagaaaaaaactgagttttcaatgcctagttaaggaaaactgggtgaaatactcagatttgcctaggaaatagaaaagtacaaaataagaggatcagatattcgcaaaaccttacaacaaagctagaattctgactygctgatttatcgtgctagctgggctatgaaagaaatacttttgttttccaggaaaaagaaaatcatgagacggtggaataaaaggatatctagattgagtaatgggtggggcatattctgtgccacaatactcaatgtttcggcttgttggaaagattcattctgttgatgctgtataagttttgcaggtatggcacgtcatcctttctggctggtggaggagagcctcataaacagaccgtgagggtgatgagtaaggttgaaagaaagaactgttttccacagttagttgggcatatacctgtcactatggcagagagaggagaatctctttcttcaagacaattgtaggttatgtttttatgaggggtgggagattg

SEQ ID NO: 733612 - DNA, 647 bp, Homo sapiens
aagaataaaagaatattcatactggcttcagacttcatctttgggacattttttcttatatatccattgatagtttttttttttcttttgtgaatcactggttaatgttacttgctattttcaaaactgaaagcttttagttacataactgactcatatatgatggttcttatttaaaagttcaaacaatactgaattatagagggaaaaataagtattttatctctccagcactcatcataatcataactctttagatcaaagctaaccactttcaaataatatactaggagtactaaaatgaatccttctgcatccattaactcttggagatgtatgttgttatgtaatacatacacaaatcaacaatttgcacaaagatgtctaatatagtattacacacagaggtgaaaaatattcaaatttctgaaaataaagtaataaaacaattttatgaaatgcagtttctttaggctgccttagcctarggtttaaaacatgatcatatcagctctcacaaactctgtcttgttcttgtccatatctgttagtggaaaaataggaggtggtcagcgaagagtgggattcttgaaatttaaatatggagaagttgcattttttgttgatggggccaagtcttacataca

SEQ ID NO: 733613 - DNA, 646 bp, Homo sapiens
cttggggtacgtggctggggtgagggttattttcctatccaggatgttactcttctcaaatgaaaatagaagcaaaaacattattaggattcatatagtatgttggactgatcaacactatcatttagagaatgttttgattatgtttcccaaacaaggtaaagtaattgagccaactattgttagattcagattccttgcagtaaaacttgttataaaggcttgttgggatcaatcattccaagtttttaacacagagagtacattagtttgcatctttatatactggttatgttatcyaattacaatataagtatgtatgtgttttcgtcaatccttatataacctgctggtgcgaagttggtattagaagctcaaaagaaaatttcacctggaaccagataatagattgcttgcctttacttgctatggcaggttctgcatgtacatgaggtaatttttgtgggttgggaatgattgatgtgaataaataaacttagcccacagctggggcattttgtaactttttagaactcattttgactaggcaaaataaaatcttcaccaagtacctcagcaaatctcagggcaaattggagaaaccgtactcactgaactcacctgggcttgaggtgtggaagcaaat

SEQ ID NO: 733614 - DNA, 646 bp, Homo sapiens
cttggggtacgtggctggggtgagggttattttcctatccaggatgttactcttctcaaatgaaaatagaagcaaaaacattattaggattcatatagtatgttggactgatcaacactatcatttagagaatgttttgattatgtttcccaaacaaggtaaagtaattgagccaactattgttagattcagattccttgcagtaaaacttgttataaaggcttgttgggatcaatcattccaagtttttaacacagagagtacattagtttgcatctttatatactggttatgttatccaattacaatataagtatrtatgtgttttcgtcaatccttatataacctgctggtgcgaagttggtattagaagctcaaaagaaaatttcacctggaaccagataatagattgcttgcctttacttgctatggcaggttctgcatgtacatgaggtaatttttgtgggttgggaatgattgatgtgaataaataaacttagcccacagctggggcattttgtaactttttagaactcattttgactaggcaaaataaaatcttcaccaagtacctcagcaaatctcagggcaaattggagaaaccgtactcactgaactcacctgggcttgaggtgtggaagcaaat

SEQ ID NO: 733615 - DNA, 646 bp, Homo sapiens
cttggggtacgtggctggggtgagggttattttcctatccaggatgttactcttctcaaatgaaaatagaagcaaaaacattattaggattcatatagtatgttggactgatcaacactatcatttagagaatgttttgattatgtttcccaaacaaggtaaagtaattgagccaactattgttagattcagattccttgcagtaaaacttgttataaaggcttgttgggatcaatcattccaagtttttaacacagagagtacattagtttgcatctttatatactggttatgttatccaattacaatataagtatgtatgtgttttcgtcaatccttatataacctgctggtgcgaagttggtattagaagckcaaaagaaaatttcacctggaaccagataatagattgcttgcctttacttgctatggcaggttctgcatgtacatgaggtaatttttgtgggttgggaatgattgatgtgaataaataaacttagcccacagctggggcattttgtaactttttagaactcattttgactaggcaaaataaaatcttcaccaagtacctcagcaaatctcagggcaaattggagaaaccgtactcactgaactcacctgggcttgaggtgtggaagcaaat

SEQ ID NO: 733616 - DNA, 646 bp, Homo sapiens
cttggggtacgtggctggggtgagggttattttcctatccaggatgttactcttctcaaatgaaaatagaagcaaaaacattattaggattcatatagtatgttggactgatcaacactatcatttagagaatgttttgattatgtttcccaaacaaggtaaagtaattgagccaactattgttagattcagattccttgcagtaaaacttgttataaaggcttgttgggatcaatcattccaagtttttaacacagagagtacattagtttgcatctttatatactggttatgttatccaattacaatataagtatgtatgtgttttcgtcaatccttatataacctgctggtgcgaagttggtattagaagctcaaaagaaaatttcacctggaaccagataatagattgcttgcctttacttgctatggcaggttctgcatrtacatgaggtaatttttgtgggttgggaatgattgatgtgaataaataaacttagcccacagctggggcattttgtaactttttagaactcattttgactaggcaaaataaaatcttcaccaagtacctcagcaaatctcagggcaaattggagaaaccgtactcactgaactcacctgggcttgaggtgtggaagcaaat

SEQ ID NO: 733617 - DNA, 595 bp, Homo sapiens
attaagtctccaaaaacaattgcaacaaaaacaaaatttaacaagtgacacctaattaaactaaagagcttctgcacagaaaaaaaaaaaacatcaaaagagtaaacagacaaactacacaatgggaggaaatatttgcaaactattcatctgacaaaggtctaatatcgagaatttataagaaccttaaacaagtcagcaaacaaaacaaatagccccattcaaaaatgggcaaaggacatgaacagacacttctcaaaagaagacatacatgtagccaacagatatatgaaaatatgctccacataactaatcattagataaatgsacatcataaccacaatgagatgccacatcacaccagtcagaatagctattattaaaaagtcaaaaagcaacaggtgctagcaaggtttcaaggaaaagggaagacttagacactgctggtggaaatgtaaattacctcagtcattgtggaaagcagtgtggaaagttcttagagcacttaaaacatcactaccattcaacccagccatcccatcccttattgggtatacacccaaaagaaagtaatcattctgccaaaaagacaatg

SEQ ID NO: 733618 - DNA, 553 bp, Homo sapiens
ttctccgtaaaacttaaccaccttctgatgctctgtgtccatttatgcctttatttaataatattgtttggtatctgccttttcttcctaaaatgtcatcaagaggacaaggactttcgagtcttcattgctctgtcttcaacctgagcacttctgatgatgctgtctctgtcactgatctcatgttactcctgtacccccactcyttgtactcaaaagtcacttgctgcttctcttccaccataagacccagtttgtcttcaccgcataataatggtgtatccttggtgactaaagatactcattgtggaaaccctggcttaattttgtgagagaaaattcccttacaacttttctcagctttccactgagaagtgttctggtgattttgacaggaaatggggggcagtgatgtggaattccccaatccaagaggatttctttaaaaagtcttttcctacagtgcactacaagtagaagaaaaccatctccgtgtaatttaacaattttttataaaaaaaatttatccattattagaatatagcaattaaat

SEQ ID NO: 733619 - DNA, 608 bp, Homo sapiens
aagtccagcggctgctagtgatatacagtgggccttctaatctgctgtgtggttatttcctcagtttcagaatgtatactgagaacagatatattcagcaagtggcagaatccacccattggtctcctggcaaagtaactaaggattattattataggaaagatcaaacggaagccagcaaaactgcctttaccaaccaatacagcaaactaaaaatattactgcattcctggagggattgcagagattactgcctacatcaacggcatgaaagatatgagggtaatgatgacttccatgtcgcattcaactcacctatgtggtgtatgcagaagacaatggattctggagattgagaatggattaygccaaaattaataaggctgtggctccaacagcagccatggttccagctgtaatttcattaataagacagaacacatgccctggcatctggcttcagctattgatctgctgaatgttttattctccatacccatgtacctgttattatagcataggggaatagtatagcacagtaaaagcagtttgctgagccagcaatgtatctttattctcccacctcagagctatatctactctctagc

SEQ ID NO: 733620 - DNA, 601 bp, Homo sapiens
tctatccccagtgacccagcataatatctgccgtataatggaaactcaaaatattttctgctaagcaagtgagtgaaggatggcattttgttgacctcagggaacttgctcaatttcaagacaagaccagatgactgtctcttagcctacctcctcagtttcaaaactaaacaaaatccttaatttctaaaagaatctaggtgatctaraattcagctgagttggctacaatccttttggctctaggtcagacccatatcagaagtattcatatccttctttggattggtttcatagatccaactctgtcctaaataactaggataaactagctttataggaaaacttaaaagactacaagttccagttaggttcagggaagttaatcaactttctaaagttgttcacagatttttatagatgtttctagagagaaagttcatagcattttattgaatgctcaaagagctaaagaatggcttacctatggaagaataagtaccactataagcctaatcccatttccatccccagggtaattttagggtcagaaccttacagccaagacaatctaaatatttcaagttacctttggagagag

SEQ ID NO: 733621 - DNA, 369 bp, Homo sapiens
ctatttttaaagggctattcatttaatctgagttttcccttattttcagctttttcctagcatataatagtcattaagcatgacatatccttcatatgatcactcatcttgagttaattagaaaatacctgagttcacgtgctaaagtcatttcactgtaataaactgactgtggtttcttaagaacatgacactaaaaaaaaagtgktttttttccaccgttgctgattattagacagtaggaaatagctgttttctttagttttacaagatgtgacagctttagtggtagatgtagggaaacatttcaacagccatagtactatttgttttaccactgattgcactgttttgtttttttaacagttg

SEQ ID NO: 733622 - DNA, 665 bp, Homo sapiens
actgcctggcaacatttatatttcttattcagaacccttgatgagactatttttaaacatactagtctgctgatagaaagcactatacatcctattgtttctttctttccaaaatcagccttctgtctgtaacaaaaatgtactttatagagatggaggaaaaggtctaatactacatagccttaagtgtttctgtcattgttcaagtgtattttctgtaacagaaacatatttggaatgtttttcttttccccttataaattgtaattcctgaaatactgctgctttaaaaagtcccactgtcagattatattatctaacaattgaatattgtaaatatacttgtcttacctctcaataaaagggtacttttctattaattggtggtcaagtatatctgtgttatgaagttctaaaagctaatttagcattgcaaaataacctcatttttaaaaaattagccttatatgcagtgttytatttatcaaatgatcttcacatctttcatttccaaattgttgaaatgtactaatgaatacaaatagacttcaagtaagcaaaaatgttcttaattttgaaaactgtaaaataaagtcacttaccttgggcaatatgctattttttaaaaatcagactcccagtttgtatattatgttattcaatag

SEQ ID NO: 733623 - DNA, 618 bp, Homo sapiens
gacattttctgagtaccccttgaatactaaaagtcctgtgttgaatgtgggagacccaggagaacaagatatgtgccatctgctcattaagtgcttagaatgttaacattgcttttaaattcttagccgtatttccacataacttgtcctgacttacactgcaaacaaatggtggtagaagaatttgcrgtcgaaacaccccaacctcttatttttctcccagtcaagagttactagaactattcaaccttcagctgtgttgaatagttttagtaactcttgactgggagaaaagctgtgtgattggttcgcattttcaaaagatgtctggaggaaaaaaaataataccagctttaactctgggaggtttgttttgagatgtaatttcttttgcaagtctgtatatgtattcaacttaatgtagcgtatgtttttggtttctttgtggcagggggaagagaattgtttttaatgtaggcctagggatttagaactgtcactgctatttgtgttgtctggaagcctgccaccaaatctgtattgccacaggcagttggggtagttttctgaaagctgctatgattgctaccattaattgcaaagtttaaaaagcggtga

SEQ ID NO: 733624 - DNA, 612 bp, Homo sapiens
ttcccctagggtttttatagttttgggttttacatttgagtcttaaactatcattaacatttttcacagaatttgaaaaaaaactacttcaaaattcatatggaaccaaaaagacaagtatagacacatatagccaagataatcctaagcaaaaagaacaaagcttcaggcatcatgatacccaaacttcaaactatgctacaaggctacagtaaccaaaacagcatggtactggtacaaaaacagacacatcraccaaggaacagaaaagagatctcagaaacaagaccgcacatctacaaccatctgacctttgacaaacctgaaatgatttcctatttaataaatggtgctgggagaactggctagccatatgcagaaaattgaaactggaccccttccttacaccttatacaaaaattaactccagatggactaaagacttaagtggattgatattttaaagggagaaacaagatgcaatgctatggaatgtttaaaagcactagctgaacccagcactagcatgagtagctgttaccttggacaagttaattaacctcatttttaaacatataccacaggataatcatagcacctacctcaaagagt

SEQ ID NO: 733625 - DNA, 657 bp, Homo sapiens
cactgatatatcctaggtgcacgtagcaggtactcaataaatatatgctgaatgaattaatgagtgaaaaggtaacaattttaaaactttcaaataacattagaatagccttactgatttgcatttgcactgcccaaatataattctcttaattcattttattagttttatattacaaaattaaaacatgcttattgagcatatttgattaattttcattaatacaaacttctaagaaactgagaaatatattcagacttagacatttaccayattaaatcattaaatagaaatccatggtggttgggaataaaacaaagctattgccttggaaaaagttacgttcatgtaactatctgatatctcaatcacatacatagatataaatgcagatgtagacatagatgtatatatgcctataaatacacacaggtagttaaatataagttaatttgcacagtggcctgcttcctgctctctgctaagcaacctcaatagagaaaaggtggcaaattggaatctacatctgatgaaatatatcatgcctaaatttaaaaaaaaattaatttggaccaagtttgtaggaacaattaacatgaattgacactaatgtggtcaagtaatggtacaaggaaatcaaactgtcgtcaaggttcc

SEQ ID NO: 733626 - DNA, 581 bp, Homo sapiens
aggtgtagtaatagtaacgcaaagctctgaacaccacgagacaattcgttgcttccgaaacgcagccggcagcaggtactcgagatgagtagtgtgagctcccgagcacccgtaggtcggattatctggtaaggcaccggaagtgaccgcctcgcggctgcttcctctcctggagtccagagtcccgttgctccgccgcgatattcagtaaaccactgggagtccggcagcatggaggcagcgcgccctcccccgacggcagggaagttcgtggtggtcggcggcggcatcgcgggcgtcacttgtgcggagcaggtagggcggtgctcaggcggttccgcctctttccccgacmccaaaggggatagcactggaggccttcctcccaccccctccctttttcttcttccgggttccttttttgctgcgcccttttccgcacttattgctcccagattttagaaactgcttggtggtcctcagatgacctcactagctttctcttaggcgcagggaggagtgggaggcaaattatagccgagaaaccaaagctggctgatccgtgctcagatccttgtaat

SEQ ID NO: 733627 - DNA, 554 bp, Homo sapiens
acgtccaggctggagacctaatcactatagaaggcatttaaagctataagattgcatgagatcaccaagagaatgagagtagatagagaaaatttccaaggaccaagtcccgggacactgctatgctgaagtttgggagcatgaggaggagacagaaaaragaattgaaaagggataggggagaatagagagtcccagaagtcaagaaagcatttcaaaggggcaggacaatcaattgtattagatgccactgataagtcaggcaaggagaggactgaaactaggagcttgtctgctgcctgagagaaaaatctgtgtcatcatcaatgtcatcatcatcatcatcaacaacaaatagatcactggaccaccattcaacaaatactaaaaactgggtcaatggtgggtcatcttgccaaagttctaagttttttctttttttaaaattccattgatacctcctaaagctagactggaaagtgggaatatttttattgttcacaaataatacataattatctctcctttgtaaaatcttccctttcccagcccca

SEQ ID NO: 733628 - DNA, 539 bp, Homo sapiens
caatggtgggtcatcttgccaaagttctaagttttttctttttttaaaattccattgatacctcctaaagctagactggaaagtgggaatatttttattgttcacaaataatacataattatctctcctttgtaaaatcttccctttcccagccccacccaactccaaatcttgatataaatgcaagattctgtatcagaaccaataactaattgagaatctcactatgcctggggtcccacaactgccaccagcaagttccgggaactgaaccatgtgggcaggagctgggagcagagtggtgggaatggggrgagccccctttacacatcacccttcacagtcaggtgctcaagctcgtccaggcttaagcttccagaccagggagaattattaatagcacttcttctttactctcaaaagtattccagattggacaatacattatattgtttcctgcctatttgattttttaaaatccttatttggcactaacttgtccccgtttctttttcccacttaaaaaaaagcccagtttt

SEQ ID NO: 733629 - DNA, 604 bp, Homo sapiens
tctctctctctctcacccctaggatccagtctgctggtaagtattgttctttctaccttcaaacatatcccagatctgaccatttttcacaagtttcatcctcatattgactggtttgtgcctggacaacaacacactcacaatttgtctgtctgcttccacttctgtctctgtgccgcactcccccccacaccattcactttctgtgattttttaaaaatttaatttygtcacatccttcccctgttcagaaatctacaacagcttcccgttgtacttcctgtggctcacagagccacacatttactctccggccttcctctccaattccccctcccagtacttccaccaggctcaggatgcttcgcttgtgtggactggccagttccttgcacagccttggggctctccatcaagactttgcccaggctgatgcgtccccctagagctctccccagcccctggggctggttcctccttaccctgcaggtctcagcttagaggtcacctcctcagaggcctttcctgaccactctgaccaaaacagccttcccatcgccctttccttctgcttctcatttcactacatattccttcaacactc

SEQ ID NO: 733630 - DNA, 604 bp, Homo sapiens
tctctctctctctcacccctaggatccagtctgctggtaagtattgttctttctaccttcaaacatatcccagatctgaccatttttcacaagtttcatcctcatattgactggtttgtgcctggacaacaacacactcacaatttgtctgtctgcttccacttctgtctctgtgccgcactcccccccacaccattcactttctgtgattttttaaaaatttaattttgtcacatccttcccctgttcagaaatctacaacagcttcccgttgtacttcctgtggctcacagagccacacatttactctccggccttcctctccaattccccctcccagtayttccaccaggctcaggatgcttcgcttgtgtggactggccagttccttgcacagccttggggctctccatcaagactttgcccaggctgatgcgtccccctagagctctccccagcccctggggctggttcctccttaccctgcaggtctcagcttagaggtcacctcctcagaggcctttcctgaccactctgaccaaaacagccttcccatcgccctttccttctgcttctcatttcactacatattccttcaacactc

SEQ ID NO: 733631 - DNA, 604 bp, Homo sapiens
tctctctctctctcacccctaggatccagtctgctggtaagtattgttctttctaccttcaaacatatcccagatctgaccatttttcacaagtttcatcctcatattgactggtttgtgcctggacaacaacacactcacaatttgtctgtctgcttccacttctgtctctgtgccgcactcccccccacaccattcactttctgtgattttttaaaaatttaattttgtcacatccttcccctgttcagaaatctacaacagcttcccgttgtacttcctgtggctcacagagccacacatttactctccggccttcctctccaattccccctcccagtacttccaccaggctcaggaygcttcgcttgtgtggactggccagttccttgcacagccttggggctctccatcaagactttgcccaggctgatgcgtccccctagagctctccccagcccctggggctggttcctccttaccctgcaggtctcagcttagaggtcacctcctcagaggcctttcctgaccactctgaccaaaacagccttcccatcgccctttccttctgcttctcatttcactacatattccttcaacactc

SEQ ID NO: 733632 - DNA, 611 bp, Homo sapiens
ataccaggtaccaggagatgtgttaatttgctcaagcaatgaaaccacatctggtacagaagctgcaattgaagttaccacttggttaagcttacagtaatcccctgttattctccaagatccatctgtcttctgcacaggccaaatgggagagttgaagagggatgtggtgggaatcaccacccctgtgtctttcagtccttgatggtggcactaatctctgcacaccctccagggatgcgatattgtttctgatttactatttttctaggtagagccagctctaatggcttccatttgacctttcccaccatagtagctctcacyctaccagtcagggagccgatgtgggggttctgccagctgctaagtatgtctatgctaattatgcattctggcactggggaaatgaccacaggattagtctggggaccctctggacccactgtaagtcagacctgacctgaaactccattaattatctgacctccataagtccttactttaacttgaggatcacaatgacgttttgggtcccctggaatcaacgtcatctcagagccaatgaccagtagtccccaaaaatctgatcatatccctttccccaatgc

SEQ ID NO: 733633 - DNA, 646 bp, Homo sapiens
acagtagatacctggagaggctgtgaatgcacctttcactgcaggtcagccactcgcatgataagagcttgtgtctgtttttccacaatttcagctctttgtcttcaggagataagactgtcactcagggccatcttagcagatttgatgctcagaatctgcttttgaagttgggagttagaatccctgagttcatcattttctttcatcactttgtccactgaacttaggagcaaccaaccgcttcattatgttccttggttccctgcatatggtcaaaggtattatgtacagagtcactaatctccttgcctgtcatgagcagtgaatcaggagtgtcaaatgcatttattttgcataactctctaaacagttcatgccaaggactatcagtgttctccatactattagaagtagagtccttagcatttyggggtctaatcatattaagcagccaactccagaaaccccaaaaccaatgaaagaactccatccttaatattctgttcctctagaaccactcctggtagaaaatctgtattagtgttctctagagggacagaactaataggatatatatatatatcctattacatatccatatatatatatatatatatatatatatatatatatatatatatat

SEQ ID NO: 733634 - DNA, 540 bp, Homo sapiens
aatttttcatgatgctctttactaagctgaattaccttctatctctagtcagctaagatattttatcataaatgggtgttgccttttattaaaagcctttctgaatgttctcaggtgactaaatgatttttttctgtattttgttcaggtagtgagtttaattaattcatttttgaatactgaacaaaccttacattctagaaataaggccaacctggttgtgatatattagctttcttatttatattgaattcaaattgctaaggttttgttaggracttttatgtcaatgttcatgagtgacactgatgtgtaatttattcttttgcaatgtctttgtcaagtttaggcaggagggtcacaattctaagctgacttggtaagtatttctataataccttctttattttgtgaatgagtttctctaagactggtattacatcttgcttaaacatttggtagaattcaacagtaaagccattggggcctggagttttctttgtaggaatgtttttgattataaattctatttctttttct

SEQ ID NO: 733635 - DNA, 558 bp, Homo sapiens
ccacaagaggagagattttgttaattttgttctccaaagcttagaaccttgcctggcttatcacagctgctcatgtggaatttgttaaatgaatgaagagacacatattcagcatgtacctgtgcactagtcatactgagggtgtttactgtgggatttagataactcgcctgcactaaaatgaactgtgtacaagtggcgtggctgcacaggagrgcacgcatcaggccaaggcctgcaggagtctgaaagagctcagcttacggttatggttgctgaccatgcccatcctttgttgctccctgaggttctagactctgctcatttcctctgacctcggtagtccctgtttctcctactataaagaatgcttaaagttttcttttttaaaaaatatggcacgtaatttctgaatatttgttggcagatatatttctttcaaactgccaaacatttttcctagctttacaacacactaacacacacaaacatacacttttttattcagcaacctcattgctggtccagggataacactggcatttactgattcataaa

SEQ ID NO: 733636 - DNA, 632 bp, Homo sapiens
actccctttaaaaactggcacaagacaaggatgtcctctctcactcactcctatttaacatagtattggaagttctggccagagcaatcaggcaagagaaagaaataaagggtattcaaacaggaagagaggaagtcaaattatctctttgcagaagacatgattgtgyatttagaaaaccccatcgtctcagcccctaacctccttaagctgataagtaacttcagcaaagtctcaggatacaaaatcaacgcaaaaataacaagcattcctatacaccaataacagacaaacagagagccaaatcatgagtgaactcccattcgcaattgctatagagagaataaaatatctaggaatacaatttacaagggatgtgaaggacctcttcaaggataactacaaaccactgctcaaggaaataagagaggacacaaacaactggaaaaacattctatgctcatggataggaagaattaagattgtgaaaatggccagactgcccaaagtaatttataaattcaatgctatctccatcaagctaccattgacgttcttcatagaattggaaaaaactactttaacttcatatggaaccaaaaaagagcccacatagccaagacaatctaagt

SEQ ID NO: 733637 - DNA, 589 bp, Homo sapiens
tgaactcccattcgcaattgctatagagagaataaaatatctaggaatacaatttacaagggatgtgaaggacctcttcaaggataactacaaaccactgctcaaggaaataagagaggacacaaacaactggaaaaacattctatgctcatggataggaagaattaagattgtgaaaatggccagactgcccaaagtaatttataaattcaatgctatctccatcaagctaccattgacgttcttcatagaattggaaaaaactactttaacttcatatggaaccaaaaaagagcccacatagccaagacaatctaagtaaaaagracaaaactggaggcatcatgctacctgacttcaaactatactacaaggctacagtaaccaaaacagcatggtactggtatcaaaacggatatataggccaatggaacagaacataggcctcagaaataacaccacacatctagaaccatctgatctttgccaaacctgacaaaaacaagcaatggggaaaagattccctatttaataaatggtgttggaaatagctagccatatgcagaaaactgaaactggaccccttcct

SEQ ID NO: 733638 - DNA, 681 bp, Homo sapiens
ccatttactttctgcctagagttttatatatattaaattttcacatagttactatagggaaggcaatattattatcacttatttccatacatggaataattaataaacatcggaaatgtgttgtaacgtgctcaggcagagcttgtaagtgattaaaatagatttcaaactcagttctattcaytactaaagtccatactttcacattcattcatatgtctaaatttattctgaaaagaaaaaatatttttacagcatattttgaaaaatagccattgaacaagatacaagttgtatggttagtcaaaatacttggcatagattctggtgtcttggagtagaaacaaaatatttttaatatatgtacatgcataaaactatcactcagaaacattttggggggatacgttataataatatttccagtaccgcggaacacttggtgttgtgagagatcctcccactacagaacatccagattctggaaaggacaaacttttcaatgcatcgctgattccatgaaagggaagaaatattactatgaatgttcctcactcctatcctccaataaattgagctgggcctcagctggcagtcctgcatttaggcagctgggaggagaagatggtcctgagggaagacgtcaggaacagtgctgcaatggccaggatcctgagtggt

SEQ ID NO: 733639 - DNA, 598 bp, Homo sapiens
agacagttagatggaagaaataagacctagtgtttaatagatagatcagtagcatggttatagttaatagtaatccactgtaaatttcagagtagctagaagagagtaatggaaatgttactagcataagaaaagataaatatctaaggtgatgactatcctaactaatctgatttgatccttgctcattatatgaatgtatcaaaatatcacatgtaccctgaaaatatgtacatttattatgtatcaatattaaccaaaggaatgagayggtagatcacaatcatatattaccaccaccactattgttgagactccactacctacagcaccaaagcaaaattcgctgagcctttgtataatatgagccaggcactcttcaagttgctttatatcacactctgacctttgagggaagcctattatccccatcttgtaggtgaggaaactaaagcacagagcaattaaataaattgctcaaggacacagggttttaagtcttgagaaaggattttaatgcctgtaggtctacttgctgcttcttctcttcagcccatggaaacctctcccagaagacaccatttttcttctaggtgag

SEQ ID NO: 733640 - DNA, 602 bp, Homo sapiens
aaatatattttacttaatctattccatttcctgtgatttttatttcttggtttagatccagttttttgtctgctatcatatatttcttcctaaagaactttatttatcatttcttgtagtgcagattcatggcaattagcttcctccatttcatttatatgagacaatctcgatttatatttttactaagtacagaattatggcttgagagattacttctttcagcactttaaagttatcccttcattgttttctgtcttacatgctttttgacaagaactcttttataaatcttgtcttggtttttctatatgtaatgtgtctttgtcctatggttgtttttaatattgtcttcgttttttagcagttcaaatgataggtgcaaacgagcttttttgttctgttttgtttttgatttctttccctgctttggtayttaccttgcttggtgttctcttggcttcttggatctggggtttggtgcctgtcattgattttggaagtggtctctttcttttcttttcttttcttttttttttttttttgacggagtctcactctgtcgcccaggctggagtgcagtggcgcgatcttggctcact

SEQ ID NO: 733641 - DNA, 443 bp, Homo sapiens
ttatctttctgtggctggcttatttcacataacataatgtcctccaggctcatccatatcttgtttatcatattataatccacatcatcagttaaaaaccacacaattttcgttaagatagtcctctctctactcaggcatcccaaggacacttatatctccatcttcagtttaacctttagcayaaagccatttattactgttagaactgtttactggtttgaaagactaagtaagaaacagttctattttctaacccagcaagttctaggcagtctatatttttttcaaaattccatttgtgaactggaacaatttcttctttgttcatttcaacaatctgcttgccaatatccttagccaaatctacaacttcattaggtacacattctatcttccaaatttgtatagtttacagcttgacaattgtttgtctatttcat

SEQ ID NO: 733642 - DNA, 613 bp, Homo sapiens
agttgacatttaggatctgtcactctgggtgattgcttttaagagcaagttgactccattttctctcttgatttccaattttctgtttcttttttttttaattgatctcaaaatttatgttgtctttgtttctttgcaatctcaaattctttctaaaaagagatagagtggaaataaatgaaaacttaaaaactgttttcattgttttataaaaatcatttggcccacagaatatctaaattggaattataactcattgtacagggaattttatatttttctattagaaactgatgactttgtagtttcaaaggtggtttgattttcgagatgctgctagtaaaatgccctgggaggcraacacatttaagttcttgcctattcctttcatgtatcggtgagagaaattttgctttctcactgaactggtatttgagagggtgaggctcttaggatgctgaaaataacaacttaccttgtgccagatgtgaagtgctctgtctagtccttattaccatcctgaaacgttggcattgtgagtcctcttgtacacatagggaaattgaggtgtggggaagtgaagttactcaggtttatggaattgcaagattac

SEQ ID NO: 733643 - DNA, 613 bp, Homo sapiens
agttgacatttaggatctgtcactctgggtgattgcttttaagagcaagttgactccattttctctcttgatttccaattttctgtttcttttttttttaattgatctcaaaatttatgttgtctttgtttctttgcaatctcaaattctttctaaaaagagatagagtggaaataaatgaaaacttaaaaactgttttcattgttttataaaaatcatttggcccacagaatatctaaattggaattataactcattgtacagggaattttatatttttctattagaaactgatgactttgtagtttcaaaggtggtttgattttcgagatgctgctagtaaaatgccctgggaggcaaacacatttaagttcttgcctattcctttcatgtatcggtgagagaaattttgctttctcactgaactggtatttgaragggtgaggctcttaggatgctgaaaataacaacttaccttgtgccagatgtgaagtgctctgtctagtccttattaccatcctgaaacgttggcattgtgagtcctcttgtacacatagggaaattgaggtgtggggaagtgaagttactcaggtttatggaattgcaagattac

SEQ ID NO: 733644 - DNA, 618 bp, Homo sapiens
ggaaagggtattatactatttgaaccacattatacaaatgaataaattgtacctcagagagttcattatttaggatcattgtaagtggtaaaatgcaatgcatatttaaaacttaagtgtctaaatgttggattgcgaatggcaatgatgacactcacaaacaagggctcacaactaagctgttcccatacataattgagtaacaatgcatgattagctattatcaagatcacgtaatcaaatagtctgggcttctgcttgattttggaagatttgaattatgcttgagaaatgaacttattttttagtattcacttcattttgygatctgtcaatagaatcaaaatgctcacttaaatacatccagaaatgcacattcctatggttgttcatttgtacactttcacataatagtgtgaaagctttcttttccccttttctcatgaaagctattggaagaaatggattagaaaattgaaatatagaagagacagaatcaaggtgcatgaaaaacagcgtgtttgctgaaggagtcagccttcagtggttggatgaggaaacacatattgctactgtggacagcatagtggtctgggagaatcctgggggaaagactgc

SEQ ID NO: 733645 - DNA, 551 bp, Homo sapiens
tggctctgttcagtgaaacattttctaaattttcctttcaatactaccacaacttgggcagaaagagcattttacagacaaaaagcccaaggttcatggagtctttgaaaagctgagtgtcttgaattttttttttttctcagtattctttttcagacttaagtgggaaatatttttgttttgcttcaatttttttcaaaacaattatttagagcaaacctggctatttgttggcaacttcatttttttttttttttttttttttctgagagggagtctcactctgtcacccaggctagagtgcaatggcacgatctcggctcactgcaatctctgcctcccgggttcaagcaattctcctgcttcagcctcctgagtagctgggattacaggtgcscaccaccaggcctggctaattttgtatttttagtagagatggggtttcaccatgttggccaggttattcttgaaatggctggtctcgaactcctgatcttgcaatccacccgcctcggcctcccaacgtgctaggattacaggcgtgagccact

SEQ ID NO: 733646 - DNA, 552 bp, Homo sapiens
tcagttcttcctccctgtcgacatctggattttagtcgtgtaagacccattttggacttctgaccgccagaactgtaagataatgaagtcactaagtgtgtgggaacttgtaacagcagtaataggaaactaacccaggcactttttgccttcatgggctctttcctccagtgaaaaagtagagaattgtattttatgatcatgttggtataaagatgartatggtatatattaaaaaggctttctaggccgggcgtggtggctcacgcctgtaatctcagcactttaggaggccaaggcaggaggatcacaatgtcagaagttcaagaccagcctggccgagatggtgaaactccatctctactaaaaatacaaaaaattagccgggcgtggtggcaggcgcctgtaatcccaactcctggggaggctgaggcagagaattgcttaaacctgggaggcggagcttgcggtgagccaagatcgcgccactgtactccagcctgggtgacagagcaacactctgtctaaacaaacaaaaaaactttctttgac

SEQ ID NO: 733647 - DNA, 552 bp, Homo sapiens
tcagttcttcctccctgtcgacatctggattttagtcgtgtaagacccattttggacttctgaccgccagaactgtaagataatgaagtcactaagtgtgtgggaacttgtaacagcagtaataggaaactaacccaggcactttttgccttcatgggctctttcctccagtgaaaaagtagagaattgtattttatgatcatgttggtataaagatgagtatggtatatattaaaaaggctttctaggccgggcgtggtggctcacrcctgtaatctcagcactttaggaggccaaggcaggaggatcacaatgtcagaagttcaagaccagcctggccgagatggtgaaactccatctctactaaaaatacaaaaaattagccgggcgtggtggcaggcgcctgtaatcccaactcctggggaggctgaggcagagaattgcttaaacctgggaggcggagcttgcggtgagccaagatcgcgccactgtactccagcctgggtgacagagcaacactctgtctaaacaaacaaaaaaactttctttgac

SEQ ID NO: 733648 - DNA, 499 bp, Homo sapiens
caaaaccccttgaatgaagaagaggctagattttcataaaaaaggatcctgatttgctgccaaaaattgtattactgttaatctttctcatagcctttaacaaaaagaattacatctttttacctgagtcactgttcactggggaaaaggaaataataataataccttttgaaaactactggacactgtctctgaactgaccaggaaacccaaaatttcactgtggtccaccagagtrgggacttaagaagatcagatgatcaatggagttttagcttaggttcatattatgaaggactcagtaggtccctaaacctatactactactatcaaagtttaaccagatgatgtctactattacagctctgtaccaaatatcatatcattgcttcattaaattaacacaacctctagcacctggtttgcagttgttgatctggtatgcagctattgatctggaaaatgttttttttttgctccaataaagttatgtgtcaca

SEQ ID NO: 733649 - DNA, 499 bp, Homo sapiens
caaaaccccttgaatgaagaagaggctagattttcataaaaaaggatcctgatttgctgccaaaaattgtattactgttaatctttctcatagcctttaacaaaaagaattacatctttttacctgagtcactgttcactggggaaaaggaaataataataataccttttgaaaactactggacactgtctctgaactgaccaggaaacccaaaatttcactgtggtccaccagagtggggacttaagaagatcagatgatcaatggagttttagcttaggttcatattatgaaggactcagtaggtccctraacctatactactactatcaaagtttaaccagatgatgtctactattacagctctgtaccaaatatcatatcattgcttcattaaattaacacaacctctagcacctggtttgcagttgttgatctggtatgcagctattgatctggaaaatgttttttttttgctccaataaagttatgtgtcaca

SEQ ID NO: 733650 - DNA, 542 bp, Homo sapiens; identical to SEQ ID NO: 732358

SEQ ID NO: 733651 - DNA, 513 bp, Homo sapiens
ctgatagttaatagccaagcagtccttaccttgtcgggaaggcaggtggttgtggtacagccacagtcattggtggcggttgaggccaagtacccaaggggacagctcactgtggagttgacacagttgcaggcacactcatactcatcacagcactgggtcttccgaagggtgggcaaacggtgcggggggcaggagggtggggacactcttttgcactcctccttcctgcaggctgaggrtaggacaaggccacactgagcactgcgcccagccagggctcgtaagtattcagctatgctatagggtgccagggagctttagactcagaagattaagtcagaaatgtgtgagggccaagctcacgggctgggagttattcaatgttaccaaaagcagtccatctgcagaaaaatatgaacattaatcaaaaagggaaatgtgaagctaggaactctaatggaggagaagtgaaggctgctcaatccctgctctatcactttcccacataca

SEQ ID NO: 733652 - DNA, 564 bp, Homo sapiens
tgcagaaatgtgcagcagtggtattattcttgttgcttatttttgttctggcaaacagttacttttccccaaaacagtgatgtttatattaatgtgtagtgggtttattattataatttttgaatgagttaataaatacatattttaaatgtctctaatttaatttycaatctgataaataccaataaatataatcctcctacaagatcttgaggtcctcaataatttttaagagtgtaaaggcattcaagaccaaaaagcgagaaccactttttgttctgatgggaaaggcatgaggcagagaactaatcctcgctctgccatgacacggttggtgggggtcagagtgggatcagtcctctgatcagaggagtctatcctagccctggaagttctggagtgctgcaccatccctccacttcctgtgccctggttgcctcatttataaaatggcagtaatatttgcactgtccacctgccagggtcatttccagagaaacagtgaaaagtatggattgctatccagtgtgattccaggaccaccaagaacaagaggaagtggcc

SEQ ID NO: 733653 - DNA, 545 bp, Homo sapiens
aagtcaggaaacaacagatgctggagaggatgtggagaaatagaaatgcttttacactgttggtgggagtgtaaattagttcagccattgtggaagacagtgcggcgattcctcaaggatctagaaccagaaataccatttgacccagcaatctcattacgggtatatacycaaaggattataaatcattctactataaagacacatgcacatgtatgtttattgcagcactatttccaatagtaaagacttggaaccaacccaaatgcccatcaatgatagactggataaagaaaatgtggcacatatacactatggaatactatgcaaccacaaaaaggatgcgttcatgtcttttgcagggacagggatgaagctggaaaccgtcatccccagcaaactaacacaggaacagaaaaccaaacgctgcatgttctcactcaaaagtgggagttgaacaatgagaacaaatggacacagggaggggaacatcacacactggggcctgtcagacagtggggggaaagaaaagggagagtattagg

SEQ ID NO: 733654 - DNA, 588 bp, Homo sapiens
ttaaaagatgcagaattgattctttatatattcaacgaaaaaagacaaatgacgaaaaacgtatttgtttagcaaaatgttcacaaattattgttattattttacaaatgacatattttcaactgcaggagaacattggagttgttctttttatttatttttattttttatcatcatcatcatcatcatcaatattatgactagagacagagtctcgctctgttgcccaggctggagtggaatggtgcaaatcatggctcactgcagcctggaagtcctgagctccagtgatgctcctgcatcagcctccttagtatttgggatcacaggcgtgtgccaccatgccccacccggttaatttttaaattacttgtagagacagaggtctcactatgttgcccaatctggtctctaactcctgagctcaagygatctatccgcctcagcctcccaaagtgctgggattacagatgtgagccatcgcggcccggccagagttgtttttaaatataggagtacttctaagtctcagcaaccttttaggtcttaagagccttccatggggaaaaagacttcctggtctgcccc

SEQ ID NO: 733655 - DNA, 592 bp, Homo sapiens
agatgagagaggtgctatggatgctgcagactgttctacaaatggtgcctggtcctaaggtgcccagggtgtagggaacagcccatcgttcattcccaggacaacatgttactgtggtaggtccttagggagcccctctcctcttagaccagccyttagcaagaagtatttcaggaaatgctgcacctcaaagaaaccaacctaagtcagccaaagcctgcaggagaacacaggatgagaagaaaacaggtacaagagttagggctggggctgggcgtggtggcttatgcctgtaatcccagtattttgggaggctgaggcgggcagatcacctgaggtcaagagttcgagatcagcctggccaacatggtgaaccccacctctactaaaaatacaaaaattagccgagcgtggtggtgggtgcctgtagccccagctacttgagaggctgaggcaggagaatcgtttgaactcaggaggcagaggttgtagtgagccgagatcgcactgctgcactccaacctggagcgacagagtgagacttcgtctccaaaaaaaaaaaaaaaaaaaaaaagtgagggctggaagatgc

SEQ ID NO: 733656 - DNA, 534 bp, Homo sapiens
aattctttcatatactctgccatttttattctacttaaaatgttaaatcttttttttttttttgagactgggtttcgctcttgttttgttgcccaggttggagtgcattggcgtgatctcagttcaccgcaacctccacctcccgggttcaaatgattctcctgcctcagcctcccaagtagctgggattagaggcacgcgccaccrcgcctggctaattttgtatttttagtagagttagggtttctccatgttggtcaggctggtctcaaactcccgacctcaggtgatccacccgcctcggcctcccaaagtgctggattacaggtgtgagccaccgcacccggcctaaatctttgattaaatgaaataaatgctgaaaaattcataaaactgtaagcaaacaaaaattgcccccaaacacagagattcttataagaagcttctatttacctatttccattagcatcaaaactgataaattaacaagggtggttttcatgtaattgctggaggcaggaacatttatcgatg

SEQ ID NO: 733657 - DNA, 534 bp, Homo sapiens
aattctttcatatactctgccatttttattctacttaaaatgttaaatcttttttttttttttgagactgggtttcgctcttgttttgttgcccaggttggagtgcattggcgtgatctcagttcaccgcaacctccacctcccgggttcaaatgattctcctgcctcagcctcccaagtagctgggattagaggcacgcgccaccacrcctggctaattttgtatttttagtagagttagggtttctccatgttggtcaggctggtctcaaactcccgacctcaggtgatccacccgcctcggcctcccaaagtgctggattacaggtgtgagccaccgcacccggcctaaatctttgattaaatgaaataaatgctgaaaaattcataaaactgtaagcaaacaaaaattgcccccaaacacagagattcttataagaagcttctatttacctatttccattagcatcaaaactgataaattaacaagggtggttttcatgtaattgctggaggcaggaacatttatcgatg

SEQ ID NO: 733658 - DNA, 615 bp, Homo sapiens
ttgttgggaggtttttgaatactgatttattctcctcatttattattgatattttcaggttttctagttattctcaattcagtttcagttggctttatgtttttagaaatgtatccatttcttgtaggttatccaatttgttggcatataattattcttaagtgctccttatgaccctttctatttctgaagcattcattgtaatgcctcttcattcattttttattttatttgtgttttcactctttttttcttctttcttttcttttctttttcttttgagacagggtcttgttctgttgcctaggctggagtgcagtggtgcggccatggctcactgcagccttgacttcccaggctcaagtaattctcccatgccagcctcctgagtmgctgagactacaggcatataccatcacactggctaatttttgtatttcagtagagacgaggttttgccatgttggccacactggtcttgaactcctgacctcaggtgatccgcccaccttggcctcctgaagtgctgggattacacgtgtgagccactgggcccagctttttttttcttagactagctaagtgtttgttgatttttatcttttcaaaaaataa

SEQ ID NO: 733659 - DNA, 547 bp, Homo sapiens
aatctcagctcactgcaacctcggcctcctgggttcaagcgattctcctgcttcagcctccagagtacctgagattacaggcgcctgccaccacacctagctaatttttgtatttttagtagagacggggtttcaccatgttggccaggctggtctcgaactggtgagctcaggtgatccatgtgccttggtctcctaaagtgrtgggattacagccgtgaaccgccgtgcctggcccattttaccattttaaagatgacatctcattgcttttctccttttttgtttctgttgagaatttagctatcattcatgtgttgtttcccattattaatgtgttatttattttcctctggctgttttcagtattttctttttatctttggtttttattagttttagattatgttcttaggagtgattttccttctgtttatcttgatgcggattcagtgagtttcttatacctgtaggttgtatcccaaatttggggaatatttgatcattactttttcaaattcctttccgatttcattatatgtcccct

SEQ ID NO: 733660 - DNA, 547 bp, Homo sapiens
aatctcagctcactgcaacctcggcctcctgggttcaagcgattctcctgcttcagcctccagagtacctgagattacaggcgcctgccaccacacctagctaatttttgtatttttagtagagacggggtttcaccatgttggccaggctggtctcgaactggtgagctcaggtgatccatgtgccttggtctcctaaagtggtgggattacagccgtgaaccgccgtgcctggcccattttaccattttaaagatgacatctcattgcttttctccttttttgtttctgwtgagaatttagctatcattcatgtgttgtttcccattattaatgtgttatttattttcctctggctgttttcagtattttctttttatctttggtttttattagttttagattatgttcttaggagtgattttccttctgtttatcttgatgcggattcagtgagtttcttatacctgtaggttgtatcccaaatttggggaatatttgatcattactttttcaaattcctttccgatttcattatatgtcccct

SEQ ID NO: 733661 - DNA, 470 bp, Homo sapiens
tactgttgttagtaacatccatttccaaccccctgcccacccaccaaccccatcatctaactgtgtttcctgtcttccagggagccagggttttttatgttgtgtgagccgtgtatagtttcttttttcttttttttttgagacgcagtctcgctctgtcacccaggctggagtgcagtggcacaatctcagctcactgtaagctctgcctcccgggttcatgccattctcctgcctcagcctcccgagtagctgggaccacatgcgcccgccaccatgccyggctaattttttgtatttttactagagacagggtttcaccgtgttagccaggatggtctcgatctcctgacctcgtgatccacccacctcggcctcccaaagtgttaggattacaggcgtaagccaccgcacccagccgagttgtgtatagtttcttttgagacagctcgggttagcttatctggcac

SEQ ID NO: 733662 - DNA, 620 bp, Homo sapiens
agagcgtattttatataggagggaaatacagtgtaggcaacagtacagatgggattagacttgtactctagttaaaaatggaagagagtcagggtaggaagaaggtaaggtcgctgatgcttgattttaggtttagacagtctataaattgggtgaagggaaaacagaatatttgcagcaaccattttcaaaactgaggaatttgggtatagtttagggaagatacaaccatatttacaataggcagcacacttactgtttggggcaagggaggaagtgggttgaaaagcatgaacktagaaatcatatctaacctgtcatttaatagccatgtgaccctgaacaagttagtgaacagttctgggccttctttcctcttctgtaaaacagtgataataacctacctctcagactggtgtaaagattaaatgcaatataaagtccccagcacaatatctagcatgtagtaggagccctatgaatgttaggctctttctttactccctcaccctctattgagatcctttgcagtcacagtgtctctgttttgtctattttattcgtaagtctgacatagcacttatcttattgtattagagttcactgtctatatctgtctt

SEQ ID NO: 733663 - DNA, 588 bp, Homo sapiens
cgcacctcttgggttctcagcctccctagtagctgggattagctaatttgtcagtttaattcttaaaccagctgcagaacctaagagagtagaaggaagttttcctcgcctacactaggttgtatgttagttttctgttgccactggtaatgatttgggacacaacaataagccacaaatttagtggcttaaaacaacacaaatgtattatttcacagttctgtaggtcagaagtctgacatgtggcggtggctaacgcctcccaaatcccaacactttgggaggcagaggagggcagatcacctgaggtcaggattttgagaccagtctgaccaacatggagaaaccccgtttctactaaaaatacaaaattagctgggsctggtggtgcatgcctgtaatcccagctactcgggcgactgaggcaggagaatcgcttgaacccgggaggcggaggttgcggtgagccgagatcgtgccattgcactccagcctgggcaacaagagggaaactctgtctcaaaaaaaaaaaaaaaagaaaagaaagaaaaagaaaaagaaaaaaggccaggcgtggtggctcaggcc

SEQ ID NO: 733664 - DNA, 603 bp, Homo sapiens
gtcagagatgacagtatgagccatcaggcagtacctctgtggcacagagaggaccatgcagtcttaagattacaaaatacagggctgggcgcggtgactcacgcctgtaatcccagcattttgggaggccgaggtgggtggatcatgaggtcaagagatagaggcgaccatcctggccaacatggtgaaaccctgtctctactaaaaatataaaaattagctgggcgtggtggcacaggcctgtagtcccagctactcgggaagctgaggcaggagaatcacttgaacccgggaggcagaggttgcagtgagctaagatcgcgccactgcactccagcctggcaacagagcgatactccgtccccctgccaaaaaaaaattacaaaatacaaatgyacacacaacaaccacagcatcttcagcagcccaggttctggactgtatatactacaagatgctctagcatatatgttactacagtatcccttgcagcaagagttagaagaaaattctttaccctatgatatgtgtgagcagggcttgagaaaggagccctgccaattcagcagcagcccctaccaaccctgtgtgtaaccttgtgga

SEQ ID NO: 733665 - DNA, 494 bp, Homo sapiens
ctgtgctagcaatcagcgagactccatgggtgtaggaccctccgattcaggtgcgggatatgatctcctggtgcgccgttttttaagcccgtcggaaaagctcagtattcgggtgggagtgacccgattttccaggtgccgtctgtcacccctttctttgactaggaaagggaactccctgaccccttgcgcttccctagtgaggcaatgcctcgccctgcttccrctcgcccacggtgcgcgcacccaccgacctgcgcccactgtctggcactccctaatgagatgaaccccgtacctcagatggaaatgcagaaatcacccgtcttctgcgtcgctcacactgggagctgtagaccggagctgtttctattcggccatcttggctcctcctcaatggagttcttaacactgaaggaacatgatcaatgtcaaacatttgaatgtaggcaaataggtaagagttttggaaacagaataaatacaggtaaatg

SEQ ID NO: 733666 - DNA, 494 bp, Homo sapiens
ctgtgctagcaatcagcgagactccatgggtgtaggaccctccgattcaggtgcgggatatgatctcctggtgcgccgttttttaagcccgtcggaaaagctcagtattcgggtgggagtgacccgattttccaggtgccgtctgtcacccctttctttgactaggaaagggaactccctgaccccttgcgcttccctagtgaggcaatgcctcgccctgcttccgctcgcccacggtgcgcrcacccaccgacctgcgcccactgtctggcactccctaatgagatgaaccccgtacctcagatggaaatgcagaaatcacccgtcttctgcgtcgctcacactgggagctgtagaccggagctgtttctattcggccatcttggctcctcctcaatggagttcttaacactgaaggaacatgatcaatgtcaaacatttgaatgtaggcaaataggtaagagttttggaaacagaataaatacaggtaaatg

SEQ ID NO: 733667 - DNA, 534 bp, Homo sapiens
acccaacttcaaactatactgcaaggctacagtaaccaaaacatcatggtactgacacaaaaacagatacaaagatcaacagaacaggttagggaatccagaaataaagccatatacttatttttacaaatgtgagaaaatatttacaaaatatgcatccaacaaaggcccaatatccagagtctataaggaacttaagcaaatcaacatgttaaaaacaatctcatttaaaaatgctgaaagaacatgaacagacatttctcaaaataagacatacacgtggccagcaaggatatgaaaaaatgctcaacatcactaatcatcaaagaaatacaaattaaaacatcaatgacatactatctcataccagtcagaatggctattattaaaaagtaaaamaaacaaacaaacaaaaaaaagcacatgttgatgatgttgcagagaaaaaggatggctattgaggatataaattagttcagccattgtggaaagcagtttgaagatttctcaaaaagcttaaaacagaactaccat

SEQ ID NO: 733668 - DNA, 588 bp, Homo sapiens
aaactcgtgtccttttctgtggccctccagaggcgtccttgctaaaccgtgtttagctccaggaggctgagcatcatagtttctgggcaaacactgagggggtgacaggccgcgaccagaggctgcgattgagccctccagtttcttagttgtcaatttctgaggttcagaaaatctcttgctttgggtcagtagcaatgcattgtcgacagcagagtctygctccaggggctgggccttcgtggaagaggcggtcgtcttctgtggcacttcaggtacaatctgagggggcggttctgtcacctcggtaggcacgtcttgctcagcaccaggctccacttgaaggtcatccagggaatgggatcggggccaagtgtccacagtctgggggccctccagggtctcacagctccggcagatggaaactgggaggcttcttcggtttttattcaaaccagtcacaccaggtgggtcacagctcttggacgtgtctggggcaaggccaccacccagcctgccctcctcctgtccctgcttcagtgcatcccctgatttcattaaaggcaatgttgggtaattgcccaactg

SEQ ID NO: 733669 - DNA, 570 bp, Homo sapiens
gcatagtttagaaaataaaatccttcctttgtattcaaatttacaacgcttagtgcactgaagaataaccatttctttacatgtctgtctctcttgtctgtacacagaaggcaagttctgtattttgtattcccagcaccaagcacggtgctgarcagcccaaagtgcttaataaacgtgtgttgaattcagtgtttctctacgtaaataaagcacggacttggagcaggttaatgccaaggagtatgtgtatttagcaccatttaaaatctcagaagggccattctcagcttttcttgtcaggaagaaccaagggaacattctaccaggtagctgcatacctgctcagagacagagctgctgtattttttagacattctctttctcatcgtctctttcactgatttcacctttttcccaagagagatgcgagaggcagtaggtgatttgatgacttctttgtacacaaagtctccttctttaccctgtaaaacaaaatgttgcaagtattgttggtcgcagaaaatgaagaacaggttttattatttaaaccattaacatcctagctct

SEQ ID NO: 733670 - DNA, 558 bp, Homo sapiens
agggtttcatttctaagtcagctccaacatccaatatgcagcttcctctgttgtatctgttcaaaatgtgaaacagcataagagatctctgactaaacgagtgtgcaacacgggtgcgtgggcatgcctgggagcagccgcctcggcacaccctgtgcagtgggtgagcaattccagctcacgtcgcacgccctgacaacaaccttctctccatttcctccaacccagttcatggaacagtaggaagataaatkcctcaaatgaacacacaaaacaaaaacaagcctcatctctgaatacaaatctaatgtagagacttttctcccaaagaaaagctctcactaatcccagtgttacagacaataaaacagataagcaagagttgcagagaatacctcaagagaagaagaagtagagtttctatgcattatttaggcataaaaatggtgcacgttgtgagtcctctttgcactatggcacgaacattagtacaaggatagtaagggatataaacaactgatgtcctggcctctgtcctcaccctggaactcaaggcat

SEQ ID NO: 733671 - DNA, 635 bp, Homo sapiens
aaagttaaagatagcaagagagaaaagactcatcacattacaaggatcctcaaaaagattaacagctaattttcaccaaaaatcacaggggccaaaaagaagtggtaaaacataatcaaagtgatgaacaaaaaagactgtcaagaatttctctacccaacaaaactacatttcaaaaatamagaggaaattaagatactgccagataaacaaaaactttgatattatacctactgtacaataaacacaaacacgacaccttcaggttgaaatgaaagaacactagatagtaatgcaaatccacatgaagaaagataaataattgagcaatgacacatatagactcaaaataaagggatgaggaaaagctaccaaacaaatggaaaacagaaaaaagcagaatttgcaatcctactatctggcaaaacagactttaaaccaacaaagaacaacaacaaaaaccaagaaagacattacataatggtaaagggttcaattcagcaagaatgtctaactatcttaaatatcttaatatatatgcaaccaacacaggagcactcagattcataaagcaagttcttagagaccttcaaagagacttagactcccacacaataacagtgggagactctaac

SEQ ID NO: 733672 - DNA, 635 bp, Homo sapiens
aaagttaaagatagcaagagagaaaagactcatcacattacaaggatcctcaaaaagattaacagctaattttcaccaaaaatcacaggggccaaaaagaagtggtaaaacataatcaaagtgatgaacaaaaaagactgtcaagaatttctctacccaacaaaactacatttcaaaaatacagaggaaattaagatactgccagataaacaaaaactttgatattatacctactgtacaataaacacaaacacgacaccttcaggttgaaatgaaagaacactagatagtaatgcaaatccacatgaagaaagataaataattgagcaatgacacatatagactcaaaataaagggatgaggaaaagctaccaaacaaatggaaaacagaaaaaagcagaatttgcaatcctastatctggcaaaacagactttaaaccaacaaagaacaacaacaaaaaccaagaaagacattacataatggtaaagggttcaattcagcaagaatgtctaactatcttaaatatcttaatatatatgcaaccaacacaggagcactcagattcataaagcaagttcttagagaccttcaaagagacttagactcccacacaataacagtgggagactctaac

SEQ ID NO: 733673 - DNA, 619 bp, Homo sapiens
ctcattttttcatatatatttcaagagctatttatatattagaaatatggatactactgatggtctctggaaagggccacctcccggccggaggccaaccagcacaaaaatagagcgttaaaccaccagagctaagaaccctcatggagttcattgcactaccccccaccaccacctccactggaacaggtgctggtatccatggctgacagacccataggtggttaacaccacagggctctgtgcagacactccccagtatcagactggagctaggtagactctcygggttgctagacccagaagagagacaacaatcactgcagttcgactcataggaagccacatccataggaaaagggggagagtattacatcaaggtaacaccccatgaaacaaaagaatctgaacaacagccttcagccctagactttccctctgatagagcctacccaaataagaaggaaccagaaaaccaaccctagtaatatgacaaaacaaggctcttccataccccccaaaatcacactagttcaccagcaatgggtccaaaccaagaagaaatccctgatttacctgaaaaagaattcatgaggttagttattaagctaatcggaga

SEQ ID NO: 733674 - DNA, 619 bp, Homo sapiens
ctcattttttcatatatatttcaagagctatttatatattagaaatatggatactactgatggtctctggaaagggccacctcccggccggaggccaaccagcacaaaaatagagcgttaaaccaccagagctaagaaccctcatggagttcattgcactaccccccaccaccacctccactggaacaggtgctggtatccatggctgacagacccataggtggttaacaccacagggctctgtgcagacactccccagtatcagactggagctaggtagactctctgggttgctagacccagaagagagacaacaatcactgcagttcgactcataggaagccacatccataggaaaagggggagagtattacatcaaggtaacaccccatgaaacaaaakaatctgaacaacagccttcagccctagactttccctctgatagagcctacccaaataagaaggaaccagaaaaccaaccctagtaatatgacaaaacaaggctcttccataccccccaaaatcacactagttcaccagcaatgggtccaaaccaagaagaaatccctgatttacctgaaaaagaattcatgaggttagttattaagctaatcggaga

SEQ ID NO: 733675 - DNA, 625 bp, Homo sapiens
atatatgaaggaaagatacagtctttttcagaaaaacaaatgctgacagaattcaccattacaaagctaccactacaagaactgctaaaaggagctctaaaccttgaaacaaatcctggaaacacatcaaaacagaagctctttaaagcataaatcacacaggaactataaaacaaaaatacaagttaaaaagaaaaaaacaaaaaatcaaagtacacaggcaccaaagagcatgatgaatgcaacagtaccccatatttcaatactaacattgaatgtaaatggcytaaatgctccacttaaaagatacagaaccacagaatggataagaactcaccaaccatttgctaccttcaggagactcacctaacacataaggtaaacttacagtaaaagggtggaaaaaggcatttcatgtaaatggacacgaaaagcaagcaggtgtagctattcttatctcaaagagggacattatataatggtaaaagaccttgtccaacaggaaaatatcacaatcctaaacatatatgcacctaacactggagctctaaaatttataaaacaattactaatagacctaagaaatgagatagacagcaacacaataatagtaggggacttaaat

SEQ ID NO: 733676 - DNA, 573 bp, Homo sapiens
agtaaagtttctacacattacttaatgtggtaaaacattgagactgttataatttaattatgtatgtatttattcttacagtaaccatgaagaaaatcatacaaaacaaaatattgaaagacattataaataagttaagattaaattctaaaaactattcaagtaatccatgtgaaaacaagtaaaaagaaacaggaatgagagacagagaaaacaaacattataatggcaactagaatgcaagtatctcctaatatattaataactaccttaaatgtaaacagcttaaattaacatcgaagcgggggaggagccaagatggccgaataggaacagctccagtctacagctcccagcgtgagcracgcagaaaacgggtgatttctgcatttccatctgaggtaccgggttcatctcactagggagtgccagacagtgggcgcaggtcagtgggtgcagcgcaccgtgcacaagccgaagcagggagaggcattgcctcactcgggaagtgcaaggggtcagggagttccctttcctagtcaaagaaaggggtgacagacagcacctggaaaa

SEQ ID NO: 733677 - DNA, 590 bp, Homo sapiens
ttgaaggaacatatctcaaaataataacagccatctatgacaaatccacagccaaaatcacatcgaatgggtaaaagctggaagcaatcctcttgaaaaccagaacaagacaaggataccttctctcgccaccgctattcaacatagtactggaagtcctagatagagcaataaggcaagagaaagaaataaaaggcatagaaaaaaaagacacacaaataggaagaaaaawagttgaactatcattttcacagactatatgattctatacccagaaaatgccatcgtttctgcccaaagactcgtagatccaataaacaacttcatcaaagtttcaggatacaaaaatcaatgtacaaaagatcagtagcatttctacacaccaataacactcatgctgagagccaaataaagaatgcaatctcactcacaatggccacaaaaagaatgacatatgtagaaatacagctagacaaggaggtgaaagatctctacaatgagaattataaaacactggtgaaagaaatcagagatgacacaaataaatgaaaaaacattctatgctcatggatgggaagaatcaatattgt

SEQ ID NO: 733678 - DNA, 540 bp, Homo sapiens
ctgcccaaagactcgtagatccaataaacaacttcatcaaagtttcaggatacaaaaatcaatgtacaaaaratcagtagcatttctacacaccaataacactcatgctgagagccaaataaagaatgcaatctcactcacaatggccacaaaaagaatgacatatgtagaaatacagctagacaaggaggtgaaagatctctacaatgagaattataaaacactggtgaaagaaatcagagatgacacaaataaatgaaaaaacattctatgctcatggatgggaagaatcaatattgttaaaatggctatactgcccaaagcaatttacagattcaatgccatttctatcaaactaccaataacatttttttcacagaattagaaaaaactattctaaaattcatttggaaccaaaaaagagtctgaatagccaaagcaatcctaagcaaaaagaacaaagctggaagcatcacactatcacttcaaactatactatgactctaagtaaagcagcatggtactggtacaaaaacatac

SEQ ID NO: 733679 - DNA, 610 bp, Homo sapiens
agctatcttgggaaaaatcagtaaatttggaaatgagatgttgtgcaggatttcttcatcattacctgagcagccagtaaaaatccctgctgaactcctccctctgaaaactcacagtcaattcagcagcttgaccaaattctctcttctctgaagtgcctgttcctttcccaaccccctgctactaaaggttgcacttacagagtcagaagagtgggctgtaagtagtcaggctggaaaactcaggtccctcatctgcactctgccagtaacgagttgtgtgaggtactcactaatggcaaagtgcacaggtaattcacaaagtgccttctgatgagtgagtaggagttacatggaaaatggcaagggttagtagtgaaatcattttgtattttcattgggatcaacgyagttgatagaagttgttgtgagtgctctagagaagaacaaacgtgttttaatagcatttccaaaattatttgacaatggaacccggccagcccaccttcacatttttttcatggaaacatcttgttaactattgcctacggaatacattttgagaaacgctgaactaaataaaataaagatatgttaatactgttttata

SEQ ID NO: 733680 - DNA, 551 bp, Homo sapiens
ctccacacctaccagtggggggtctctattcttactgccgactgtgtgctgtccaaatctgccaaggccaaaggctatttttgttgtaaacacatgtattgttatttaaaatatagatgaagtatgagttttgttttttaaagaatgattattgctttgaatgctaagttgatgacttggggaaaaagggaataatgcggtcaccaaaacaaacactgcttaagcaygtgttggccatgcaggtataaaggtgtgggggctggcattctgttcgttggtatctttaagtactccctccaccgtgaagtgcagaaattagaattcacagaagaagctgtgctttctgcctaaaagcagacatgatttccaaggagaccccagagattttccactttccccaagtggaaccctgtccacattaaacggctcccaccccccacccctcagtacctggcaaccaccattctactttctgtctctatgaatttgaccactctaagtatttcataaaagtagaatcatacagaatttgtctttctgactggcttatt

SEQ ID NO: 733681 - DNA, 623 bp, Homo sapiens
aaccctagattttcctatgacttttggtaaaattttatgttaccaattttattcagactgcaccagtgtggtctacatggtaagacaaacagcttcagagtggaactcttaaggcactgggtgattcacaaattgaaccragtcagatgcacagtagttgtatattaagtacatgcacaaatgacactaatggacattgctgccatggcacgtctcagtcatctgccctggtgctgttctttttgcaatatcagaattagtaacataaaacagagggcctggataccaaattcatgagtgacatgttgttcggagggaaagcaagtaggttgaaatgccatgttagtcaatgccatcatccttatctcgtgtaccatataatacgtacacataagccatgctgccagtagtcccttccctctctgttccaggccttggagaaccatggtcacttttgagaagtaccacaaattagagtcatctggagaattccaccaagcatggcagcatgtttgacactcaataagttattattaaagaattacattatggactgacttaatggatagactataaactaaagcattgaagaatggtctggaaagatgaagccttgaaactgg

SEQ ID NO: 733682 - DNA, 613 bp, Homo sapiens
ttccattcatttcctagcctgttggatcctttctatgtatctctgatgttggttcataaactctagctgtgggtcaacattgttctctaatatttctcactacctgtagaaaactctatgaatataatgaatctttttgcagtagatttcacgtcataaccaaataaaggttattccaaggaagctcaaacccttgttattcagcctgagttcatcttaaactaatcagggaaaacaaaatagaatccaagcagaaaagagtcagatagaagaattaatactttatagaagctgccaaatctttccttcttcaaatgtagaaactgaggccmgaaaggttatatgactctcgcagaatcacatagctacttaaagacattaaatttatgtgcaagtgtcttacaggaaagaaatattaagttgaagaaaagaaggaggtacaaaacttttcttagtttttaattcagaaattttgaagaaaattttgtggatggctcacagaaaccagaaatgtattgagagttttctatataccccacaaaatatttgacattagggaacctatagccaaacagttttagtctaatcccaaatgtgaaaatagagctcaatg

SEQ ID NO: 733683 - DNA, 624 bp, Homo sapiens
tctaatatgcttgcaacccaatagtaggatgtattcagctatttggagattgcaaaatgttcgcgtttcttatgttatgccttgtgatttaactttacaaataattcagcaggcctagtaagtgcggttgaatgtccaaataygtgtaatctgtcctccattttctggtatagccttttctttaaaaaaaaaaatcaaatcactcaagctaacatgccattcaaaagcagaaattatagcatcctccaaggaaacttcaggggcaatttacattgtcaaggctattttcattctcaatttgaattcacaatgaatcttccacacctgctttggtattgccttttgcagctcctgatctctcaactcacttatcccaaatttatgaaacatctctttcccttttcactcactaaaagcacacctaccacaaggactttaagtataaaacattttactggttacttgggtaaatggaaatgaggcaagacagttttgtaaattgattatgacactacgagaaatgctactgaaaaccacgagtcaggatgtactattcctagaaatgtacccctcattccactagccatgtttcttctcaaccctatccctcaccatactttatct

SEQ ID NO: 733684 - DNA, 592 bp, Homo sapiens
cagaaaggtggttttcctctatgtattattcactcttcttcttcctcaggcatctcctatactctttcagtctctgtattcagatggaagatgtgggaaaaggttacaacaacttcctaaacatcttaagcaaaaagtaatgcatatgatttcggctcacagtctatggcaaaggctaattaaaggattccacctagattacagggaatctgaaaattgcagttcctccttaagaagctgcttcccagagaaaacaccttgctaatggaaatttggtagacagtcataatcatttttgccacagatctccacaatgggccagcactgctcggctgaaagagtcagaacagctttacacaagtggtagcacatgaacagacttgaataataaataggcattttccagyaggataagcaagaggatgtcccagtttaagtaaacaacatgtgcgatggcctgcagatgaaatagaggaggtgtaaacaggaaaataagcaatttctatcttgcttctgcactaactgtgtaatagtgagcagtgaaagatgggactagaggagcaaatgagaagctgaagatgaagagcttaaa

SEQ ID NO: 733685 - DNA, 592 bp, Homo sapiens
cagaaaggtggttttcctctatgtattattcactcttcttcttcctcaggcatctcctatactctttcagtctctgtattcagatggaagatgtgggaaaaggttacaacaacttcctaaacatcttaagcaaaaagtaatgcatatgatttcggctcacagtctatggcaaaggctaattaaaggattccacctagattacagggaatctgaaaattgcagttcctccttaagaagctgcttcccagagaaaacaccttgctaatggaaatttggtagacagtcataatcatttttgccacagatctccacaatgggccagcactgctcggctgaaagagtcagaacagctttacacaagtggtagcacatgaacagacttgaataataaataggcattttccagtaggataagcaagaggatgtcccagtttaagtaaacaacatgygcgatggcctgcagatgaaatagaggaggtgtaaacaggaaaataagcaatttctatcttgcttctgcactaactgtgtaatagtgagcagtgaaagatgggactagaggagcaaatgagaagctgaagatgaagagcttaaa

SEQ ID NO: 733686 - DNA, 497 bp, Homo sapiens
gagggatgagaatcacttgaactcaggagtcagaggttgcagtgagctgagatcacaccactgcactccagcctgggcaatagagtgagactctgacaacacaatatctgacccaaagagtaaagtaataaatgaaatcttattaaagtgcatgcaattggttttcttaaaaatgaagcctctgtttggggcaggtttttttytaaataagccaacatttgacttaattgcacatagatcaggagagacttttgtgaagcagctagcagagtatgtgaatctctccctactcaaaaggtttgtccccattgtccaaggttccagattaggcatccacctcagaactgcacagtgtttatttttacttacttgttttgatggtaacaaccaagcatttgacctcatctcatttgttttgattcccactccaggtgaaatttgaaagctaacatggaaatgcatgttctatcaggagagttaaaagaagagaaaaaaag

SEQ ID NO: 733687 - DNA, 486 bp, Homo sapiens
tattttggtgtttgtacacatcatcatggaatttgggtaaatctgcatcagcaatagcaggtgtgactttggtgtaaaaagtaatcccccatgtgagtcaaacagtaaaaatgtggacccccaaggcctctcatgatctgtcttccatccatatctccagycttgtattttattcccctcaactctggccacatactccactcaccttgcttttccacccttctgtgcctttggatctgctgctcccttggcccagaaagacctccgttgcattccaccctcctctacacctagatgacttctactcatgtgttacatttcagcctagatgccagatcctctgggaatactctgcccatctccctactccttggtctcagtcagatgcccttcctcaacacgccatagttcgctgcccatctctactggatctgttctcatgttgtaccctaattcattgtgagtttgtctgtttctatcgagact

SEQ ID NO: 733688 - DNA, 523 bp, Homo sapiens
gggcaccaagagaatcataagaactgcttcaaaaatttaaaatagttatttgggggacattcatttaaatatgccccgctataaatcatatcattagatacgtaaagttcccaatataatttggcaacataagctaattttgctgatgtaaacacattttagcctgtggattcctgaatacatagagtgctaacctagattcagactcgargctgcatgtggagaatctcaaaggtaggagctgtgaattcagcagttgtttattagaattaaagtcacttaaaatctatacttaagaaggtacttaaaaattctctaggcttttcccaaatcagactctctcggtgtgggcctgaggatctatatatttttaaaattcaaccttgaagaatgagtaggatttttaacctcagggtgggcgggaatgacattccagggggcatgatggtttagttgaaaggcatgggtcaaggaaagataatgcgtttcatttacctggtttttgcagcagaacttctcagac

SEQ ID NO: 733689 - DNA, 604 bp, Homo sapiens
cttggaaggctgaggcaggaggatcgcttgagaccaggagtttgagaccagcctggacaacatggcaaaaccacatctctgcaaaacaatacaaaaattaaccaagtatggtggctcgtgcctgtagtcccagctacttgggaggattgacttgagcccaagaggttgaggctgcagttatccatgattgcaccactgtgctccagcttaggcaacagaaccctgtctcaaaaaaggcaaaacaaccaccaccaccacaacaaaagtgaagtcatgacaccatttaggggacatgtagatataaagaattattgtttcctccaggtactcagtcaagtaattctactagggaatcaagtatgagaattgaaggtttaatcagagttgcagccaggaggactggatcaagtgcctttcaatcctgagaaagggccaggcrtggtggctcacatctgtaatcctagcactttgggacaccaaggcaggaagatcgcatgaagccaggaattctagaccagtctgggaaacataatgagacccctgtcactacaaaatttttaaaaaaaaatttagcagagcatggcaccacataccctgtagtcct

SEQ ID NO: 733690 - DNA, 575 bp, Homo sapiens
aggataatgacctccagctccatccatgttgctgcaaaggacatgttcttattatattttatggttgagtagtattccatggtttatatgtacacattttctttatccagtctattgttgatgggcatccaggttgattccatgtctttcctattgtgaatagtgctgtgatgaacattcatgtgcatgtgtctttatgatataacaatttacattcctttgggtaaatcctcaataatggaattgctggttaaatggtacttccattttaagttctttgagaaaactccagactactttccayagtcactgaattagtttacatttccaccagcagcgtgtaagcgttcccttttctctgcaaccttgtaaacatctgttatattttgactttttaataatagccttccaactggcataagatggtatctcagtgtagctttatttgtatttctttaatgattagtgatattgaacttttttcatatacttgttggccacacgtaagtcttctgaaaagtgtctgttcatgttctttgcccactttttagtgggattgtttgtttgttgtttgt

SEQ ID NO: 733691 - DNA, 575 bp, Homo sapiens
aggataatgacctccagctccatccatgttgctgcaaaggacatgttcttattatattttatggttgagtagtattccatggtttatatgtacacattttctttatccagtctattgttgatgggcatccaggttgattccatgtctttcctattgtgaatagtgctgtgatgaacattcatgtgcatgtgtctttatgatataacaatttacattcctttgggtaaatcctcaataatggaattgctggttaaatggtacttccattttaagttctttgagaaaactccagactactttccacagtcactgaattagtttacatttccaccagcagcgtgtaagygttcccttttctctgcaaccttgtaaacatctgttatattttgactttttaataatagccttccaactggcataagatggtatctcagtgtagctttatttgtatttctttaatgattagtgatattgaacttttttcatatacttgttggccacacgtaagtcttctgaaaagtgtctgttcatgttctttgcccactttttagtgggattgtttgtttgttgtttgt

SEQ ID NO: 733692 - DNA, 661 bp, Homo sapiens
tagctcccacatgtaagcaagaaaatgtggtatgtggtttttgattcccaagtaacttcaattagtgtaatggtctccagctgcatccaaattgctgcaaaatacattattttattcttttttatggctgagcagtgttccattktattagtttgttttcacactgctgataaagacatacctaagactggtaatttataaagaaaaagaggtttaatggactcacagtttcacatggctggggaggcctcacaatcatggcagaaagcaaaaggcacatcttacaaggtggcaagcaagaaagaacaagagccatgcaaaaggggaaaccccttataaaatcatcaggtcttgtgaaacttattcactaccatgagaacagtatggggaaaccacccccatgattcaattatctcccaccaggtcccccaataaaacataggaaatatgggagctacaattcaagatgagatttgggtggggacatagccaaaccatatcatctatagcagatgtataccagactgtttaatttctacatatttgtatagttttaggggtttcttctggaattgatttctaggtttattttccaccatgatctgagaagatacttaatatgactttgatttttaaaaatgtattgagacttgttttatgg

SEQ ID NO: 733693 - DNA, 514 bp, Homo sapiens
gaattctttcttttttttttttttcagactagaattcttgctgaagacaagccaaggtgatcagacatcacctgggggcaatgcaggatgaggaatttggtcacttaatgacagtgatcctatatcaagtttgggaattcttgccagaactgaacacagaagcccaaggtcaagctgagtagaaaagcaagctcagaagagccccaccaaagtttggtccaggagaaaatctcggcatatgcaatcactgacagtgctttctgacctacgaagagtgggaaaaaacaacagaacatacccctwtcctgttgaaacaggtgcctgttttcagtcaaaactctcgtcaaaagtcaacagattcaaatatttaaagacacatgctccaaatattccactcaaaaacaaagcacagaaaccactgcgataaaagttaaagtgctcaatatcattttgaggagagaataaaatgttgagaaaacaatcctgcaaccacccctggtgtactgatgtttat

SEQ ID NO: 733694 - DNA, 438 bp, Homo sapiens
ctggccgtttttttttttttttttctttgagacagagtcttgttctatcgcccaggctggagtgcagtggcaagatctctgcttactgcaacctctgcttcctgggttcaagcgattctcctgtctcagcctcctgaatagctgggattacaggygcctgcaaccacgcccagctaatttttgtatttttagtaaagatgaggttttaccatgttggccaggctagtctcgaactcctgacctcaggtgatctacctgccccagcctcccaaattgctgggattacaggtgtgggccactgtgcccagatcttctttttttatttttttgagacagagtctctctctgtcaccccaggctggagtgcagtggtgtgatctcggctcactgcaacctctgacttctgtgttcaagtgattcttctgactcagcctcctg

SEQ ID NO: 733695 - DNA, 393 bp, Homo sapiens
aatgttcaattctgtgacttgaatgcaatcatcacaaagaagtttctgagcatgctgctgtctgctttttatatgtaatcccgtttccaacgaaatcctcaaatctagccaaatatccacttgcagattccacaaaaagagtgtttcaaaactgttctgtctaaagaaatgtwcaactgtgttagttgaggacacacatcagaaactagtttctgggaatgcttctgtctagttgttatgggaagatatttccttttccaacgtaggcctgaaagcgctccaaatgtccacttacacacactacaaaaagagtgtttcaaacctgctctaccaaagggaatgttctactctgtgacttgaatgcaaacatcccaaagaagtttctgagaatgc

SEQ ID NO: 733696 - DNA, 623 bp, Homo sapiens
gccggaaagcgctccaaatgtccacttacacacactacaaaaagagtgtttcaaacctgctctgtgaaagggaatgttcaattctgtgacttgaatgcaatcatcacaaagaagtttctgagcatgctgctgtctgctttttatatgtaatcccgtttccaacgaaatcctcaaatctagccaaatatccacttgcagattccacaaaaagagtgtttcaaaactgttctgtctaaagaaatgttcaactgtgttagttgaggacacacatcagaaactagtttctgggaatgcttctgtctagttgttatgggaagatatttccttttccaacgtaggcctgaaagcgctccaaatgtccacttacacacactacaaaaagagtgtttcaaacctgctctaccaaagggaatgtwctactctgtgacttgaatgcaaacatcccaaagaagtttctgagaatgcttctgtctagattttacctgaagacaatcccgtttcccacgaaatcctcaaagctatgcaaatatcctcttgcagattctacaaaaagagtgtttcgaaagtgctctatgaaaagaaaggttcaactgtgtcagtagagggcacacatcacaaacaag

SEQ ID NO: 733697 - DNA, 609 bp, Homo sapiens
ttcacctcagatggaaggatgttatgttgctcctaagtcagaccctcactgcagctgaaaagcaggcagctctgatttcagagattagcaacatatctcctataatacaccaaaagggaagaaagcagataaggaaagagaagaaatagcagaaatgccattcccaattgggaggaaagcagtttcccttgacaaccctaattgggaccccaataactcaggagatgaaaaggaagctcttttttaagtgtgcattagagrgcctacggaaaaccagggccaaacctctcaattactctaaactgtccatgataaacagccagatgagaatcttgtagcctttatggaaaggctgagagaggcactaacagaacacccctccttatcccctgattcagtcgagggacagctcatcctaaaggacaagtttattagacaggcagctgccaatattaaaaggaaactacacaagcaagctataggaccagatagcaccttagagaacttcctgaaagtggccactttggtcttttgtaataggaaccaggaggaggcccaaaagaaagagacaatggtcagaaggacagagactctagcagcagctttgca

SEQ ID NO: 733698 - DNA, 609 bp, Homo sapiens
ttcacctcagatggaaggatgttatgttgctcctaagtcagaccctcactgcagctgaaaagcaggcagctctgatttcagagattagcaacatatctcctataatacaccaaaagggaagaaagcagataaggaaagagaagaaatagcagaaatgccattcccaattgggaggaaagcagtttcccttgacaaccctaattgggaccccaataactcaggagatgaaaaggaagctcttttttaagtgtgcattagagggcctacggaaaaccagggccaaacctctcaattactckaaactgtccatgataaacagccagatgagaatcttgtagcctttatggaaaggctgagagaggcactaacagaacacccctccttatcccctgattcagtcgagggacagctcatcctaaaggacaagtttattagacaggcagctgccaatattaaaaggaaactacacaagcaagctataggaccagatagcaccttagagaacttcctgaaagtggccactttggtcttttgtaataggaaccaggaggaggcccaaaagaaagagacaatggtcagaaggacagagactctagcagcagctttgca

SEQ ID NO: 733699 - DNA, 533 bp, Homo sapiens
ggaaggatgttatgttgctcctaagtcagaccctcactgcagctgaaaagcaggcagctctgatttcagagattagcaacatatctcctataatacaccaaaagggaagaaagcagataaggaaagagaagaaatagcagaaatgccattcccaattgggaggaaagcagtttcccttgacaaccctaattgggaccccaataactcaggagatgaaaaggaagctcttttttaagtgtgcattagagggcctacggaaaaccagggccaaacctctcaattactctaaactgtccatgataaacagccagatgagaatcttgtagcctttatggaaaggctgagagaggcactaacagaacacccctccttatcccctgattcagtcgagggacagctcatcctaaaggacaagtttattagayaggcagctgccaatattaaaaggaaactacacaagcaagctataggaccagatagcaccttagagaacttcctgaaagtggccactttggtcttttgtaataggaacc

SEQ ID NO: 733700 - DNA, 589 bp, Homo sapiens
aattaaacaaaagagcttctgcagggcaaaagaaactaccatcacagtgaacaggtaacctacaaaatgagagaaaatttttgcaatctagccatgtgacaaaaggctaatatccagaatctacaaagaactcaaacaaatttacaagaaaaaagcaaacaaccccatcaaaaagtgggcaaaggatatgaacagacacttctcaaaagaagatatctatgcagccaacagacacatgaaaaaatgttcatcatcactggtcatcagagaaatgcaaattaaaaccacaatgagataccatctcatgccaatcagaayggcaatcattaaaaagtcaggaaacaacagatgctggagaggatgtggagaaataggaacacttttacactgttggtgggagtgtaagttagttcaaccattgtggaagacagtgtggtgattcctcaaggatctagaactagaattaccatttgacccagccatcccattactgggtatatacccaaaggattataaatcatgctactataaagacacatgcacacgtgtttattgcggcactattcacaatagcaaagacttggaacca

SEQ ID NO: 733701 - DNA, 669 bp, Homo sapiens
gatgtgctgctggattcggtttgcaagtattttattgaggatttttccatcgatgttcatcagggatattggtataaaattctcttttttgttgtgtctctgccaggctttggtatcaggatgatgctggcctcataaaatgagttagggaggactccctctttttctatttattggaataatttcagaaggaatggtatcagctcctctttgtacgtctggtagaattcagctgtgaatccatctggtcctggactttttttggttggtagactattaaytattgcctcaatttcagagcctgttattggtctatttagagattcaacttcttcttttttttttttttttttgtgagacagagtcttgctctgtcatccaggctggaagcatgatctccgctcactgcaacctctgcactctgggttcaagcaattctcttgcctcaacttcctgaatagctgggattacatgtgtgtgcaaccatgcctgactaatttttgtatttctagtagagacggggtttcaccgtgttggccaggctggtctcgaactcctgatcttaagtgaaccactcaccacggcctcccaaagtgctgggattagaggcacaagccactgcgtcctgcccagatctcatctttaaggatcctttttctagggaagctt

SEQ ID NO: 733702 - DNA, 515 bp, Homo sapiens
gcagtataaaaggagagagaatgttcctgctatctattattatataaatatcaaccaccaaagagtgggttttaataatcatcatcctttgttttttgtctcgattctgcaggttgggcggggctgagtggggacagcccatctcagctctactcagcatctctggagcagctctgaggttagaggctggaaccatctggagcctttttctctcacctgtctggagttgatgctggctggcagctggcatctgacacggtactgttggctggaacatcacatggcctctccaygtagtataggcttcctcacaatatggtgggtaaatcccaagcgcaaacatcctaagatagatgagagacagggacagaaagggggcatgagtggcaggctggcactaccttgcatcttctaatctagactcaggggtcctccagcaccacttccattgcattctcttcctagaggtgagtcactaaagccagtccatattcaagaagtggaaaattggattc

SEQ ID NO: 733703 - DNA, 605 bp, Homo sapiens
cagcagtttgtctcagcttcttcccgcttctcttgggtctgttagagattcaggggtttgacttaagtcttcctaccttggaccaggggttggcaaactattgcccaggagccaaatctggcccattccctgtgtttataaataaagttttactagaacacagtcatgcccattcatttacattttgtccatggctgcccgcactctacaactagagttgcaaccgagactatatggcccacagcctaaaatacatatcatctggctctttatagaagaagtttgccagcccgtgacttagatacactggctgttatcttacctactgtcatttcaatgaagtagctactattttctttaggaagctttctgcttccttgagaagcaagacttaagtcttttttactttgcagaatcctacagacttgccaggattttccatcgactccagggacatttgcytatgtcccaagatgaagaaccatcattgccttaacccgagtgacattctctctgcctgtcgtctatcaccaacaagtcttcaggtctttctcaccactttggacaagaaaactggctttacatcattgtgcattgggcacttg

SEQ ID NO: 733704 - DNA, 635 bp, Homo sapiens
cactcacgttgatctagtatcacaagtggaaaacagtattacttgccataaacagaaggcaattataactataggtttttttaaaaaaacaaacaattttctcatattctacctaaatcctattcccattgaaagctctgatcctgaagtgtatcttcctcttgggacttccagagagttcaaagcatgtcagcactaaactaagagtcaacctgatatactcagaataattggaagtgaatccaaaaagggaggtgattcaatgtttttaaaatgatttttcagatagctcttaaaaccatttcatgttccacaagagatattgcttatggttcaagtgaataggttgtgaagcaagaattaaatttaaataccaaccctctyagtgagcagctgagtgactttgaggaagtgaatgtgcctctctgagcatgaagtttttcttatttaaaatgggctacaaaaaagtgccagcttcacacaaaaacatgtatgcaaatgtacatagcagctttactcaaaataaccaaaacctggagacaacccaggttttgaaaggcctagagatgcctttcagtaggtaaatggttaaacaaaaactgaggtacacccacaacatggaatactgttctgca

SEQ ID NO: 733705 - DNA, 636 bp, Homo sapiens
cccaggacatgagagttttagagttgtaagtaaatgttcaggaatggagtggggatacaggcagatgggctgctcctcagctcgcaggactgggccgccctagccggattggagaatctaagccacaggtgcaccacagtagatggcacagtgcaggctaggcaatgaagccagtgattttgccaagagcctgcttgatgaaaagtggagatgtggacccagacaggaagccaggygggagtgaccgctatgctttccctgagagaagcaaggtgcgctcacaaaggcttgcaggcacccgagtgagggatacacatctgatggtgcacaggggaaagtcaggccatctcacgtgaatgggtgctgcaggtggtgggtgacttctcaggggcagcatcacttagggaccaagagcgtgggcagctagggccaaatctctgccctgccacttattagctgtatggctttggataaattacccaacttcgcagtttattcatctgtaaaacagggaaaataacagtgccgaacccatagggttgctgtggaactaagtgaattgatatacgcaaagcattagaagagaacccaggacaaagtaagtcttatatacttgctattattactaatggtagt

SEQ ID NO: 733706 - DNA, 489 bp, Homo sapiens
cacctcccgggtccaagggattctcctccctcagcctcccgagtagctgggattacagagcctgtcgccacgcccagctaattttttgtatttttagtagagacagggtttcaccatgttggccaggctggtctcgaactcctgacctcaggtgatcctcccacctcagcctcccaaagtgctgggattacaggcgtgagccagcgcacccagcccagacctgcacttttgtatttatgtcacaggcctccttagtagaaagtggcggggaaagaacctagaagatccttgaagctcagaatttcctgtgggaagaggatgcgtccaccacagagcattcctggggagcccasgcatctctctgcacagtggcagcccgtggataacttcacctaataagaattgatagagctgacccagaaagtactagcctacaccggaccatagccctgccacccctagcaattatatagggattagagcagaata

SEQ ID NO: 733707 - DNA, 602 bp, Homo sapiens
tggaatcctggaccagaaaagggacattaggtaaaactaaggaaatctgataaagtgtgggactttagtcaatagtaatgtaccaatattgattcataattgttacaaatgtgccatgttaatgtaagatgtaataataagggaaattgagtgtggttgtattagtttgttctcacgctgctgataaagacatacccaagactgggtaatttataaagaaaaggaggtttaatggactcacagttccatgtggctggggaggcctcacaatcatggtggaaggcaaaggaggagcaaggtcaygtcttacatggtggcagcaagaaaaaatgagagccaagcggaagagaaaaccccttacaaaaccatcagagacttattcactaccaggaggacagtatgggggaaaccacccccatgattcaattatctcctactgggtcactcccacaacacgtgggaattatgggagctacagttcaagatgagatttgggtggggacacagccaaaccatatcagtgggtatatgggaactctctgtactatttttgcaatggctctgtaaatctattctaaaattgagatgttattttaaaagtt

SEQ ID NO: 733708 - DNA, 574 bp, Homo sapiens
aagtgaaatgaggatttctgaagagtatagcctggtgtgagctgtgagaatctcacagtaccggggagagcctgtatgaagatagaattgagaccaggtgacctggcaaaagggctccacccaccctgagtaaacttcaaggycaacccacatctcagacctggtagaccagtaggctggtctctctctctctctctctctctctctctctttttttttttttttcctatttctccatgggaacttccatgaaaatgtgctgactgcctctgaccctactaaaaacaatgggaaattccaagttttcacttttgcctcttgaagttgcaaggcaacttaccttgcaacatcgggaaaggctggttcattatactagccttagagatataagtactaggtcctaaactggaccctaacccgagctttgctcacatagaggggaaggccttggagagaatgaaatgagacccttacgggggaagcgcaccccctcccttaaaagactcgagttcagacatttagtttgggagctctcagctcccgttctctccctcctgggttgctcaaccctccc

SEQ ID NO: 733709 - DNA, 687 bp, Homo sapiens
agcctggatccaggtctgcccacaaggccctggaaggtgttagctgataatcaaggcagtcatttaaccatctatctgcctaagtgtatacaactcctcccagggacctctgcaggctaagagaaggttctttttgagaaaaaaaaaaaaaatgttgcaaattcaaaggaaaaatgctctgatgcagggtttccccatcttggtacaactgacactctagagtggaccattctttgttgagggggctggccctgtaggatggttggcagcgtccttggcctctacccactagattcccagagcacccctctccccacaaagctgtcacaactaaaaatgtttccagacattgccaaacgtcctctgcagggcaaaattgcccctggttgagaccactgatctaatggcagaagttggtacagagctgagagcgggaggacccatttctgaagccccatcagataaccacctgggcagctgcccggccaggtttgccygcaagactctgatcacagagcattctggagacctcgaggtgaggcagcagagggaacaaaatggcccttctacctcggaagcaaaggccaaggcaaagtcaggtttccagagctctcaatccttggcaggggcaggggaaggagacgtcgaaggcaaagccggactcaaacgtttcagagaaaccaaggg

SEQ ID NO: 733710 - DNA, 606 bp, Homo sapiens
tgtaatttgcatgcacttggtggtttaaaccacaaatttgctgtcttaaaccaacagaaatttattctctcaaagttgtggaagcaagaagtccaaagtcaaggtcaaggcagcgaggccctgcctcactgccttcaaaagctcgatgggaaaatccatttctttccttttccacctcttagggactgctgacattccttggtttgtggcggcatcactgcaatctctgtctccatcttcactttgccttctctgtgcttgcttccctcttacaaggatacgcraaattggccaggcacgtggctcacgcctgtaatcccagcattttgggaggccaaggcgggtggatcacctaaagtgatcccagctactcggaaggctgaggcaggagaattgcttgaacctgggaggtggaggttgcagtgagccgagatcgcaccattgcactccagcctgggtgacaagagctaaactccatctccaaaaaaaaaaaaaaagaaaaaagaaaaaggatacaagtaattacatttagggctcacccagataatccaatccaggataatctccctgtctcaagagccttagcttaatcacacctgcaaagac

SEQ ID NO: 733711 - DNA, 540 bp, Homo sapiens
gccatttcacttccaggtacttaagtatgcatctcttaagaaaaagaagagaacattttcttccattatcacacctaacaaaattaacaagaagtcctttttataatctagtagccagtctatatccatattccctcaatggtttaaagtatgtgatttaggctggrcacggtggcttacacctgtaatcccagtactttgggaggctgaggggggaatggatcacctgaggtcaggagttcgagaccagccgggctaacgtggttaaatcccatctctactaaaaatacaaaaataagctgggcatggtggtgggcatctgtaatcccagctactcgggaggctgaggcagcagaatcacttgaacctgggaggcagaggttgcagtgagccaagatcgcactattgcactccagcctgtgcgaaaagagcaaacttccatctcaaaaaaaaaaaaaaagaaaaaatgatttaaacagtactgctggctaggcatggtggctctcatgcctataatcccagcactttgggaggccaagg

SEQ ID NO: 733712 - DNA, 540 bp, Homo sapiens
gccatttcacttccaggtacttaagtatgcatctcttaagaaaaagaagagaacattttcttccattatcacacctaacaaaattaacaagaagtcctttttataatctagtagccagtctatatccatattccctcaatggtttaaagtatgtgatttaggctgggcacggtggcttacacctgtaatcccagtactttgggaggctgaggggggaatggatcacctgaggtcaggagttcgagaccagccgggctaacgtggttaaatcccatctctactaaaaatacaaaaataagctgggcatggtggygggcatctgtaatcccagctactcgggaggctgaggcagcagaatcacttgaacctgggaggcagaggttgcagtgagccaagatcgcactattgcactccagcctgtgcgaaaagagcaaacttccatctcaaaaaaaaaaaaaaagaaaaaatgatttaaacagtactgctggctaggcatggtggctctcatgcctataatcccagcactttgggaggccaagg

SEQ ID NO: 733713 - DNA, 613 bp, Homo sapiens
tgttctctgtatttcctgaatttgaatgttggcctgccttgcttggttagggaagttctcctgtataatatcctggagagtgttttctaacttggttccattctccccatcactttccagtacatcaaactgtggtcttttcacaaagtctcatatttcttggaggctttgttcatttcttttcactcttttttctctaatcttgtcttctcactttatttcattaatttatgttcaatcactgatatcctttcttccacttgatcaaattggctattgaagcttgtgcatgcrtcacaaagttctcatgccatggttttcagctccatcgggtcatttaggttcttctctatactgtttattctagttagccattcgtctaaccttttttcaaggtttttagcttccttgcgatgggttagaacatgctcctttagctcagaggagtttgttattaccaaccttctgaagcctacttctgtcaactcgtcaaactcattctcagtccagttttgttccctttctggcaaggagctgtgactctttggagaagaggtgctctgttttttggaattttcagcttttctgctctggtttctccccatctttgtgg

SEQ ID NO: 733714 - DNA, 639 bp, Homo sapiens
ctctagatttgaggaaatgatggaacacagatacttgtaaagtcactgctatcctcttcctgtcactcctgtagtattagctctggagtcagacagatcagggttccaccccagctctgacactggctagctgggtgcccttccacaatcacatctctctctgagcctcagcttcctcccctctaaaaggtggatattaattcctgagtcccaggtgtgaggatgaaagcagatcatgtgcataaagtacttagcaccatccatggtgcacagtaggcacycaataaatctactttccccatctgctttcttcctgtggctcagtgtggcaaggaatttagtgagcacaagggtcatgtctctgttgctcatccttgtacctccacacagtattggagatataggaggtgctccatagatatttgctgactgagaggatgagtatgaataaatgagtagattaatgagtgaatgagaagttttccattctgattaggctgggaattaatgggaggtgttaggttgtatgatggcctttgttagtgtaaaataagtcactgaaatggagcaaagcaatcctttctgtcatattaccaaatccaagacagttctcatccaggaatttactgggccaacctc

SEQ ID NO: 733715 - DNA, 594 bp, Homo sapiens
aggggaccaagtctgggaggtggtgtgggccacgggcttgctcacaactcagtgtcagactctcgtgaggccccagtcactgacggccacaacagcaaccagacaaaacagaaactgcccttcaccagctgagcttccctcttaaacatctctgaaacccatcagcttctgcatcactgcctccctgctagctcaggcccccaccttcccagccaaagggttctatccaaaacctctggattgtaacacaccctgtgtgaaacyttcactggctcccattgtccaaggacaaactgcagactcctgtgcatggactttaagatgctcccagatccggcacctgctgaagtctgcagcctcactcctgctattccccagaccacccccattcccacccagccagattggacaatcttgagttcttggaagccgctgtatcctctctcacctccagactttgtgtatgtttttccccacacctggaattcctttccctccctcttaattcttaccccataacatttatcttcacccagtgtgataggtttgtgtcccctcaaaatgcatacattaaagtcctagcccccagtattt

SEQ ID NO: 733716 - DNA, 631 bp, Homo sapiens
accattgcctcccaagtttatcatagccagctccgtgctataaggccctgggggctaccactttctttaggctgtctttccttttcctgagccggcatcggtgcctcttccatctattcccacaccctcaaacatcagctcataaccctgtagccattacgaacacagccgcctctcctcggcccattcacaaaaggttaaaagcagcagccgccgtrtggagctgtagctgccagggctgggagcgagatattctgtcagcacgtcctgaaattcttttggaagtttgacaggattaaggggattaatacattaaagcattattacagcattcacaggggattttcaaaagactttacactgtgatctatttgtcctgttacataaaactcgcgttaataggctgatggtgagggccaaacagaatatctgtggaatcaataaccttattttttggtaaacacatttagcaggcagagctggtcattaaggcctgcagaccctcccacggcgcgcatcaacgaaattacccttggagaatccatttgccaattaagctgagggcttgtctgagtcctcaagcctgctgatggcagggggcaggagagagagtgtctgccttccgccctcc

SEQ ID NO: 733717 - DNA, 620 bp, Homo sapiens
ctgataatgaagctcactaagcgtaggccttggagtcagacagactcagcaccgggaccttgggcaagtggcttcgtgtctctgagcctcaagttctctgtccttaaaataaggataaaaatacctccttcagaaggtagttgtgagaatttaaaagtttctcctttaggaaccagcttagaataaggactcagtaaatattggccaccctttctgcctgactcccccsctatttataaagtttggaaaagaaagtgccttatatgttgcgaaaaatgatgccacaaagcaagtcaatggtggggagagaacaatagctcccggaaggaatggtgctagtaatggaccaccgcacccataatattctgcaagtgctcccctaccccattcttgcattacaaaaaaaatttaattccatttattggtcaacttttcccatgaggacacatccttaatttaatcatgtaaatcaatgagaaaatctaattcactttagagaaatttgcttcaaggctagccttatgggaatgaatctgttccttaaagtgtatccatagcaagtgacgtgtgtctttatcacagttacaaagggatataaattaatctctagcccattttag

SEQ ID NO: 733718 - DNA, 656 bp, Homo sapiens
ccattatctccctgctaaagtgtgtgaaaaggttattttcactagcaaattggcccttagaagctggagattaaataaacaaacgcgtgaccagtttattgcaaggtttgcatgctgccagcctgggcctcagccggcctgctgatgggggccatttgattgtgggtctgcttgacaatggctatgctcagtgtcctgtttacacaatgaatctataatgtaatttcacgaggttccgaaatgcaccaagaagcatgcgaggattccgtgcctcagcctaatccatatgaaacagtctggaaatgcgcctagtgaccacatgragatggagtggagctgcggccggggcccatccttgcttaaaaaggattatcatagagcgagtgggcaaggcagggacctggggtgaagtggatgcaaatcttatggaagtggatgggaaggattcatggacaattcgtgggcgtctccaaacccacccctcctgcaggaactgggatgcttgtggctgtgggcacaggtgccaacaaatgacaatggaggttaaggaacaaaggatgggtttctgtttgctaatgcaaattttaataaaaaccaagtagtcacagacaccgaaagaacaaggactctccctcaggtgaaactgggttttgttt

SEQ ID NO: 733719 - DNA, 632 bp, Homo sapiens
gatgaggcataaaagactactgttgggtacagagtatactgcttgggtgacaggtgcactaaaatctcagcaatcaccactaaagaattcatccatgtaaccaaaaaccaactgtaaccaaaaactattgaaataaaaaaaaccaagaaccacaaaaaactgagatggcaaatgacaaggggaagacctatttcatttgggctggttagggaaggccacccagagcatgggtgcagagctgacactcaaagggaaaagagccactcatgtcagaagtgaggagaagggccttccaggaagaaggagcatygtgtgcaaaggccctggggctggaaagagtgcagcacgcatgaaagactggaataatagcaggtggccagactatagcaagagcaggacagaacagtgggtattgaacctagacagggagttgggaaccatgtcctgcaaggccttaaaggtcatttaaggatctgagtttctatcctaattgcagtgggacccactgtaagggagtccattgaaatagacaataggaagatattgtcttacgaatgttgggttctgacctaccatattagcactttctcctctgcttggtcaaaaaccaagacattcataagacaattttc

SEQ ID NO: 733720 - DNA, 424 bp, Homo sapiens
tttgggttctctattctgttccattggtctatgtgcctgttttataccagtaccatgatgttttgatgactatggcctatggtatagtttgaagtcaagcaatgtgtctccagatttgttctttttgcttagcttgctttgactatttgggctccttttttggttccagtwtttagccatggttcctaaaattccatgactttggggattgtttttttctagttctgtgaagaattatgatggtagtttgttgggcattgcattgaatttgtaggttgcttttggtagtatggtcattttcacaatattgattctacccatccatgagcatgggatgtgtttctatttatttgtgctgcctgtgatttctttcagcagtgttttgtagtttttcttgtaggagtgtttcacctccttggttagg

SEQ ID NO: 733721 - DNA, 645 bp, Homo sapiens
aaagggaggatccacatgccaggtgcgatggcaggagattacatcatgctgcttagaatggcatgcagtttaaaacttacgaatagtttgtttctagaatttttcttttaatatttttcaactatggtggactgtgggtaattgaagctatggaaagtgaaaccatggataagtggggggctactgtatgactattcttggtccttgctttttccatacactgctgcacacacacacaccccctgccatcacctcatggaaatatatatacatatatgtttcacttttttcttttmtttttttttgagacagggtctcgctctgttgcccaggctggagtgcagtggcacgatctcggctcactgcaacctttgcctcctgggctcaagcgattctctgcctcagcctcccgagtagctgggactacaggcaagcgccaccacgcacggctagtttttgtattttcagtagagatggggtttcaccatgttggccaggctggtctcaaactactgagctcaaaggtatccgcctgcctccacctcctgaagtgttgatattacaggcatgagtcactgcacccagccctgttttgcattttacagttgaaaatgttcaaatgtacacaaagcaaaaatagtataa

SEQ ID NO: 733722 - DNA, 685 bp, Homo sapiens
tatataaaaattaactcaaaatggatccaagaccttaacctcttaagagctaaagcaataaaactcttagaagcaagcataggcatacatcttcatgaccctggattaggcaatgggatcttagatatgacaccaaaagcacaaacaacaaaaagataagatggacttcatcaaaattgtgcttcwaaggatactatcataaaaataaaaagtgacccaaagaatgggagaaagtgtttgcaaatttcatatctgatatctaaaatatataaagaactcctgcaactcaagaacaaataactcaactgaaaaattggcaaaggatctgaaataggcaattttccaaagaggatatacaaaatggccattattaaccatcagggaattgcaaatcaaaagcacaatgagataccacttcactcccactgggatgtctataggaaaaaaaaagggctgatgagaacgtggagaaactggaacgctcacatgctgctcatgggaaactaaaatggtataatcactttgaaaaacagtctggcagttccttaaaaggttaaacatagagaaattatatgtactaacaagtccactactagatgtggacccaagataactgaaaacatttgtccataaaaaatgtgtacacaaatgttcatacagcattattaacagccaaaaagtagaa

SEQ ID NO: 733723 - DNA, 637 bp, Homo sapiens
taaacttcaaggggaacacaaagtgacagcagcccgaaggaatagcagcagttctacccactcttgctcatttgttcatttattcagcacctaaaacagtgtctggcataaaacaagccataaatatttgcaaatgaatgaccaaatgaatgcatgaatttagcaaatacaggcttagtgcctgaatgtgcaagtccttatgtgagacactagaatgcagcagtaaatcagaatccatccctgccctgactgaggatccaagggaaggaacagatgattcccattcccatgtgtgataagtcatgcaagccagaaacaaggagtagctgcaggtgcacacaggagggcctgggtgagacccccaygaaggtggcccagcagaaatggggcggggggtggggggtgagcaggttatatacagccaagggcacatatgctgagtcacaggggtttggggtgcctgataatggaagtgccttctctgacttcttgtggcatccccctgcaggtaacaactgtgaatatcatcaagtcacaacctgggtccccagcactctggactgggtggggctggagctggagttcctttattctggggatagctcaagtccactgccaatggctgacagtcattaat

SEQ ID NO: 733724 - DNA, 561 bp, Homo sapiens
gtttggatccattgctggtgaactagtgtgagtctgggggagtgtgatgagcctcattttgccatattaccagggttggttttctgtttccttctcattcaggtaggctctgtcaaagggaaggtctatggttgaaggctgttgttcagattttttgtcccatggggtgttcccttgatgtagtactctctcccttttcctgtggatgtggcttcytgtgagccgaactgcagtgattgttgtctcttttctcagtctagccacccagtgagtctacctggctccaggctggtactgggagttgtctgcacagagtcctgtgatgtgaaccgtctatgggtctctcagccacagataccagcgcttgttctggtggaggtggtggaggatgcaatagactctttgagggtccttagctttggtggtttaatgctctatttttgtgctggttggcctctcaccaggaggtggtgctttccggagagcaccagccgtggtagtgtagagagggactggtggtgggcggggccctagaactcccaagagtatatgccctttgtc

SEQ ID NO: 733725 - DNA, 561 bp, Homo sapiens
gtttggatccattgctggtgaactagtgtgagtctgggggagtgtgatgagcctcattttgccatattaccagggttggttttctgtttccttctcattcaggtaggctctgtcaaagggaaggtctatggttgaaggctgttgttcagattttttgtcccatggggtgttcccttgatgtagtactctctcccttttcctgtggatgtggcttcttgtgagccgaactgcagtgattgttgtctcttttctcagtctagccacccagtgagtctacctggctccaggctggtactgggagttgtctgcacagagtcctgtgatgtgaaccrtctatgggtctctcagccacagataccagcgcttgttctggtggaggtggtggaggatgcaatagactctttgagggtccttagctttggtggtttaatgctctatttttgtgctggttggcctctcaccaggaggtggtgctttccggagagcaccagccgtggtagtgtagagagggactggtggtgggcggggccctagaactcccaagagtatatgccctttgtc

SEQ ID NO: 733726 - DNA, 488 bp, Homo sapiens
gggtatacacacacacaaaagcatgtagcacttctgtcacctaaaattgcccaagtctgcagatgtgaagataagacatttctatgacaaaacaagtttgcagatttttgtcgctgcttttctcactgaggtttcttcttctctctgcttatgtgctttattcttcttcattttttttttctaattttacttctcaacatgtgagttgaatcagtgcatcctaccctcacccwactactgcatttttcttccaacagctgcacaatgaattccaatttccctagcctggcattcgaggtcctctataatctgatgtcatccattcattatacaggtattcatccattcacatgttcatttatcttttcattaaattagtattccttaagtccaaagtacaataatagggactagaaatacatgaataagataccctaactgcatcaaggatcttggagtctagcatgaagcacacacaataacgatta

SEQ ID NO: 733727 - DNA, 623 bp, Homo sapiens
ctgaacttttagattaaaatattttcaaaattttaacatgaaggtctccaaaaaacagttttttataccaccctagcatttttttcacatttgctcaaaagaaagaaggagtaggaagagagagagaaagagaaagaagcctccttgacttactgtgctttgcctttgccaaagaaaattctgtaattaaattctgcattagaaatccagcttgtggctaggcacagtggctcatgcctgtaatcctaacactttgggaggccaagacaggagaattgcttgaggccaggaggtcaaggccagcctgggcaacatagcaagacccatctctatakcataaaagaataacataaaaagaaataggaaaacagtgagatcttgtctctatgaagtaaacaaataaataaaatagtataaaaagaataaaataggaaaatattaacaaaagaagtctaagacttatactctgaaatctactgttattgaaataaattaaagaactaaataaagggaaagacattgtgctcatggattaggttaatattgttaaaatgacagtgctcaccaaattgatctacaaattcaatacaattctttcaaaattccaactaactttttttttc

SEQ ID NO: 733728 - DNA, 623 bp, Homo sapiens
ctgaacttttagattaaaatattttcaaaattttaacatgaaggtctccaaaaaacagttttttataccaccctagcatttttttcacatttgctcaaaagaaagaaggagtaggaagagagagagaaagagaaagaagcctccttgacttactgtgctttgcctttgccaaagaaaattctgtaattaaattctgcattagaaatccagcttgtggctaggcacagtggctcatgcctgtaatcctaacactttgggaggccaagacaggagaattgcttgaggccaggaggtcaaggccagcctgggcaacatagcaagacccatctctatatcataaaagaataacataaaaagaaataggaaaacagtgagatcytgtctctatgaagtaaacaaataaataaaatagtataaaaagaataaaataggaaaatattaacaaaagaagtctaagacttatactctgaaatctactgttattgaaataaattaaagaactaaataaagggaaagacattgtgctcatggattaggttaatattgttaaaatgacagtgctcaccaaattgatctacaaattcaatacaattctttcaaaattccaactaactttttttttc

SEQ ID NO: 733729 - DNA, 590 bp, Homo sapiens
actccatttctttgggagaaagtaagggataggaacaaaagtctctgcatggtaatccagagaaatctttcagatcttgtccaagaccatcaaggtggtacctctacaagtctgcaggaaacaagtgttaccaggcttggggtgccgcccaaaccagaagaagcttagaccacaacaccgaagtcctttcaaatacctggaaagccttcccaagaagaaagactgcaaataagcccagacagtgaagactataataaatacctaactcttcaatgcccagacatcaaataatgtctactagcattaaaaccatccaggaaaatatgatctcaccaaatgaactaaataacgcaccaagtaccaatcctggagaaacaaggatatgtgaccgttcagacagagaatkcaaaatagctgtagtgaggaaactcaaagaaattcaacacaacacagacaaagtattcggaattctattatataaacttaacaaagagattgaagtaattaaaaagaatcaagtagaaattctggagctgaaaaatgcaattggcatagtgaaaaatgcatcagagtcctctagttgcaaaact

SEQ ID NO: 733730 - DNA, 599 bp, Homo sapiens
aatctgcactgtagaccaaatggatgtaatagatatttatggaacatttcattcaacagctgcagaatacacattcttttcctcagcacatggatcatgcttaaggatagaccacatgttaggtcacaaaaaagtcttaaagcattcaaaaaaattggaataatatcaagcatcttctctgaccacaatggaataaaactagaaaataataacaagaggaattctggaaactatacaaatgcattgaagttaaacaatrtgctcctgaatgaccagtgggtcaatgaagaaattaagaaggaaatttaaaaatttcttgaaacaaatgataatggaaacacaatataccaaaacctatgggatacagcaaaagcagtactcagagagaagtttataagtgcctacatcaaaggagaggaaaatcttcaaataaacaatctaacaatgcaccttaaataactaaaaaagccaggcacagtggctcatgcctgtaatcccagcactttgggaggccaaggcgagtagatcatctgaggtcaggagttcgagaccagcctggccaatatagtgaatccccaactctactaaaaatagaaaaa

SEQ ID NO: 733731 - DNA, 605 bp, Homo sapiens
agagcaaaggctggatcctgcccactgtgtaccatggcatgtacaatgccaccacccggcaggtggaaatggagctcttcccctgccttgggcactttggactgaggttctatgcctacaaccctctggctgggggtctgctgaccggcaagtacaagtatgaggacaagggcaggaaacagtctgggggccacttctttgggaatagctgggctgagayccacaggaatcgcttctggaaggagcaccactttgaggccatttccctgatgcagaaggccacacaggccgtgtatggtgtcagtgcccccagcatgaccttggccacccaccctctggtggatgtaccaccactcacagctgcagggtgcccacagagacgtggtcatcctgggcatgtccagcctggagaagctggagcagaacttggcagtgatggaggaagggcccatggacccggctgtcatggacacttttaatcaaacctggcattttgttgcccacgaatgtcccaactacttccgctaggcccatcatggcccaggctgcccaaggcttttccgtcacctcttttattctctcacgctgaccagtcttggccttga

SEQ ID NO: 733732 - DNA, 565 bp, Homo sapiens
ggcagaaggcgaaggaagagcaagtaatttcacatggccagagtaggagaaagagagcggggaggaggtgatacacatttttaagcaaccagatctcacaagtatgtgatgacggcaactaagggggatggtgttaagccatgagaaaccacccccgttatccaaccaccttcctccaggccccagctccaacactgggaattacaattcracatgagatttgggtggggacacagatctgaaccatatcaaatttcttcccaactcctgttaatgttgggtttttttttgtcttttgtttgtttatttgttttgttttgttttgttttgttttttgagatggagtctcactccgttgcccaggctggagtgcagtggcacaatctcggctcactgcaacctccaccttctgggttcaagagattctcctgcctcagcctcccaagtaactgggattacaagcgcccaccaccacacccggctaatgttttatatttttagtagagacaggatttcagcatgttggccaggctggtcttgaactcctgacctcaagtgatccacc

SEQ ID NO: 733733 - DNA, 612 bp, Homo sapiens
aaagtcaccagctgcattagctcctaacaagagagtcaacctgtcctttgaacctttgaagccaagcactgacttctcctctgcagctattaaaatcctagatgctggccgggcacggtggctcatgcctgtaatcccagcactttgggatgccgaggcaggcagatcacttaaggtcaggagttcaagaccagcctgaccaacatggcgaaaccccatctctactaaaaaatacaaaaattagctgggcatggtggcgggcgcctgtaatcccagctacttgggaggctggcgcagggagaattacytgaacccaggaggcggaggttgcagtgagctgaggccgccccactgtactccagcctgggcaacagagtgagactctatctcaaaaaaaaaaaaattcctagatgccatcttcttctaatataaggctgttttgtctacatggaaaatctgttgtttagtgcagctactcttatcaatgatcttagttaatcttctggataacttgctgcagcttctccatcagcacttgctgctctttgcacttttgtgttgtggagacagcttctttccttaaacctcatgaaccaacctctgctagcttca

SEQ ID NO: 733734 - DNA, 612 bp, Homo sapiens
aaagtcaccagctgcattagctcctaacaagagagtcaacctgtcctttgaacctttgaagccaagcactgacttctcctctgcagctattaaaatcctagatgctggccgggcacggtggctcatgcctgtaatcccagcactttgggatgccgaggcaggcagatcacttaaggtcaggagttcaagaccagcctgaccaacatggcgaaaccccatctctactaaaaaatacaaaaattagctgggcatggtggcgggcgcctgtaatcccagctacttgggaggctggcgcagggagaattacctgaacccaggaggcggaggttgcagtgagctgaggccgccccactgtactccagcctgggcaacagagtgagactctatctcaaaaaaaaaaaaattcctagatgccatcttcttctaatataaggctgttttktctacatggaaaatctgttgtttagtgcagctactcttatcaatgatcttagttaatcttctggataacttgctgcagcttctccatcagcacttgctgctctttgcacttttgtgttgtggagacagcttctttccttaaacctcatgaaccaacctctgctagcttca

SEQ ID NO: 733735 - DNA, 523 bp, Homo sapiens
cgctggctgcctgtgctgtcccacccccgccttgaggcggagctgagggcacttgagaggattgtcctgaatgtcacctgggtggtggataagggcaggtgcatgtcacaaatcaaggatgttggttctgtttcgcattctaatctctaagaagagtttatgatgtaaatgtattgaactgatagaatttcttagaacatttcttaggaaggtttagtcttctaaactcagggaagcggacggtcttcgcggccaggggagattctgttccccaggggggcatttggcaatgtggaaacatcttcggttgtcacagcttggggtggggagaggggactgcgatgggccaggccctgctcctctgcctgcacccaggccccctrgctcactcattcaagccacctcctgggcctcacaggcattggagggcgaaaggctttggatgggagctgcccctggcacacagcagtgggctctcagccgggctgacgctgctctcagatcagcttccttcctttcctgc

SEQ ID NO: 733736 - DNA, 542 bp, Homo sapiens
aatcccattaccgggtggatacccaaaggaatataaattgttctaccataaaggcacatgcatgtgtatgtccattgcagcactattcacaatagcaaagacatggaatcaaactaaatgcccatcagtggtggattggataaagaaaatgtggtacatatacaccatggaatactatataggcataaaaaagaatgagatcatgccctttccaggaacatgggtggagctggaagccattgtctttagcaaactaatgcaggaacaaaaaacagctcctttctcggggttctctctggatctgcacagctcctctctgggggttccctctggatccacacggcttctgtctsgaggttccctctggatccacacggcttctgtctcggggttccctctggatccacacggctcctctctcgaggttccctctggatccatacggctcctctctcgaggttccctctagatccacacggctcctctctcgaggttccctctggatccacatggcccctttgaggctcttttgttccagtgta

SEQ ID NO: 733737 - DNA, 590 bp, Homo sapiens
ctttgcaaatatattcaagttaagatgaagccgttagggtgggctttaacccactatgaccagtgtccttaagagggcagtttggacatagatgctgttttagtccattctgtgctgctataacagaaaaccacagagcgcatcatttataaacaagaagtttatttggctcacggttctagaggctgggaagtccaaaatcaaggggccatatctggtgagggccttcttgctgagtcatagcatggccgatggcatcacaaggcaagagggagcccaggagcccacacttctttttttgtttgtttgtttgtttgtttgagatggagtctgactctgtcacccaggctggagtacagtggcgtgatcttggctcactgcaacctccgccttccaggttcaagaaattctcctgccttagcctcctgggtagctggsattacaggcgcccaccaccacccccagctaatttttttgtatctttagtagagacagcgttttgccatgttggccaggctggtcttgaactcacgacctcaggtgattcacccgcctcagccccccaaagtgctaggattataggcctgagc

SEQ ID NO: 733738 - DNA, 487 bp, Homo sapiens
ccccacacccagccaccaattgaatttctatatactaacaaccagcaagcaaatactggggaaaaaaaaactaaatccaattataatagcatcaaaatatgaaatatctagggataaatctgtctacacatataaaaacctatacagtgaaaagtactaaatattcctgagagaaattaaagaagaactaaataaatggagtgatatacttcattcatgggtcagaagactgaataatgttaaaatgtaaatcctcccaaaattaatttatagattcaaaataatgccaatcaaagtcccagcaggcttttgtttytaatagaaagtgacaggcagattccaaaattcatatgaaaatgtaaaggaccagccagacacggtggctcatgctgaaatcccagcactttgggaggccgaggcaggtggatcacctgacatcaggagttcgagaccagcctggccaacatggtgaaaccccgtctctact

SEQ ID NO: 733739 - DNA, 576 bp, Homo sapiens
taggaagtaactaacttgattttgattttacaggctactaggcggaagggacttgccttgtctcagatgacactttggacttggacttttgggttaatgctggaatggttaagattatgggggactgttggaagggtatcattgtgttttgaaatgtgaggacatgaaattttggaggggccagaatctgaatgatatgattcagctctgtgtccccacccaaatctcaccttgaattgtaatgcccataatcccccatgtgtcaagggagggaccaggaggaggtaactgaatcatgggggcagtttcccccatgtgtcaagggagggaccaggaggaggtaactgaatcatgggrgcagtttcccccatgctgttctcatgagaatgagtgagtctcatgagatctgatgattttattaatataagggtctggcatttcccctgcttgcactcattctctctcctgccaccctgtgaagagatgccttctgccatgattgtgagtttcctgaggcctccctagccatgcagaactgagagtcaactaaacttcttttctgtataaattacccag

SEQ ID NO: 733740 - DNA, 655 bp, Homo sapiens
aaaggtattaatctttttcttttcattttaatctgaaacaaagcaatggtacaaagaaaaccaagtgtcgaatggagggaaggggtcaaaatatcacacagcactgataaccagaaagacaaaggaaaactttgtcctttggctatatatttttagaagcatccacattaargctctgaattatttcatgggtccatattcctggtcacatgtaacccaaaatagaacattacacaactgttgttcaggagcctttgaaaattttacataatctttctaacgctcaccttgtaactgtgtttgctgggaagatgaaaaggggaaaaaataaaagactgaaaaaggagggaagtgaacatctgttaaaagaaaaaattacctttatcaacttccaggcttccaactcattaatagtacttaacctatcagcgtaaatgtatgcacacccaaaataagcagaactagcttggccttagggtaaacgccataggtggctattacaatgactcttgccaatacaaccaatgtactactagtattggaactttaatatctactacagacaccacagaaataagatctaatactatgggagctgtaagaaagggacacctaattctgctaggaagagacaggaggacacattcctctacat

SEQ ID NO: 733741 - DNA, 655 bp, Homo sapiens
aaaggtattaatctttttcttttcattttaatctgaaacaaagcaatggtacaaagaaaaccaagtgtcgaatggagggaaggggtcaaaatatcacacagcactgataaccagaaagacaaaggaaaactttgtcctttggctatatatttttagaagcatccacattaaggctctgaattatttcatgggtccatattcctggtcacatgtaacccaaaatagaacattacacaactgttgttcargagcctttgaaaattttacataatctttctaacgctcaccttgtaactgtgtttgctgggaagatgaaaaggggaaaaaataaaagactgaaaaaggagggaagtgaacatctgttaaaagaaaaaattacctttatcaacttccaggcttccaactcattaatagtacttaacctatcagcgtaaatgtatgcacacccaaaataagcagaactagcttggccttagggtaaacgccataggtggctattacaatgactcttgccaatacaaccaatgtactactagtattggaactttaatatctactacagacaccacagaaataagatctaatactatgggagctgtaagaaagggacacctaattctgctaggaagagacaggaggacacattcctctacat

SEQ ID NO: 733742 - DNA, 608 bp, Homo sapiens
tgttggaattacaggcatgagccaccacgcccaggcagccctatttctttaaacctatatattttgcacttgttaaaagtatttgtacatacacttatccagcttcccttgtttatgtatgcttgaattttgtataagcttaaatattttttccaatctaagctttattttatcccctttcttctacatttgtataactttaggtgactgtctttgttaaagttttttctgaaaaggcttaaaatasaatatagttcttggcatcaacttgaaagttatttgaggagaaagggagatttataatgatgattcaaatgaagcaaactaaaaaataatgaagcaagacgaggaaaaagcagtattcacttgagcacatcccaaaagaataacatttcaaatgtaagtagaaaaagtatactgaagttcacaatacagaaagaattattaatactcaaaatagctttaaagccctgctcagcttttgaatgttgggaattgacccggaggtagctgtaacctaagatggttccttcagtaatgaccattttttctttctcaagatgatgattattctccaccttctaagagacaaagaccaacgagccacc

SEQ ID NO: 733743 - DNA, 612 bp, Homo sapiens
ttcaccatgttggctaggctggtctcaaactcctgacctcagaggatccacctgtctcagcctcccaaaatgatgggattacaagtgtcagccactgcgcatggccgctattttttaaattttactctcttaataaacttgtttttgctttgcaccgtggactcgccctgaattctttcttgcaygagatccaagaaccctcacttggggtcttgggattgggattggcaactgtttcctgtaacacttccacaaatagaggatggtggaaatgatgccatatgatttctcaagtgggtcattaaaatgtcctgcacttctgctttgttctcttgacatattggctcctggaatgcagccaacatgcaatgagaaaacccaggccatgtggggaggccacatggtgatgtcacagccagcagattcatctgaggtcctagtcagtatcaacacccagatttcttcagatggtttcaccctccagctgtcatgtcactcacagcctttgaggctttctagctgaggccccagacattgtagcgcagaaactagctgttctccagtgtccttctcaaatttcagacctacagaatccatgagcataacgaaacg

SEQ ID NO: 733744 - DNA, 551 bp, Homo sapiens
ccaccacccaccacgcttggctgcctaggcctcccagagtgttgaaattacaggcgtgtgagccactgcgcctggcccttcctataacttttgatgtaatgtgttgtgctgggtgggatcattgtcaagttaaacattaggatggaaaactgacagcagrcttaagtcccttctaactccaagcctctatgagtcgaatctagtcttttcctcattcataaaataagcatagttattaccttgcctgcctacttcacaccacgcctgttagcattggttgtgaccacattggtttggaaagtgctaaaaatttaaggggtatcctttcgggcaacactcatcatgcttacctcatttcagcatgccaactccacatgacttatggaagtttccaaaacacctcaaaatagaaagaattctaatatgaccccttccgcccatacccatcacccagtggcagaaattaccagtatttttttgctaagctcatcatatggtttattgaccttgttcccatctgccttctcctgagcactttctacgttgccagc

SEQ ID NO: 733745 - DNA, 551 bp, Homo sapiens
ccaccacccaccacgcttggctgcctaggcctcccagagtgttgaaattacaggcgtgtgagccactgcgcctggcccttcctataacttttgatgtaatgtgttgtgctgggtgggatcattgtcaagttaaacattaggatggaaaactgacagcaggcttaagtcccttctaactccaagcctctatgagtcgaatctagtcttttcctcattcataaaataagcatagttattacctygcctgcctacttcacaccacgcctgttagcattggttgtgaccacattggtttggaaagtgctaaaaatttaaggggtatcctttcgggcaacactcatcatgcttacctcatttcagcatgccaactccacatgacttatggaagtttccaaaacacctcaaaatagaaagaattctaatatgaccccttccgcccatacccatcacccagtggcagaaattaccagtatttttttgctaagctcatcatatggtttattgaccttgttcccatctgccttctcctgagcactttctacgttgccagc

SEQ ID NO: 733746 - DNA, 407 bp, Homo sapiens
gggaggctgagagtggaaggatcccttgagcccaggagagccaggctgcaatgagctatgatcacaccattgtactccagctggggcaacagagtgagaccttgtctctattgaaaaaaaaaaaaaaagaaaaagaaagaatgaccagaactctgactttaactcacaggaaagcaagtaattagaatacgaggtaagggctgtgattaaagcatatacaaggattgctagaccttctctggaggtgtaagcaatcwtttccaaagaagtgatatttgagctgggtattgaataatgggagcacattttccaggtggtcaagaaggtaaaggatatttcaaggcagagggaatagtgtgggcaccagggaaggctgtgtgtctgagaagttgtggtggtttagtggt

SEQ ID NO: 733747 - DNA, 611 bp, Homo sapiens
accagctaaatatagagtagccatggcatgcagactgagaggtgtaattcaaactaaacatccccttaggggaccaactaataatgattccatagtaatcgttgtgcagcacctctgcctgttctccagtgcaatcttcccaaacaactatgttcattatttctggccaggtacaattttgtttacaaataggtttttgagggtagtatgcctcaattataggagcagatttattatggtaaatactgagatcagaaagcatgtgtaactatgtcatagagtgatatatccaggcattattaccagccaagattgataaatatgtccataagtataattgttctctgtgtcagcccttattgaaggaatactcatggcagtggtgataacygctatcatagctaccattaaattacccattgtgacttgttgtcccgctttcctcacattttcttctgccatctgtgacagcttcttgatctgtccccaggtgggtggctgtgttcaacaggtgttgcttgtgacagttggggtcctcctcagtgtcagtctcaccatggctgcaactgaggggtccttgggatcctcccagaatctggctcatgataagg

SEQ ID NO: 733748 - DNA, 641 bp, Homo sapiens
atgacagaaggcggcaagagtggaagtgcttctgccgaaagccaagcaacatcaagtattgccgacaaatcaccggaagctggagaggcaagggaggattccactctaagtttcagaggaaacatggtcctgccaacgccttgattttgaacttatagcttccagaacagtaattcaatacatttctgtggttttaaataactccatttatgtgactttgttatggcagcacttggacactaataggatggggtaatatcacttatgatttttgatgttcttgagcatgtattgcagttaatttacccatgaatttagtgcatgcctcaaaatggaaagcttgagtctatccatttgggttgacattgttttttctcaacctttgaattattgcttcattttttctttccttctttcttttttttttttttttgcggattcttccttctagttgatctccagcacctgaagcccttctcaaaaacgttgatataatcaagatttrccctgccaaaaatcgatctatcactgcccacgtgccctgcatctgcagttcagtgctagaagtcctaaggaggttctcctgagggtattttccactcacttactaagcaatattttaaaaataattacgggttcct

SEQ ID NO: 733749 - DNA, 464 bp, Homo sapiens
taatggaaaagagaatagatttccagttatgttttgtggtgctagaaaaaacaccttgggatgaaactgaccatatagacaaaattaatgacaggcagattccatttgacctcctgagcactttagaagctgaaaaagtctgtcagraccatgtacaacatccaatatccgagaagaggagggtagaaatgaaggaaaaattcaaaaagactttggaaaaaattcaagtcatttcacctggacagccatgggaggaagttatgtgctttgttatggaggatgaagccttcaagtatatcactgaggctgatagcaaagaggcatatggtaggcatcagtgataaatagttgaaaatccaaagaaaagtttcaagaaatgctttttgagcattctgaacttttttatgatttagatcttaatgcaacacctagttcagataaaatgagtgaaattcatacagttc

SEQ ID NO: 733750 - DNA, 625 bp, Homo sapiens
gaaaaggctgcatatccaatgatatgacattctgaaaaaggcaaacctatggagacaataaaaaataaaatcagtggttgcctggggaggggggcaggaatggagcatagaagatagttaaactactccctataattctatagtggtggatacatgtcattatacatttgtccaaacctatacacaaggagtgaacmctaaattaaactatggactttgggtgataatgatgtgtcaatgtacgtttatcaattgtcacaaatttgatactctggtgagggttattgataatatgggaggctatacatacacaggggcaggggaaatacaggaaatctctgtacttacctctcaattttgctgtgaacctaaactactctaaaaaatacaaaaaaaaacctctttctaaaaaaaaactctttaagttgaggaatgtatcttcttcattgtgtccccggtagctagtacagtggcagaattgatggcttttaagtatagctaatgactgaaggagcatgttataaaatatttattaaagcctgttctataatatttggcaggtaatagacatttaataattattagatcatagctgatgatttgactcttgacagaactaattgct

SEQ ID NO: 733751 - DNA, 633 bp, Homo sapiens
aaaggcagccttctgtgaccctgaggtagctatgagaagttgcatatttggaatagttgaatggacagcttacaggagctgtgttctacatagatacatagttgtatgtagccaaatgcagaattatatgtaaagtgccacaaaacaaatgtaaggtaaatagtagtgtaaggccttcattatcatttatattactggtgtgttttaatgaagcattgaatttatttacagaaaaggatgctaagctgagatattttaaagtcaagctatataagaatttgaagggatatttaatataatatctgcttttccaccagccatcaatctcagcaaactcacacaggaccagaaaaccaaacactgcatgttctcactcataagtgggagttgaacaatgagaacacatggacacagggaagggaacatcacacagtggggacygttgcagggtgtgggggcaaggggagggaaagcattaggacaaatatctaatgcatgtggggcttaaaacctagatgacatgttcataggtgaagcaaaccactatggcacaagtatacctatgtaacaaacctgcacgttctgcatatgtatcccagaacttaaagtaaaatttaaaaaacaaataaataa

SEQ ID NO: 733752 - DNA, 417 bp, Homo sapiens
atccactattgttaattttgttctgtgtataatttgtgctattggtttattgttcatgtgtaaaattggaaaaaaatattcttcaatccaatcaggatcagcgccaagccatgattgctatggttcatttaaatcagagtaaagggggagttgtagggagacctgaaactactgctacagaataaaagatgaaatgctcctgattattgtaaatacaaaattgcatgcaggattgtgtaaagacaatgccaggttggactgccagaatgagccaacagcrggtgatgtgcttccccctgaagagagcctatgaacagacgtgcagtcagggaggtttcacatcaccaagattcctatcccagaaaagcagatgttcatagctctgggaatggaatgcgacccttgtggagagcctat

SEQ ID NO: 733753 - DNA, 630 bp, Homo sapiens
gggtactgaatatcattcacgtgccaggaatgctcctaatttttcaattttaagtgggaaagaatttcacttataagctggaacaatcagagcaataatgttcctttattttagtttaagctaaagcaaatgtcatctgctggaaaaatcagctgcaggccaaatgtgatttccagtactttgacctagccattaactgtttgcttgttacagtttcagaaaacgtttctcatttcttacaccaaggcattaagatggaatgaggtgacataaaatacttactatacgctatttcactcttaacttggtttctgttattttaatcagtgsaacctctcaatgattctcacagacatcctttgttactcagtatcccattctctttctcttattttcatgtttccctttgtcttcaccttgctgtttcaacaatagttacatggtaacacaattctcacttctttctacctgagtcaatcaggggcagagttattatccaggggtaacttcctgctaatttcaacatcagggtgaagaaattccactgaattcttcactgaaatctccactgaaacacagaggacagcctagcatggaggagagagaaattgtctctctttggcagaattc

SEQ ID NO: 733754 - DNA, 559 bp, Homo sapiens
tgttgtatttttagtagagatggggtctcaccatgttggccaggctggtctcaaactcctgacctgaagtgatccacccgccttggcctcttaaagtgctgggattataggcgtaagccaccatgcccagcccctttcagtcttgtagttgatgttccttttgaaaagttttatttctctgttgactaagggaaaaaggatttttcagaactcatgttaagaaagctagggacacagagtgccctagaactgtgactctcaaattccaacatgcrtaggcctcatctggggagggcctcaccctcagagagattttgacttcatggattaatgggaggaaaaagaaactgcatttttaataacaggtgatggaatctgtatgcccatgcactggggttaagcacaaagataactgtcattgtctcacgtgtaggattagcaagagccagctgggctggggtagagagattgagaaagtcaactaggggagagaaaatggcatatacttagaatcagtgcctgctgagtgattggagccagaagcaaaggaaaaactagt

SEQ ID NO: 733755 - DNA, 638 bp, Homo sapiens
gcttatttgccatctgtatattttctttggcgaggtgtatgtacagatctttagcccatttttaattgggttgtttattctgttattgttgagttttaagaggttttatatatttcaaataccagttctctatcagatatgtgtttagcaaagaatcttctcccaatctgtgccttgtcttttcattgtawaacggtgtctttggcagataagtttttaatttttatgaagtccaacataccaattttttcttcaatggatcatgtttttggtgttatatttttttaaagtcatcattaaactcaaggacacctagattttctcgtgttatatttcagaagttttagttttctatttcacatttaaatctatgatctacttgagttcatttttgtgaaaggcattaggtatgtgtttagattcatagtgtatttatttatgtatttatttactttttgcctgtgcgtgtctcattgttccaggaccatttgttgaaaagaccatattttctctgttgacttgcctttgcttcttgtcaaagtttagttgactatatttgtgtgggtctatttctgggctctctgttgtctcattaacctatttgtctattcttttaccaatgcaacagagtcttgatt

SEQ ID NO: 733756 - DNA, 638 bp, Homo sapiens
gcttatttgccatctgtatattttctttggcgaggtgtatgtacagatctttagcccatttttaattgggttgtttattctgttattgttgagttttaagaggttttatatatttcaaataccagttctctatcagatatgtgtttagcaaagaatcttctcccaatctgtgccttgtcttttcattgtataacrgtgtctttggcagataagtttttaatttttatgaagtccaacataccaattttttcttcaatggatcatgtttttggtgttatatttttttaaagtcatcattaaactcaaggacacctagattttctcgtgttatatttcagaagttttagttttctatttcacatttaaatctatgatctacttgagttcatttttgtgaaaggcattaggtatgtgtttagattcatagtgtatttatttatgtatttatttactttttgcctgtgcgtgtctcattgttccaggaccatttgttgaaaagaccatattttctctgttgacttgcctttgcttcttgtcaaagtttagttgactatatttgtgtgggtctatttctgggctctctgttgtctcattaacctatttgtctattcttttaccaatgcaacagagtcttgatt

SEQ ID NO: 733757 - DNA, 649 bp, Homo sapiens
tccactcagccccaattctaggttccatgctattttccaagacactcatcctcgtcaattcctcgctttcccaggctgtcgttatgatccaacctccaccaccacttattagagatctgcaaccttatttaaataaaatataaaattactcttaagaaggaattaaaaaatgagggggaaaatgttgggaaatactgttgcaaccatttcctgtcctccagatctttcctgtggaatgaggttcttcaccctaaggatgctatggatggtttgygaagaatcaagtgcaactatgtagttattaggttgctgcaaaagtaattgcgatttttgcgattgaaagtaataagcatctgtatttttttttctggaggggggtaagtaaagtacatagctttcatcagattaaaaaaggggcctatgtcataaaaaggtaagcatctttttgtttaaattaatgtttaaatcttaactagaattcttgtcatatacacagcattccccctactgtatttttcagtctctaccacaattctggtccaactcctaaggcacttcctcaccctacatccctcagacagcctctttcctgactcttatcctgcctgctttcctgccagaatttgctgataactcccagggacaagct

SEQ ID NO: 733758 - DNA, 649 bp, Homo sapiens
tccactcagccccaattctaggttccatgctattttccaagacactcatcctcgtcaattcctcgctttcccaggctgtcgttatgatccaacctccaccaccacttattagagatctgcaaccttatttaaataaaatataaaattactcttaagaaggaattaaaaaatgagggggaaaatgttgggaaatactgttgcaaccatttcctgtcctccagatctttcctgtggaatgaggttcttcaccctaaggatgctatggatggtttgtgaagaatcaagtgcaactatgtagttattaggttgctgcaaaagtaattgcgatttttgcgattgaaagtaataagcatctgtatttttttttctggaggggggtaagtaaagtacatagctttcatcagattaaaaaaggggcctatgkcataaaaaggtaagcatctttttgtttaaattaatgtttaaatcttaactagaattcttgtcatatacacagcattccccctactgtatttttcagtctctaccacaattctggtccaactcctaaggcacttcctcaccctacatccctcagacagcctctttcctgactcttatcctgcctgctttcctgccagaatttgctgataactcccagggacaagct

SEQ ID NO: 733759 - DNA, 650 bp, Homo sapiens
catgaactagtagcctgaactgccccacccttcctgcatagggatcctggtgaaggaaggcacttctctatttcatgcccaagcagatatcctggcatttagagcacctacatgcatggatgactagcctgagctgcccaccatttctgtacagagatcgtggtgcagaaaggcctttatgcttcatgcacatgcagatctccaggcattcaaagcacccacttgcacagatcagcagtgtgagccatcctacccttccagagcaaagactgtggtgaagcagagccctcttcgcttcatacccaggaatatctccaggcatttggagcaaccccccaccaggatcggcagcctaagtcacacccttcctggggacaggtcatggtasagtggggccctctctgctcctcaagcaagcaaattttcaggcatttggagcacctgctcacataaactggcagcctgagctgccccaccttttccatgcagagactgtggtagagtagggtcttctcccctccacacccaggtagatctccaggcattcagagcacccactcacctggatcagcagcttgaatcggcccacccttcctgtgaagagaatgtagtaaagtggggccttctctgtcccatgctcaggcagatct

SEQ ID NO: 733760 - DNA, 502 bp, Homo sapiens
actaacaattgtgtttttaagatgacacaattgagcttcattcccccttttttgtaatactgccctatcacatgaaataattaagaattaaaacattaacaggacactgggattctctcagagtcttctctggttggctagatctggcacagaataatggcatgaggaagaagcaactttgatatatttatttttgttctaatatgcccccaaaattgataataataaaaaactaacatttgaatttcatactttaacatgactttcaaatacattttcttctaatttggcttcacatctctcttgttggtagatattaatcccaatttaaagaggacacaaagattytgagcagtgggtggcaagcccagctcacctagttagtagagttacaaatgaaactttggagttctgatgacaagacttgcattttccacgattagatgctgtgaaatgaggaaaataaatggagtaggcatttctaaagaaatttaaattacaa

SEQ ID NO: 733761 - DNA, 541 bp, Homo sapiens
aggctattgttttaacacgtgaatcctttactttgttcacagctgcaaacattttttgagacattcctgagagccagttcacctcaacaggcttttgacattatgaaggaagcaattggcaaactactgctagcggctgaagtattcagtgaaacatctactctgggaccaaagaccttccataggtaaaaaacaaattttaatttaaaaaaaaaagaaaagaaagaaagmaacctatcttttaaaaattgttggtggaaatgtatcttaattatcataagtaggtggtacttggaaaattttatgtcaatatacaaacatgatcttctaaacatatgtggccatatttatagatcctaaaactttagaacgtgtggcagactcagtagtatctaaatagtggtaacaagaagtaaagtgcgcattttcaaagttaatcttttaattgcagccgccttttcaagtgcaactgtttctatcatagatacttggcattgactaggtataattttacttatacataataaatttcattctcaaa

SEQ ID NO: 733762 - DNA, 515 bp, Homo sapiens
cgtttgttgtaagcagaatcacccagtctgtcatctcccaagatagaaattacccactttgtcatctcctaagatagaagggccatcacccttgagcccttccttcctcttccttggcattgaccttctattaattgccaatactactgaatttaacctcttaacgtttttttttcttctgttcttgtttttgttttgtttttttgagacaaagtctccctctgacacccaggctggggtgcaatggcgtgatctcacctcactgcaacctctgcctcccaggttcaagcaattatygggcctcagccaccaagtagctgggattacacatgtgtaccaccacgcctggctaatttttatatttttagtagagacggggttttgctgtgttgaccaggctggtcttgaactcctggcctcatgtgatctacctgcctcggcctcccaaagttctgggattacaggcctaagccaccatgccaggcctatctctaaacatttctcacatctgtcat

SEQ ID NO: 733763 - DNA, 611 bp, Homo sapiens
aattcagggtttatgaaagcccttctttttctacatttagtttctgagatttctcacttttggatttgagaaatcgagacagccttaagattgaaagtgtactgcacttacagccttttctcaattcttagtgcaaatgaatgtcagtgacgtccactttgatatgttctggctgtgtccccacccaaatctcatccggaattatagctcccataattcccacgtgttgtgggaggaacacartgggagataattgaatcatgggtgcggtttcccccatcctattctcgtggtagtgagtaagtctcacgagatctgatggttttataagggattttccctttcacttggccctcattcgctcctgcctgccaccatgtaaggtatgcttttcactttctgccataattatgaggcctccccagccacgtggaactgtgagtccgttaaagctcttattctttatgaattacccagtctcgcgtatgtcttcagcagcagcatgaaaaaggactaataaacactttggtgtccttgtggacttttacaatgtagtgtttaggaatgccactggtgcagaatcacaataataggttctgctgaagctaggc

SEQ ID NO: 733764 - DNA, 611 bp, Homo sapiens
aattcagggtttatgaaagcccttctttttctacatttagtttctgagatttctcacttttggatttgagaaatcgagacagccttaagattgaaagtgtactgcacttacagccttttctcaattcttagtgcaaatgaatgtcagtgacgtccactttgatatgttctggctgtgtccccacccaaatctcatccggaattatagctcccataattcccacgtgttgtgggaggaacacaatgggagataattgaatcatgggtgcggtttcccccatcctattctcgtggtagtgagtaagtctcacgagatctgatggttttataagggattttccctttcacttggccctcattcgctcctgcctgccaccatgtaaggtatgcttttcactttctgccataattatgaggcctccccagccacgtggaactgtgagtccrttaaagctcttattctttatgaattacccagtctcgcgtatgtcttcagcagcagcatgaaaaaggactaataaacactttggtgtccttgtggacttttacaatgtagtgtttaggaatgccactggtgcagaatcacaataataggttctgctgaagctaggc

SEQ ID NO: 733765 - DNA, 614 bp, Homo sapiens
cataattatgaggcctccccagccacgtggaactgtgagtccgttaaagctcttattctttatgaattacccagtctcgcgtatgtcttcagcagcagcatgaaaaaggactaataaacactttggtgtccttgtggacttttacaatgtagtgtttaggaatgccactggtgcagaatcacaataataggttctgctgaagctaggcttcattcatacaggatctgggctgaagtttttccttcttacagctattatcggggaaaagagagtttgctgaacacatgaacagggttaataaagtagcaaggwttggggaagatttcatcaatgcacagttgccaagcactttaaatgaatcagtttttagaactgtatcttattgatttggtaaaaatcttagagcagaagtggaacctagagactaaaagctctaaatgctttattttgcaaatgaagaaactgaaaaaaaaaaaaaaaaaaaaagcaaatgatgattctcttaagtgcccgaagcgagctaccacccctgtttccagttgcctctcttctccaactgcagctgggttatttctatcaagtcatgccagcaggacatagtgctgcaatacttt

SEQ ID NO: 733766 - DNA, 512 bp, Homo sapiens
ttacttcatactactatatgatttgtattttttgttttgtttttgtttttgagatggagtctcactctcgccaggctggagtacagtggcacgatctcctgtcattgcaatctccactcctgagttcacgtgattctcctgcctcagtctcccgagtagctgggactataggtgtgcaccaccacacccagctaatttttgtatttttgatagagatggggtttcatcatgttggccagggtggtctcaatttcttgaccttgtgatccaccctccttggcctcccaaagtgctgggattacaggtgtgagccactgcacgtggcctgatttgttttttaatttttagyggagcatgacattttcataagccatttcttagttttgaagtaaacgacttttctaggaggactgcttgtggccaggagtttgagaccagcctgggtaacatgagatcctgtctctggaaagaaagaaagaaagaaaaaaaaaaaaaaaaaaaaaaaaaaagac

SEQ ID NO: 733767 - DNA, 632 bp, Homo sapiens
aataagtaaaaaataaattggattttttcagttcagtaggcaaaatccttctttattatttttttctattgtatgtaatattatagtctcaacatctcacagataacttgaaaaaaatgttttagtattgttttagcttttgacctaaaccctggagtggaagtggagcctgtggaatacaagaacagcatacaaaaaagtgcctttcttttttgtcatcctggtatccttgggcttctcttgccatctacctcttttttctttaggagagattccttactattaaacctcatgcatagttctgccagtcaaggccagacacagtggactccttattgaacatggattagtttcacactaaaactgcactatactgataaataataaccraatagcatcttgtcatctctcattgacgatagggtttaaaagaacaacaacaaaaaatagatgtattttctaccatttcctatttggggggttgtcatggtgtgtttagtacccctgggttttaacaatgtcccgactgagcctgaaatatttctcccgaacagagtttggatacagagctgaattcaaccttcacatataaagccgtaactatttataccattgtgatccaaatattgcag

SEQ ID NO: 733768 - DNA, 593 bp, Homo sapiens
tttgacattttttttactgttatccaataatttcccattttaacttaaagctaacttgaattatctctactacttacaattcaagcttttattcagcttccactatctgggtctgcacagccaaaatatgacaaagagttcaagctcaaggattctttctttttcttttctttcctgtttttttttttttgrcagagtctttctcagttgcccaggctggaatgcagtggcatgatcttgactcactgcaacctctgcctcccgggttcaagcaattctctgcctcagcctcctgagtagctgggattacagacgcccaccaccatgcctggctaatgttttttaatttttagtagagacagggtttcaccatcttggccaggctgatcttgaactcctgacctcgtgatccacctgcttcagcctcctaaagtgctgggattacaggcatgaaccaccatgcctggcccaagctcacaagatttttaaagctaggactatacttccctaatatattgaaaatgaatgtgacattgagtgctacaaaattattttctctaagatacttaatatatttgataagaaatagcaag

SEQ ID NO: 733769 - DNA, 593 bp, Homo sapiens
tttgacattttttttactgttatccaataatttcccattttaacttaaagctaacttgaattatctctactacttacaattcaagcttttattcagcttccactatctgggtctgcacagccaaaatatgacaaagagttcaagctcaaggattctttctttttcttttctttcctgtttttttttttttggcagagtctttctcagttgcccaggctggaatgcagtggcatgatcttgactcactgcaacctctgcctcccgggttcaagcaattctctgcctcagcctcctgagtagctgggattacagaygcccaccaccatgcctggctaatgttttttaatttttagtagagacagggtttcaccatcttggccaggctgatcttgaactcctgacctcgtgatccacctgcttcagcctcctaaagtgctgggattacaggcatgaaccaccatgcctggcccaagctcacaagatttttaaagctaggactatacttccctaatatattgaaaatgaatgtgacattgagtgctacaaaattattttctctaagatacttaatatatttgataagaaatagcaag

SEQ ID NO: 733770 - DNA, 501 bp, Homo sapiens
tcttatttgaaatcaaagctaatattgctccctttttctgtacacacacacacacacacacacacacacacagttgtttgtttgtttctccaggacttgtggctactgagaagactagggccaaaacttgtatttaccaagtacagtgtagagtttgtgctgaatattctytatttgcccctcagattcactctacacccatctccagggagccgtcctccacagactgcatccacagggcaaccttgtcccctggcatctagcaagagattgaggacaggaggaaataatttgggaatatttgttgccaggctccttcccctctggaccctggcttgaaagtggctgtgttcctctacctgtagccatagtcttcttaatggcctttcctataacaatgcttttgcctggttctggaaacttctccttcctgggctaagagtggtaaaagcttcccattttgtcggccctggggagctcctctaccccttgttgattttc

SEQ ID NO: 733771 - DNA, 646 bp, Homo sapiens
actcttttaattattactagtttaatgtatgttttgcttagttaaggaaaacccctgtggtttcttgacgtgcttcagtattctaactcacagctgattcagttcagggggctggggagatgtcctcgacctctggaaaggagggtgcatctctagaaataaggctaagtatgccactgacactgtctgcataaacgtgtgtgatctcaggtccaaaggatggggcctggtctaagccagggacgtgggaaatcattttcctgtggcaacttgtgaagaccattctgtgaccttggtgtctctgggccttctcttagattttctaagttggctagtcagtggagctgccatccctcctttgcccatgttctactcccagagttcctccaagaaattgcrgagcaatgcctgtttcatgagagctgagtttgctgtgtcttccacttagaaacaacactgtggaccaggaggacacacagctcccagggccatcaccacacaaagtgaaggctggtgaatccgaggcttctagcccttgccgggccaggcccgcagcactccgctccccaacccagccgctgctttgtcgcaggaacctcagcagggcagggtgtttcctaggaggacatccgattcccagccattc

SEQ ID NO: 733772 - DNA, 699 bp, Homo sapiens
gttgacatttctgaaaactacagcctacatttttaaaaaatccagtaagtgaaaactaaaaaattaataccgtggtcataatagtgtggcatttgataactaatgaggcactgtcgtgccagctattattttcagacatttacagtccttttttaaatacaaagaaatakttggtgtgaaatgttccccgggagctggtgcaagcagaggcgacagggcaagggagcttgggttgtagcctcgaattcctccggccagggctaccgtcagcctgcggcacacaagtaaatcaaatataaaaccaaaatttctgtaagcaaatcagtttctaactcactgtaacgaattatctttcgcacatcacagaggcatctcttttcactgtcgagtttggtttgcttggttacaaaaagggcagttcaaaagctttggttgctattgtgaaagtcagctgaattccttccaccgtgctggggtggggtggggttcacgcaggttctcttttgtcaccaggggtgctgtggattcacaagtaagcaagaggctcctcaggtcaagcctctggctgctccctgaggtcagctgcctagcttctcctcctctgagatagacgggaacaaagtctttgatgtgtgcatttctcaagcttgacaatgatacagctacataaaaacccatgatttcatatagatattccaa

SEQ ID NO: 733773 - DNA, 612 bp, Homo sapiens
tgaagggagagccggagcccatggggaaatgactccagagtgttccacgtgttggaaggcatctgttggaaaacggacattcaagcaaatagttgcctgcatagacaacgcagaatgactgggaaagccccaacaagttacctactggtaaatgaggtgagaagcttaaagtgagaaccccattgctgcctctttttcrctttaaaaacatttaagttttgaattatggtaaaatacacgtaagatttactactgtaaccatttttaagtgtacggttcagtagtgttaagtatattcacattgctaaggaaccaatctgctacttttgtttattaattttttcctgaggggaaatatttttaaattttaaaatatttaattgacaaataaaaattgtgtatattcaaggtgtagaacatgatttcatatgcacgtacattgtatactcattaccacaatcaaagaaattaacacatccaacccacccatagttgccattgtgtgtgcgcggatgtgcgtgtatgtgtgtgtatgtgtgcacgtgtgcgcctgtgtgtgtctgtgtgtctctgtgtatacgtgtgtgtacatgtgtgtacgtgtgtgttcct

SEQ ID NO: 733774 - DNA, 483 bp, Homo sapiens
tcgagttaaagagctggccaggacagccaggggcttgcaccccggagccttcatccactacactgtcagctggtatctcaaccagccattacaggctgtaaaaaaattatataagatagtctatggtaatgcagaaaagtgaggttattttgctccctttccctttgaagaaaaaagccctggaaagacatatcacttgagtatgggaaaaaatgaagctgtggcttttctgtgagtcaattctttcctggcagcttcttggaataagaccaagtatagcagcagagttttctgttttaatttgagctgcagggtgactttttttyttctatgctttcatctctctgtggcttcttttgcctcgttaatttcatgccctgcccaggcgggctactgtgctgcccagtcacccgggtctggggcggccaccgctggccagcaggcaggccctccagaggcagaggtggccacgcttaggtcgct

SEQ ID NO: 733775 - DNA, 483 bp, Homo sapiens
tcgagttaaagagctggccaggacagccaggggcttgcaccccggagccttcatccactacactgtcagctggtatctcaaccagccattacaggctgtaaaaaaattatataagatagtctatggtaatgcagaaaagtgaggttattttgctccctttccctttgaagaaaaaagccctggaaagacatatcacttgagtatgggaaaaaatgaagctgtggcttttctgtgagtcaattctttcctggcagcttcttggaataagaccaagtatagcagcagagttttctgttttaatttgagctgcagggtgactttttttcttytatgctttcatctctctgtggcttcttttgcctcgttaatttcatgccctgcccaggcgggctactgtgctgcccagtcacccgggtctggggcggccaccgctggccagcaggcaggccctccagaggcagaggtggccacgcttaggtcgct

SEQ ID NO: 733776 - DNA, 645 bp, Homo sapiens
tgtttcacaaatgatgaggagcgatttatgttcttagtggaaatatgtcggcgtgtgaagtcccaaagctctgccctgcctggcttgatccagtgcctaggcactgcccctcttcccctctctcccaacccactgtaagaggctaggctgcctcagtaactctgaggggcattgactcttttcatccaaaaattcatgttactgccccacattttttctgttgttttacaacgcagtaggaagtgggcagactgtcaggaaaagtgatttatagtcatgtattgcttgtgctttggcttcatttgatccaatgcagatcagctgcactcagaaaactactcaagtgaaagagaaaaagtaactgaagggggaaatctggatgagtaagaattccagggataggaatattaatagcaagctttttgcctgatatagtcactttatgctgcaggggtgcccctttataaagtgcttgtacaatggatgyttgcttttgattttggatttggagtctaatgaatgttctaaattattattagaggagcttgcggttgttacatgtctgcctttattgcttatttttagccatctcccctgatgtcaaatgctcaggcaagaatgatacattcatttataatgtggctc

SEQ ID NO: 733777 - DNA, 595 bp, Homo sapiens
ggcgtggtggctcacgcctgtaatcccagcactttgggagtctgaggcaggtggatcacctgaggtcaggagttcgagaccagccggactaacatggtgaaacactgtctctacaaaaattagccgagcgtagtgacgcatgcctgtaatcccagcgactcgggaggctgaggcaggagaattgcttgaacccgggaggcggaggttgcagtgagttgaaatcgcgccatggcactccagcctgggcaacaagrgcgaaactatgtctcaaaaaaaaaaaaaaaatcagatgatgcaaaaaaagtgaaagtcactttcagtcctctggtatgaacatgttcaattagtcctctttaattggaagttctctttttttaattgcaaaagaaataggaatcaaccccaaaaaatcaggttagataaaatgacagtcacttccagtcttcctttgctgatcccattgtcttcccagatgtaactgttattttttatacgtatacttctgttttaattcatttacatacttttaagtacatagaaaaaagtagtttcattttgtatgtgattttgtgatggaggctgttattggcaagaa

SEQ ID NO: 733778 - DNA, 564 bp, Homo sapiens
ttatattatggaatacttacaaatatctaatgagctatcttggcaatgagacctaagtctaaacataaaatttatttatgtttcatatatgtcttatgtacataacctgaaggtaattttatacaatattttaaataaatttgttcatgaaacaaagttttgatggcattttattatgayctgtcacctaagatcaagtaagaaattttctgatggcatgtaggtgctcaattttagattttagagtattctggattgggggcattcctaatccaaaaatctgaaatccaaagtgctacaaaatttgaaactatacacaccaatacacaaacatatttatatttagtttcctgacatgtgtgcctgtatatgtgtgtgttgcttttacagaccatgtctttgtgttggacatgtcaatttaatatgcctgccatatcccaattccatttaacataatttgtcttcttcgaactcttaaaagagatatgcaacataccagctgacctcacatgaatggttatagatacaggcatgcctcattttattattattttatttattgca

SEQ ID NO: 733779 - DNA, 564 bp, Homo sapiens
ttatattatggaatacttacaaatatctaatgagctatcttggcaatgagacctaagtctaaacataaaatttatttatgtttcatatatgtcttatgtacataacctgaaggtaattttatacaatattttaaataaatttgttcatgaaacaaagttttgatggcattttattatgatctgtcacctaagatcaagtaagaaattttcygatggcatgtaggtgctcaattttagattttagagtattctggattgggggcattcctaatccaaaaatctgaaatccaaagtgctacaaaatttgaaactatacacaccaatacacaaacatatttatatttagtttcctgacatgtgtgcctgtatatgtgtgtgttgcttttacagaccatgtctttgtgttggacatgtcaatttaatatgcctgccatatcccaattccatttaacataatttgtcttcttcgaactcttaaaagagatatgcaacataccagctgacctcacatgaatggttatagatacaggcatgcctcattttattattattttatttattgca

SEQ ID NO: 733780 - DNA, 564 bp, Homo sapiens
ttatattatggaatacttacaaatatctaatgagctatcttggcaatgagacctaagtctaaacataaaatttatttatgtttcatatatgtcttatgtacataacctgaaggtaattttatacaatattttaaataaatttgttcatgaaacaaagttttgatggcattttattatgatctgtcacctaagatcaagtaagaaattttctgatggcatgtaggtgctcaattttagattttagagtattctggattgggggcattcctaatccaaaaatctgaaatccaaagtgctacaaaatttgaaactatacacaccaatacacamacatatttatatttagtttcctgacatgtgtgcctgtatatgtgtgtgttgcttttacagaccatgtctttgtgttggacatgtcaatttaatatgcctgccatatcccaattccatttaacataatttgtcttcttcgaactcttaaaagagatatgcaacataccagctgacctcacatgaatggttatagatacaggcatgcctcattttattattattttatttattgca

SEQ ID NO: 733781 - DNA, 564 bp, Homo sapiens
ttatattatggaatacttacaaatatctaatgagctatcttggcaatgagacctaagtctaaacataaaatttatttatgtttcatatatgtcttatgtacataacctgaaggtaattttatacaatattttaaataaatttgttcatgaaacaaagttttgatggcattttattatgatctgtcacctaagatcaagtaagaaattttctgatggcatgtaggtgctcaattttagattttagagtattctggattgggggcattcctaatccaaaaatctgaaatccaaagtgctacaaaatttgaaactatacacaccaatacacaaacatatttatatttagtttcctgacatgtgtgcctgtatatgtgtgtgttgcttttacagaccatgtctttgtgttggacatgtcartttaatatgcctgccatatcccaattccatttaacataatttgtcttcttcgaactcttaaaagagatatgcaacataccagctgacctcacatgaatggttatagatacaggcatgcctcattttattattattttatttattgca

SEQ ID NO: 733782 - DNA, 563 bp, Homo sapiens
cctattgctgcctggcaccatagggatccatcaggagggtggccagagaagccgagggtaaaactccacaggcagaaggaattctctagctgacctttgtaacaatttgaacagagtgagaagcctcctggccagaacttgggagagggtgtgaatccggcttacagacttcacaggtggaggaagaactaaagcccttttctttcacaactgggaggtggaaagcctcaggcaagttttcaagcctgtctcaccctccacctggaaacagacttggggctgttgcagggggcatggtgggagtgagacaagcccctcggtttgcatgggagctgggtgaggcctgtgactgccarctttcccccacttccctgacaacctgcatgactcagcagaggcatccataatcttactaggtacacaagtccagtgacctgggaatctcatccccatcccccacagcagttacagcaagacccgcgcaagaagagtctgagctcagaaccacctagccccatccccacctgatggtcctcccctccccaccctggtagcggaagaca

SEQ ID NO: 733783 - DNA, 656 bp, Homo sapiens
atactaatttccctgaatgaaagaaaaaatagcatatgttcattgcaaaattaaaataaaaaataaccactttttaatagattttgtccttcagacctgtttatgcataaatgaacatagatttcttccacatcactaargtcatgctataaatactgccccacgttgtattgctacacttaatacactcaatagaaagagggcagcttttccacaaaaagtggattgactacacactttttaatagctgcataatattccattatgcagatatattgtttattccacaaattccctacagaaaaacatttaggctgtttctcatgctttgcttttaatacaatgttttaatgagcacctttgtccaattacttttgggaaattatgtcctttggatggttgacaaaaagttggattgttgagtgcaaatgttggtccgtatccaattgagcacccaaaatcatttattgatttacatctctgtcactgaagtatcacaggtggtttcttgtcaccctagactagcaataagcaaagtataacccacagcctgtttctgtaaataaagtttacaaaaccagccatgctcaggagtccacagctgtttttggtctgcaatggtagagctgagtaattgtcaaagacactatatggcc

SEQ ID NO: 733784 - DNA, 563 bp, Homo sapiens
ccggcatcttgttttggaggtttagttacaagggtgtatgcactacgtgaatttgtgataatttatcaagctgtgcacttaggattttttcactttcctgcactttaagggaaagtttgcttaatgaaacaagtggatgcrgaactataagagcagaaatgtaagacataaattcagtgttctaaccaacagctttttggagaaatacttctatttaatatgaagaaacaatatcccatttattttatttttaaataaattctccctaatacacttttgagtctcttagagaaaatgatacttctgagtgtggtggatcatagtttaatagagtatttgagagtcaaattgaaaacaatgacaacaaccacaacaacaaaaaaaacctttggattaatagttgggaagtggcagggaaaagccaaatctaaggttccaattaagagaattaatctggaagctggaagtctgggattagcgctcctgtgaaaatagatatgaggccatggtatagaatcttcttactgtctgagggattttgcccaaagcatcagcaattgcca

SEQ ID NO: 733785 - DNA, 620 bp, Homo sapiens
aagtgtgtctggaggcccttccactataaagtatacaaatcttgatattcctcttcaattttcataatgtgaacactacagatgagcgcaggacacagactaaggtgatttccacgggtttgccttgcagctcccccagaggtgcagatcctgcagcaggtgctccrgggcctcccgagctggttgggttagagaggaagagaaggaaaatgctcctagcgcttagcagggccctgcacaacggctgcgcagcggccaggaaagcggcccgagaggtgggatgcggccaaagctgctggggcggtggcggagagggctgctttcaggtccccgcgcaccctacccgggcgccttccctggctgccagacccacaatggctgcagctctgcggtgacaggccgcagcctaggtccccacaggggcctgccccatgctgggagcaggccaggtgccctgggaggaacttgaggcccagcactgacagcttctagctgtggaaagggctggtggcaagcgggacctggaagcagcgctgagctgaagggcggaaagagacgtttgcgtaaggctggcctggcacactggctaccatctccaggtcaaggtggtggtggccggg

SEQ ID NO: 733786 - DNA, 620 bp, Homo sapiens
aagtgtgtctggaggcccttccactataaagtatacaaatcttgatattcctcttcaattttcataatgtgaacactacagatgagcgcaggacacagactaaggtgatttccacgggtttgccttgcagctcccccagaggtgcagatcctgcagcaggtgctccggggcctcccgagctggttgggttagagaggaaragaaggaaaatgctcctagcgcttagcagggccctgcacaacggctgcgcagcggccaggaaagcggcccgagaggtgggatgcggccaaagctgctggggcggtggcggagagggctgctttcaggtccccgcgcaccctacccgggcgccttccctggctgccagacccacaatggctgcagctctgcggtgacaggccgcagcctaggtccccacaggggcctgccccatgctgggagcaggccaggtgccctgggaggaacttgaggcccagcactgacagcttctagctgtggaaagggctggtggcaagcgggacctggaagcagcgctgagctgaagggcggaaagagacgtttgcgtaaggctggcctggcacactggctaccatctccaggtcaaggtggtggtggccggg

SEQ ID NO: 733787 - DNA, 638 bp, Homo sapiens
tacaagctctgggcctatcactgtctagttgtataaccttgagcaggaaatgatgtctctaaacctcaacttcttcatctgaaataaaaaggagtaggctagataacatgtaaacaccatttcagctttaataatctctggccataaaacctatattttatagtattacttggcagatcagaatcctataaagtaatttgattccctcagcagcctgtggatataaataagtttattttagcatttctgctcacatttcactgagcattgtttcttttaccwtttcacaacagacttcagtcctctgaaaaggtcacctttgtatttctggatgttgctaagatgtcttacatatgcctgtggataaatctcagcctgccgaagctcttcaagctttgctgttgctctgatagccaattgccaccctgtccagttactgtctcctgcaattcctaacctggagacccatgaggggcaaaaatcatgctgtgtttcttgtaggtggggtgtcactgcattagaagtagtttagaaacaccttttcctcaggaggctttggactcaccccatggggcctgagctgtgaaggcttcttcattttcctgtgtctgtcttttacggccacagaatccatgcat

SEQ ID NO: 733788 - DNA, 623 bp, Homo sapiens
gttccaaatgaagtctgagtctcaaggcaagaggagaccaatgtctcagtttgatgacagtcaggcagcaggagattatttcttactcagccttttattctattctatttaggtcttcaaaacatgggatgaggcccactacattggggagggcgatctgctttactgtctacccatttaaatgttaatttcatccagacatacctaaaaatgatgtttaaaaaatattttgggcatcatgtgacccagtcaagttgacacataaaattaactatcacacgaaggttgtgtgactctgctcaactttatagttcctgggagaaaaatatgattgacaacatcagagttaatgggcaaaagctggaagtattcccctcaagaactggaataagacaggatgccttctctcaccacttctattcaacatagtaytagaagtcctcaccagagcaatcaggcaagaggaagaaatataaagcatccaataggaaagaagaaggcaaactatctctcttcactgacaatatgattcgatacctagaaaaccctaaagactccaccaaaaggctcctggaactataaacaagttcagtaaagtttcaggatacaaaattagtgtaaaa

SEQ ID NO: 733789 - DNA, 547 bp, Homo sapiens
aatttcaagtttcatgctaatttatatgactgctagcagcctttactcaaagagtagcttctgtttatatctttatcaaatgctgctctatctagtcggctttttcatgattgcaaatctgaaggagtatttttttctgtcttagaaagcatgactgcaaatctgaagaagtattttgtgtgtgtgtcaatgcaaaaattgcactggacaaagttaaataagtaaggaagactttattcarggccgttacaataggggagcaagaccataatacaatctgaactcacctttgctgaaacaaggggtgagaaagtttaaagcgctggagtaagagggaaaacataggccatttgtattggctcattggctttacccaaaggacaagtaaactttcttttatctttgtgacaggaggtaattttacaatttggagcaagccacccactcaggaagttaagctccaatgttcttacagagacctggaggtaacactttatcttccttgatagttacatatcaaagggatggctcctggatccttgagaaa

SEQ ID NO: 733790 - DNA, 609 bp, Homo sapiens
cctgccccacatggcattcatatacccatttatttatgtatccatcttttcaattagtgaataaatgtttattgaaaactaattatatgccacacactgatgtaggaattggaaatatagaaggtccctgctctcatgaagctcctatattagatagagagggaatgcacttttccagttcattacaartagcatttctctttatgtgttttaaattatttatttaaataataattaattaataaataataataattaaaaaaatttaaattatttaaatttatttatgtgttttaaattaaattttaaaaaaattaagttaaaattttaattcctagtctatatacttggaatgaaagatgacataaagttaactctaaagcaattttttaaattaatgtttttattttgccttgaggacttttttaagattaaaatctgataccttaaaatgtatgagtaaaattataatttagaaactggcaaagattgtaaatacttatcatgtttaactaaaatgtcggttaactatagtcagctctgatttttttctcattttctgtttatcaaacatttatagagcattaattatgcactataaaatatttt

SEQ ID NO: 733791 - DNA, 609 bp, Homo sapiens
cctgccccacatggcattcatatacccatttatttatgtatccatcttttcaattagtgaataaatgtttattgaaaactaattatatgccacacactgatgtaggaattggaaatatagaaggtccctgctctcatgaagctcctatattagatagagagggaatgcacttttccagttcattacaaatagcattyctctttatgtgttttaaattatttatttaaataataattaattaataaataataataattaaaaaaatttaaattatttaaatttatttatgtgttttaaattaaattttaaaaaaattaagttaaaattttaattcctagtctatatacttggaatgaaagatgacataaagttaactctaaagcaattttttaaattaatgtttttattttgccttgaggacttttttaagattaaaatctgataccttaaaatgtatgagtaaaattataatttagaaactggcaaagattgtaaatacttatcatgtttaactaaaatgtcggttaactatagtcagctctgatttttttctcattttctgtttatcaaacatttatagagcattaattatgcactataaaatatttt

SEQ ID NO: 733792 - DNA, 609 bp, Homo sapiens
cctgccccacatggcattcatatacccatttatttatgtatccatcttttcaattagtgaataaatgtttattgaaaactaattatatgccacacactgatgtaggaattggaaatatagaaggtccctgctctcatgaagctcctatattagatagagagggaatgcacttttccagttcattacaaatagcatttctctttatgtgttttaaattatttatttaaataataattaattaataaataataataattaaaaaaatttaaattatttaaatttatttatrtgttttaaattaaattttaaaaaaattaagttaaaattttaattcctagtctatatacttggaatgaaagatgacataaagttaactctaaagcaattttttaaattaatgtttttattttgccttgaggacttttttaagattaaaatctgataccttaaaatgtatgagtaaaattataatttagaaactggcaaagattgtaaatacttatcatgtttaactaaaatgtcggttaactatagtcagctctgatttttttctcattttctgtttatcaaacatttatagagcattaattatgcactataaaatatttt

SEQ ID NO: 733793 - DNA, 550 bp, Homo sapiens
tcagattcacatatgtattgaatgccccatggaaacaaagtccatcatagcatgtttggactagaacgggtgcatgagactcttttggcctaaggttgctatggagatccacttctggagcaaggcagctccaggattctgggagaccttctcggggtaagcagatgtgagatttctacagggactccgtgggattcaccagagcctgtatgtgacacctgtgacctctgctttactggggaccatgtggcccccctcgctgctctgtattccccacaaagattcaagcagatgcccrgtggtcactctgaccatcacaggcctgttccaattgttactgtggaaaggaccttaggatatctgaaagttgaccgtatgctcctccaattgttcttgtatacacatcatttaacactggaaagtagtagagtgttcatgatttgtgtgggctttccagctagccagacaagttccaatcctgtttctgttacctagagtcctatgaccttgatcaatttacttagaacttccatttaagcatttgtgatat

SEQ ID NO: 733794 - DNA, 607 bp, Homo sapiens
ccttatgctagaggagtaaacaactaaacaacgtagaaatctcatttaagaacaaggccctagggagtgacaagaaataagtctaccccttaaatcagcacattcaactgggtcggtcattaacaacattggcactaatagcttttagcagcagggcagctgctgattacaattgggtttcctgcaactgtggctgcagaagaactgaagcctccattacaaaggcagaaaactgggggaatgcacatgaattcaaggtagaagggaaaagcaagtggagtgtgtagacttggawgaaaaggattcacaattttccatatagttaaacacaactttgcatatcagtcagtaaagggagtcaaatatatggtttggaaaactctggattattgcgaagcaagctttattatccagaatcagctcaagaaggtagtacctactgtagaagacaaggtttccttctgataaaatgatattttctgtaccaacccttgtctcttgcagagttgacaaatagcaaataagagtagagtaatacaaattataataagaaatttacatatcattgtttttctaggtaaaaaggcaaaaagctcacaccttaaac

SEQ ID NO: 733795 - DNA, 611 bp, Homo sapiens
gaagaaaagcctagacgtggtaggcagtggaaagaatggaagcagagagcaggaagaccctgacaatggatgactctttctttctttctttctttttttttttttgagatggagtctggctctgtcgtgcaggctggagtgcagtagtgcagtggcaygatctcggctcactgtaaccgctgcctcccaggttcaaaggattctcctgcttcagcctcccaagtagctgggattacaggcatgcaccaccacacccagctaatttttgtatttttagtggagatagggttttaccatgttggccaggctggtctcgaactcctgacctcaggtgatccacccgccttggcctctcaaagtgcgaagattacaggtgggagccaacccgtctgactggatgactctttcttattcttaatatgactttagcatatgagaatgcacttaatgttaaatccactctcttgacaacttttaaagtgtccaatgtagcattaatgatatggtgttgtatggctgatttctagaacttacttttattgtttaactgaagcttttatgcccactgattagcaactgcctacttccccgtcttcccagcccctggtgac

SEQ ID NO: 733796 - DNA, 762 bp, Homo sapiens
tgtctaggtttcaaccagcagaggatccgtagtctcataaaataatatctaaaatgtctaggtttcaaccaagagtcactcacaatgtcaaggaccaggaagatctcaaagtgaatgaaagaaaaagaaagaaaatcaataggtgtcagccgtgagatgacagagatgtgagaattacctggtacagatttgaaattagccattcactgagcaattacaaacattcttgcaatgaatgaaaactagaaaatgcaaaaaatgtaatctttaaggaaggctttgtatagtctactcaatctcaacattagagtgttaatttttttattttaacgtatttgaaattttgaatggatctgaaattttgtcaagagtcgacattaagacttctagagaaagatgtgtagctatgggttttgtctcatctaatcatgttgctaagtcactcgtagatcaaggaatcagaacttttcagaacatcttaacatatttttggaatgatacagaaaacttttcattcatacctcctctgtaattgtagtttgcaaaataggaagagtggrtggaaagaaattcttggcaataacaattaaggttgtggggctataactaagagtgtttgtgataagtgcggcgagatcttctttgatgtaataattaactacataattcatgaattcatgttgtaaagtgttcggccatgtgataacaacctgaggaccgtgaggttgtgcatacctctcttcacactggagttcccaaaga

SEQ ID NO: 733797 - DNA, 615 bp, Homo sapiens
taataccagaaactgattatacagttgttgaaggggttagaaaaaaaaggaagaaataaatacttgaaggcacaaaacaaaaacagggtttcaaaccaaagtgagggtgctaccccactaggctggagcccacaagcctgcagtaattgctgagctcctggaaaaacttctacaggtgccactgggaatgctctgttattgctcaacagagcctatactgtccagcagcaggagtactgctactgctattcaagatgccaacactaatgcttctggaactcacagccaccagaggtcaccttcagtatcctcttctgcatgctgaagtacaccatccaataaaaggaaawaaatagctgcttcttctctcctaccttacaatctttcaagattgccttgctttggctgtacctaatagaaaacttgctagcaatggaatctggcatgtgtggttcacaggttttatatctttgcagtagagtgtggaagggcagatatatagataagagataacagcactaactgtcacaaaaccaaacaataatggaaaaacagaatgtgatgcattttatcttctaaccatttataaaataaattaaatatatgttttatggt

SEQ ID NO: 733798 - DNA, 636 bp, Homo sapiens
tctctgttcctggcttctgcttagatgattgattggatccatgagttacatacctaaccttcccagcaaaagtttgtctctgctctgggtaatccccagagcaagctatatcactttttgtaatagcctgagaattttccaaatcatcaaagctctggttgcttttaacctaacagctccttactcactttatctctttcctctcatattctactctaaaaagcaaggagaaaccagataacaaatcctacactttacttggaaatttcctcagctaaatatccaagttcattgcttaaaagttctattttccacctcacagtagaatataattcagccaagttttctgccactttataacaaggatagccttccctccagtttctaataacgtgtyccccatttccttctgaaacttcactgaaggcacctttaacattcatgtttctagcaaattctgttcatgatgatatacatattctctaagataacagcagctttgtctttcattttcctcatttccttctgagctctcacaaaacctaggcttttccctatcatggaccttaaaattcttccagcctttgctcattacccagttccaaagccacttccaccattaagtatttgttacat

SEQ ID NO: 733799 - DNA, 598 bp, Homo sapiens
acttcataaaagaggtcagatccaaagattgcagaagccagaagagacactgcatccttcctggttaggcctggttatgccagcttcctggactctgctggctggttgcctcaatccatgcctcagattgggtggagtctacagattgagggcaaatcccacctcctcccaacccccaccactaggcctatctgraagacagaaaagagcagcaagaaatctcagggattttctttgattactcagagggaaatagttttcatactcagagactgataggcagtcaataacatttgctttgtgaattttcacccagctacttctggatgagataatcacctttgctgctaaagaaaatcttagctcattttcttcttggggtgatggtataagagttgataaacaatttgtaagtatttatcatctggcatatttaacaaaatatctttgtgatccataaagcaaggcataaattacatttgaaagtgcattccattaaacaagaacattagagagaaagagagagagagagacactttggaccttgatctgttccaatgacatagaaacttgctttacagattggctttctcctagt

SEQ ID NO: 733800 - DNA, 621 bp, Homo sapiens
agataaaagaaaatctgtgatgcaagtaactacacagagtcctgtctgtgaaatgcaggaggctgtccataactaaaggcatctacctttagaaaggcagtatcagattgtcacttatcttgatggtcatgagatagggatgttctggttaataaaatattctagttagtagagattctcagtagactctatactctaatttctcatttaaaagaaattggactcttacaaaataaacatgatatgaacccagaatttaacttactattttcttactgttatcccaaagacattacatgatattgaacactttgaggtaattatggtactgggggagcataattgttcctactaatagaaacaaaatactaaggatttttctagaaactctyaagagccatttacctggctaaggatttttctagaaactgtcctttcaagagccatttacctggaataaaagtgatgtgtatgataaacagttggctatacagacccaagatgaaattcaaaatatgacttctgaaaattctgaattcaaaatcaagtttttgatactttaggatcagctagatgatcatcataaatttgtctcctttccacttcaattttttttcatct

SEQ ID NO: 733801 - DNA, 540 bp, Homo sapiens
ttttgagacaagcagaaatttgaatatggatagagaatttcaagactaacaaattatggttaacagtattaaatgtgataataaagtggtaggtatgttaaaaggcttatcaatgaaatataaagaactatttatagttaaaataacaatcactagaaactgctttacaaatgcctagaaaaagaaagtgtgtcaggaaaaggaataacaaaagaattagcaaaattttgaaaactgttaaagctgaraatatgtgggttcactttactatgctttctatatgtctgaagttttccacaataagagtagatgggggaaaataccaattattacagaactatctgtcattcttatctctggctcttaacttaaagtgggactttttaacacataaaggcaaagagacgaggaaaccaatatgatagccatacttttctacctgataattgagacataaagtttgtcaaatatttgtctgatctgaggcacttacagataatttctattttatattttaaggaaaacaaaaatacaaaaaaa

SEQ ID NO: 733802 - DNA, 622 bp, Homo sapiens
cacaggcaaccaaagaaaaaatggacaaatcaaattaacacgttaacacatcatgttaaaaagcctctgcatagcaaaagaaataatcaacaaagtgaagacacaacccacagaatgggcaaaaatatttgcaaactatctgtctgacaagggattaataaccagaatacataaggtgctcaaacaaatcaatagaaaaaaaaaatctaataatctgattgaaaaatagggaaaacatatgaatagacctttctcaaaagaagacatacaaatggaaaacaggtatatgaaaargtgctcaacattgtttatcatcagagaaatgcaaatcaaaactacaatgagctatcatctcaccccagttaaaatagcttctatccaaaggtcagggaataaaacatgctggcaaagttgtagagaaaaaggaaccacactggtggtgggaatgtatattcccaaccacttcagagaaaagcttggagcttccttgaaaaactaaaactagaactatcctatgatccaatcttactcctaggcatatacccaaagaaaggatatcagtatattgaacaggtatctgcacccttatgtttatggcagcagtattcacaataaccaagat

SEQ ID NO: 733803 - DNA, 614 bp, Homo sapiens
aaaatataattagagagaataaataagatctagtatttgatagcacaacagggtgactacagtcaacaataacttattgtacatttaaaaataattaagagtataattggacagtttataacacaaagaaagaataagtgtttgaggtgatggatgtcccatttaccctgatctgattattatgcattgtattcctgtgtcaaaatatctcacgtaccccataaatatatacatccactatgtacccacaaaartattttttaagttaaaaaaaaaaagcacaaggagacagtattagagcttgaccctccagtctccttgtcagtcaacttgcaatataaagcttttcttctttcaaaaaactcagtgtcatagtattggtttctaatgcatcaggcaacatttacacatctaataagagacaattaaaacatatgaagcaaaatctgatagaattgcaaagaaaaatcaataattctaaaataatagttggatacttctataactcactcttgttaagggacacaacaactagatggaagataagtaaggaaacagacaacttaaactacacaataaaccaactagatttaacagatatctaaagaacattc

SEQ ID NO: 733804 - DNA, 582 bp, Homo sapiens
ctcatatgaggcatccatgaaacagccaacaatttgggttctggagcatgagcatgtgtaggaaccatggctccagggtctagggctgaggtggcacccatattcagagtgcaggttccaccattcccatgttagtaacaatgtgcaagatgtgactgcttttagatcagccagggggctgagatccaaagcagcagcacacacacagctacaatgtttctggggtctgaggcatggactcactcactgtggtagaagtagtttcatagacacagaaaccacagctccagggcgcaggatacagattattccataaaggcagtggttcttgtttctgaggcatgggcacacagggaattacaaaggttctggggtccaaggagtggtctagtatattgtgaagatgtcagatgtcagatgtctgaggcacagatgttgaaagagtrgcaatgcagccaatgttcatagcaaagcaacctgggctccaaggcttgggttgaggctagtccacagccatgatggttcttgtgtttgaggtgagagtatgcatagtgggacagagtctgcaatgtgggtatgcgg

SEQ ID NO: 733805 - DNA, 587 bp, Homo sapiens
gtctttcccacaagaaatctattagtgttagcaaaaatattcaaaacaacattttgtatttaatgtatgggaagatatatgaaatcaagaaatgttgaatagatttcaagtattaaagaaaaaccaaaaaaaaaaaccaaaacaattatcaaataattcagtgaaataaaaaatataaagagctgttacataaatttagtattattgatttgtatagatcagatgagtttaaccttaaaacaaagtttatgtgacctctaaaatkcaggtggggctttaataaccaaggcattaatcataatattaagaggccaataatgcaagaggccagaagcctaccttaatgaactgatattaaatttcttagatacattattttcttaaaatttatgtctacagtctctgaatcccctctagctgattatgggaaaaagaaagacagcaggagaaataaacttttcaaaccagaacccaattttttccaggttactttccttcagtttacctcaataaactggcagagttggtgaaaaataggaggtacgttatttagtaaaaaaaaattttttttctatcatttgaatttc

SEQ ID NO: 733806 - DNA, 632 bp, Homo sapiens
aggggcctctgctgtgccaggtggaactccttttgcttcagcactgtagggaggtcaagccacggtcggagggtactagggtgggactgcatggccaggcaggcactatttaccaacacagaggagatcggtactgtgatcctgagtgcagctgtgcgggtggcctcaggggagcccccaccacaaagcacacttgaatagtgtgccacatcagccatgcgtggtggctcatgcccgtaatcccagcactttgraaggtggaggcgggcggatcccttgaggtcagaagttcgagaccagcctggccaacatggcaaaaccccatctctactaaaaatacaaaaattagccaggcgtggtggcacacgcctatagtcccagctactcgggaggctgaggcaggagaatcacttgaacctgggaggcggaggttgtgtggtgagccgagattgtgctgcactctagcctgggtgacagagcgagactctgtctccaaaaaaaaaaaaaaagagtgcgccacatcacacgtcacactcatggtgtgatatagatcactctccttcagactggttaatcaaactcaagtaacagagttatctaactttatcacatgcaggaaaaataaagcatgc

SEQ ID NO: 733807 - DNA, 561 bp, Homo sapiens
gctcaacattcaagaggagtaatatacagaaacatctcaaacgtctctctcctatccctatctcagcggtcagtttccttccctggaggaactatgtaattagattctcttgtatctttccagatatattttacatacamatattcagaaaagaagattattattattattattatttatttttttgagacagagtctcgctctgtcgcccaggctggagtgcagtggagtgatctccgttcactgcaagctccgcctcccaggttcacgccattcttcagcctcagcctcccgagtagctgggactacaggtgctcgccaccacacccggctaattttttttgtatttttagtagagacagggtttcaccgtgttatccaggatggtctcgatctcctgacctcgtgatctgcccgtcttagcctcccaaagtgctgggattacaggcgtaagccaccgtgcccggccagaagattgttaatgatgagcaacaaaacatttcacctctgtggccaattccaattcaaccatagctggtgctccatgctgcctgctctgag

SEQ ID NO: 733808 - DNA, 561 bp, Homo sapiens
gctcaacattcaagaggagtaatatacagaaacatctcaaacgtctctctcctatccctatctcagcggtcagtttccttccctggaggaactatgtaattagattctcttgtatctttccagatatattttacatacaaatattcagaaaagaagattattattattattattatttatttttttgagacagagtctcgctctgtcgcccaggctggagtgcagtggwgtgatctccgttcactgcaagctccgcctcccaggttcacgccattcttcagcctcagcctcccgagtagctgggactacaggtgctcgccaccacacccggctaattttttttgtatttttagtagagacagggtttcaccgtgttatccaggatggtctcgatctcctgacctcgtgatctgcccgtcttagcctcccaaagtgctgggattacaggcgtaagccaccgtgcccggccagaagattgttaatgatgagcaacaaaacatttcacctctgtggccaattccaattcaaccatagctggtgctccatgctgcctgctctgag

SEQ ID NO: 733809 - DNA, 561 bp, Homo sapiens
gctcaacattcaagaggagtaatatacagaaacatctcaaacgtctctctcctatccctatctcagcggtcagtttccttccctggaggaactatgtaattagattctcttgtatctttccagatatattttacatacaaatattcagaaaagaagattattattattattattatttatttttttgagacagagtctcgctctgtcgcccaggctggagtgcagtggagtgatctccgytcactgcaagctccgcctcccaggttcacgccattcttcagcctcagcctcccgagtagctgggactacaggtgctcgccaccacacccggctaattttttttgtatttttagtagagacagggtttcaccgtgttatccaggatggtctcgatctcctgacctcgtgatctgcccgtcttagcctcccaaagtgctgggattacaggcgtaagccaccgtgcccggccagaagattgttaatgatgagcaacaaaacatttcacctctgtggccaattccaattcaaccatagctggtgctccatgctgcctgctctgag

SEQ ID NO: 733810 - DNA, 613 bp, Homo sapiens
gagtaaagctggttgagttctggctccaggacttactggttgttaatactttggggcaagttatctcagctttctaagcatcagtcttaaatctacaagatggagataattcagtatccatcttagtgtttttgcaaaagatctaaatgcattaattcatgtaaagtgcttagggcaactgaaaagtcaacagaactcaataacaattattattatgcatcaatatggatacttgtttaaaaataagctgcttgggaamatggatactgtgtatattttcaaagcttgctttctctccctgttttgattcagatactgtcctaaaactttagctatttcacttacttagatgaatttcatcctcacaaactataagaaacctacatattacggttctcggatttagacaaagttaggacccaatgttcctttttaaaacatctcaacatttctataatcttttatgcataataaaatatcaaaaatagactagacttgcaatagaacagtgtttattttcatggttgcattcctaaaacaaatgtatatgcgtgaagtctggctatttaatcacctgagacggaggagtttcatgctggagatagaatatcag

SEQ ID NO: 733811 - DNA, 625 bp, Homo sapiens
tattgtaatgccataataataatggttatttaaaaaaaacactttagggcattgaaaaaagcaaacatgtgttaaagaaagggaagtcaaatgataccactggctattaacatcacataacaacagacaatcagatatttggagcctcctgatggaagtatatgttaccgcctctgaagtattgttgtagcagcaggaagaggaaaacaagtacatgtataatttcckgctggcagaaaattagagatagagtgaagctcaagtcccagaggcattatcacatttaatctgcacatctttttgaaacataaaaattagttgttgttttgttttactaattttaccccattttagagaggagtaaatttaatgaataaatgatatgtctgtgaccacctgactaatacattcaagaaccaggacctaccaagccttctggcttcttatgatggaacgtgctttccatgttatagagtgaggctcagtgtcatcaaggaacagccaatccaatgagattgacatgagaaatgatacatattcagcagaagatcagaccttaaaagcatgacaattgcagttatcttctctggcaagagaagagtgtaagtataatattctgttgatt

SEQ ID NO: 733812 - DNA, 457 bp, Homo sapiens
ttcaggtgtaacattttatgattctaaatgttattaattagaagcaatataatagcaaagcagatcatcaagatataaacataaattcagactgtactttaaatcattctactagaaaatgtacagatctacctctttttaggtattcattgattcaacaaacacttactttgcatttattggactrggctgtatactagccctgggaataacaagggtgaaaaacggacacatccttgactttgtggtgctttaagttgtagatgaatgcatttcaagccagacccagccttgggcacaggcaacatgtttggccttatgcagggttcagtaaggacaccttttctgaacccctcaattccctttcactttgccacatcattaggttctcctcttgataactccaaaatggacacttttagagtcattaattccaaattagaccacaaaggtggca

SEQ ID NO: 733813 - DNA, 457 bp, Homo sapiens
ttcaggtgtaacattttatgattctaaatgttattaattagaagcaatataatagcaaagcagatcatcaagatataaacataaattcagactgtactttaaatcattctactagaaaatgtacagatctacctctttttaggtattcattgattcaacaaacacttactttgcatttattggactaggctgtatactagccctgggaataacaagggtgaaaaacggacacatccttgactttgtggtgctttaagttgtagatgaatgcatttcaagccagacccagccttgggcacaggcaacatgtttggccttaygcagggttcagtaaggacaccttttctgaacccctcaattccctttcactttgccacatcattaggttctcctcttgataactccaaaatggacacttttagagtcattaattccaaattagaccacaaaggtggca

SEQ ID NO: 733814 - DNA, 659 bp, Homo sapiens
gtttataaagtctatagtagtaatgtcctaggccttcacatgcactcaccactcatcatactgactcactcagagcaacttccagtcctacaagctccacttatggtaagtgccctatacaggcgtaccatgttttatcttttataccagatttttactgtaccttttctatatatagatatacaaataccattgtgttacaattccctacagttttcagtacagtagcctgctgtacagggtgtagcctaggaataataggctactacacagcctcrgtgtatagtaggctgtaccatctaggtttgtataagttcactctataatgttcacatgacaacaaaattgcctaataacacatttctcagaatgtatctctgtcattaagtgatgcatgactgtacttagattttcatcaaatttttgccacttaactatgggtttgcccattaagtggcatgcagttatatctgggagtgtataggtattatttttattcctgttatgttttttgttaatattctatgaattttaacagacaactttcttaattttcacgacatataaaatgaatacctaaaactgaaatttgatcttatgaagaccaccctcccctactccccaattcttcctttttctagttggcatctcatggattt

SEQ ID NO: 733815 - DNA, 670 bp, Homo sapiens
aaaatattacatttttgtttgtactacaaagggaaagatagtctgcatggccatctatcccaaaagttgtaaagatcactggtctagaaagctagcagaccagtgcctttaaattaggttctatcagaagatattttcttgaaatcactatgtcagtatagataatttgaccatctgtttcctgagtgttacataaaccttccttacatcatatgtcaaaataaaacattccagttcactaacctttatgggatttcaattccactttccccagttggctgacataaacatctatggcaccctgattagttgaggcttttagacatccagaagacgaatctaggaagaagaaaaaaccataagtaaaataactcttacttgataaatggaattacaaacttgaaataaaaggctctgctttagcattaggataaggggctaagaatcttgcaaggtttagtattttcctcataacaatgccattgtttgcacttaaaygtaaacagttatcagaaacctagaaatctattaaacaactaatttaaaaatctttatctatattaacctgaataacttatctctaaacatttactctaaaactttatgagtaggaaggagagtctgcaagtaatggttcctttgaccactaagcatcattgatatatttagt

SEQ ID NO: 733816 - DNA, 646 bp, Homo sapiens
caatggagctttatagttttacactagtctttaataatgcagtaaaaatttacaatttttttaaaataaaaatatggtctttctcaaaaagccaatcattagtgcttgtcatgaaagtgaggaggtcttgagaaaacaatgattctttgaaccagaaaaatagaagttttagatctatacaaaatgaggattagttaattatagtgggacctatagagtctcagataacattcttcttgaatgtttgagttctactgtatactaaaagcataatggagcaacaacaacaaaaacccatggaattaaggaatcgtttcaaatactgtctagttgtaagtaacacttcaaaatatttttgtcaactctaaataaaacagtaaacaaaaacttattttcaactcatatcaaaatatttagaaaatctctaccttaaacagaaatattctaaagtcattagaaaacacaaaatggatttyttgcttcaaatgcatactggaataaagtagtatatttaaaagtataccaagcaacaaaatgggcattattagcaaaattttctatattttgatttcacctacttgatctccaatcactgaaaataataaattaattatttgagaggagtaaatcttagtaaaagcttctt

SEQ ID NO: 733817 - DNA, 646 bp, Homo sapiens
caatggagctttatagttttacactagtctttaataatgcagtaaaaatttacaatttttttaaaataaaaatatggtctttctcaaaaagccaatcattagtgcttgtcatgaaagtgaggaggtcttgagaaaacaatgattctttgaaccagaaaaatagaagttttagatctatacaaaatgaggattagttaattatagtgggacctatagagtctcagataacattcttcttgaatgtttgagttctactgtatactaaaagcataatggagcaacaacaacaaaaacccatggaattaaggaatcgtttcaaatactgtctagttgtaagtaacacttcaaaatatttttgtcaactctaaataaaacagtaaacaaaaacttattttcaactcatatcaaaatatttagaaaatctctaccttaaacagaaatattctaaagtcattagaaaacacaaaatggatttcttscttcaaatgcatactggaataaagtagtatatttaaaagtataccaagcaacaaaatgggcattattagcaaaattttctatattttgatttcacctacttgatctccaatcactgaaaataataaattaattatttgagaggagtaaatcttagtaaaagcttctt

SEQ ID NO: 733818 - DNA, 611 bp, Homo sapiens
aattataattttgcttgacatctcaagactaactgcagctcaacacagagacaagcagagaagctgaactttaattccagccagataattctgaatatcatttttcaagccaaggaaaatgcaatgctgagttggatttttctactaataggaattgatttgatattaactgaaattggatgactcctaagtttctttctrtcaaccaaaaggaaaaatatgactataatttctaatatactttcccagtcaagggacaaagggcaaagagcacttgtaacattgggaatattattttctggtatgtctggtgaccctaggggttagaactccttgtatttcatcacaggactttgatagcatttgtttggctatcaccttctctctctctctctctttctctctcagcttcaggaacaatagaattggtggcagaaggagaagaggctttatgagcttggctacatttcagttctaaatatttggttgttagggataaccgaagcttcctggtacctttgccaaaatgactctcttctgcctctcacactgctaacttctgtccttgcatcatatttacttgccaagggccgtcagcactgttgccctaa

SEQ ID NO: 733819 - DNA, 494 bp, Homo sapiens
ccaaggcacgtagattctagttcgttgatgctctaagtgtggtccttgaatcagaagcctcagcatcactaggagtgatgcagcctctcaagcccacgccagacctgctgagcaagaacccggagctcagtagcctcccaggcacttcataaacatgttgaagtctgaggacactggtctcattcttggctgctcattagcatcacctagagaaagctttaaaatcccacggcccaggccacaccccagaccaattaaatgagaatctgggggctgggacccagacatcaccattttytaaaacaccccagatgatttcaactgtgcacccaaagttgtgaaccactgtttgacaccatatgccaaagtcacaaaagagttagaaaaacaaaaacaaaaaccaaaacaacagcagcaacaacaaaaacaacaacaaaaccctctggttttctgactcttgggcccttacccacatcaagggtctaaacacctgt

SEQ ID NO: 733820 - DNA, 621 bp, Homo sapiens
gaaaaggctgcatatccaatgatatgacattctgaaaaaggcaaacctatggagacaataaaaaataaaatcagtggttgcctggggaggggggcaggaatggagcatagaagatagttaaactactccctataattctatagtggtggatacatgtcattatacatttgtccaaacctatacacaaggagtgaacmctaaattaaactatggactttgggtgataatgatgtgtcaatgtacgtttatcaattgtcacaaatttgatactctggtgagggttattgataatatgggaggctatacatacacaggggcaggggaaatacaggaaatctctgtacttacctctcaattttgctgtgaacctaaactactctaaaaaatacaaaaaaaaacctctttctaaaaaaaaactctttaagttgaggaatgtatcttcttcattgtgtccccggtagctagtacagtggcagaattgatggcttttaagtatagctaatgactgaaggagcatgttataaaatatttattaaagcctgttctataatatttggcaggtaatagacatttaataattattagatcatagctgatgatttgactcttgacagaactaat

SEQ ID NO: 733821 - DNA, 661 bp, Homo sapiens
cctcatttaaccttttatcttgaagcaatactttaaggcatagttcagagagtttgtacaatcaggactggttagttgaccctttttgtgctttctttcctgagaagcctctgatatggaagcttgaggtcagtagatgttttctctatccttgaaaaaacttgtctgtctgttcgaacttaccctcttggggcttcaaagtcctggaagcttttgggttagcagggattttctaaggggaagacctcagagttgattggtcagaagtagaagagatcagatctgtttctctcgtacaccattatcactttcatcgctgagcattttgcttacactttttccattttccagtccacacatcagccattccttaaaggccccttcacacctggtgactactatttctccttttaccattcyggcccatgtggaactcaactctctaaaagtttctttattcctgaaccacaaaatttgacattttattaccataaactattttagattattttattatttttatttgtataagtattgctttcccaacttgcttattcatgttttgaagactggacctgcatattatatttgtgagttccatacaaacctaacactatgcatagcatatagcaggaatacaacataggttgaatgtacttca

SEQ ID NO: 733822 - DNA, 661 bp, Homo sapiens
cctcatttaaccttttatcttgaagcaatactttaaggcatagttcagagagtttgtacaatcaggactggttagttgaccctttttgtgctttctttcctgagaagcctctgatatggaagcttgaggtcagtagatgttttctctatccttgaaaaaacttgtctgtctgttcgaacttaccctcttggggcttcaaagtcctggaagcttttgggttagcagggattttctaaggggaagacctcagagttgattggtcagaagtagaagagatcagatctgtttctctcgtacaccattatcactttcatcgctgagcattttgcttacactttttccattttccagtccacacatcagccattccttaaaggccccttcacacctggtgactactatttctccttttaccattctggcccatgtggaactcaactctctaaaagtttctttatkcctgaaccacaaaatttgacattttattaccataaactattttagattattttattatttttatttgtataagtattgctttcccaacttgcttattcatgttttgaagactggacctgcatattatatttgtgagttccatacaaacctaacactatgcatagcatatagcaggaatacaacataggttgaatgtacttca

SEQ ID NO: 733823 - DNA, 641 bp, Homo sapiens
ggatttgtctcatcctttatgaaaatttttcatccattcacttgacagaacaaatcaaaacatgtgagaagggatgattgtttcaaaagaaaagtgggatgtgcagagagggttatgcatggagagatgcctcggtgagtattgagagcagagggagagaatgcaaagtttcttaggacttggcaactggaagattcagtgaaagaaactacgttcctttaaaaaaaaaaaaacaaacaaacaaaaaccatgggacaccgttaaaaaaagggaacactgacctagccagtctcaaacattgttaaaaaggactcaagacctatttgttttgacttaggtgtgcatatttcaaacacatttgttctaagcatattgcaacagatctgcattcttagccaattcccctgaattcttaattcttgttaacaactctggcaattaaccaattactcckaccactgaagggctcagggaggaagggaccgatgatttatagcagcacagcgtccatgcttgttgaatcaagctcaattgctggagtacttcatttagagaatagatggggaggtgagtagccaacaggctaaagacagtcaaaagactacaactgccaacaggtgacagattggaagtgttgcttc

SEQ ID NO: 733824 - DNA, 532 bp, Homo sapiens
ctcaataaagctatttaaaaaaagttgagtttgccccacccctagatttgtcatgcccagagacgcctgaatgtttgagatctctggaagtgacctaatatgagacaatataggcatatagaatgctaaaatcaaaataatagaaaactgggctttgcatggccctagttcatatcttgtctttaccttaaagtaaaaattcttcacaacttgtcttttaagtgaggaaagtgtatatcaatttcatcactagttatcaaattagattgtatgggagaagctagacatgaaatcacacataaatggcttgctgagtaaagtgtgaactcttttaatccatataggcataaaaacatacatattcctgwtacctactctatccaaaaaataatcatactatcaaatgtgctttttgccacatttctaattatgtaaggtatttcataccatatcaaaagagcttttatttctactagactgcaggcttctcaaggagagaggtcctgtgttatttacctttgattcccacaat

SEQ ID NO: 733825 - DNA, 538 bp, Homo sapiens
agctctgtttctctctctgcacagagtaattttcctaaaacacccacgtcatcatgttatccttcttttcaagaatcttatttcttgagaaggaccagcgtatttctttattgtaagaacttccttatttctttccacttctaatatcaacctctctgaccaattttgaagatcttctaaaatgggatcctagcctaactttcccatcttgctccctaccatcccccaaacatgagctttctttcarttaggatggtctcctcatagtctcccatgtgctagtttcttccttcctgtctttgttcattctgcttctttaacctaaaatgctctatttgtttatcctcattaatcctatgagtgttttcaaagtccagatcaattaccagcattttctgcaaagcttcactaagcatgccaaattcaggaaagtctttccatatccaaactgcacttcagttttattaatatttgatcatatttatcctgtattatgttttgtctccgtaaaatattttctaaatcagaaacataatag

SEQ ID NO: 733826 - DNA, 538 bp, Homo sapiens
agctctgtttctctctctgcacagagtaattttcctaaaacacccacgtcatcatgttatccttcttttcaagaatcttatttcttgagaaggaccagcgtatttctttattgtaagaacttccttatttctttccacttctaatatcaacctctctgaccaattttgaagatcttctaaaatgggatcctagcctaactttcccatcttgctccctaccatcccccaaacatgagctttctttcagttaggatggtctcctcatagtctcccatgtgctagtttcttccttcctgtctttgttcattctgcttctttaacctaaaatgctctatttgtttatcctcattaatcctatgagtgttttcaaagtcyagatcaattaccagcattttctgcaaagcttcactaagcatgccaaattcaggaaagtctttccatatccaaactgcacttcagttttattaatatttgatcatatttatcctgtattatgttttgtctccgtaaaatattttctaaatcagaaacataatag

SEQ ID NO: 733827 - DNA, 585 bp, Homo sapiens
tattatgattttatagcacacttgtcatcctaattctatttttcttagtctaatgttaaaatcctttcttctcaaggcattcacaaactgatcatggttgggagaagactggagacaagcagggtggtgaggaaatcagctttgctccattrttttcctacagtctttagaagctgagttccctcatacccttcactcagcttcccctagtgttaacatcttatagaacatgctacatttgttaaaacaaagaaatttacagtgatacaatcctatttactaacctacagactttatttggatttcaccagttttcccactaatgtcctttttctgttccaggatccaatctaagatcccgtcggagggaattttgacacagcctaaaaaaactattcccatggatgaaactttttactactgagtaacgtgtactagtaatcctccatcgatccttaaaccatacaggaatttggggatggagtgaacgtcagggaaagattcagaaacatctattttacacattatttcataacaaaatagaaagttttacaacttgatacggctgcattgaaaattgtgagg

SEQ ID NO: 733828 - DNA, 585 bp, Homo sapiens
tattatgattttatagcacacttgtcatcctaattctatttttcttagtctaatgttaaaatcctttcttctcaaggcattcacaaactgatcatggttgggagaagactggagacaagcagggtggtgaggaaatcagctttgctccattgttttcctacagtctttagaagctgagttccctcatacccttcactcagcttccsctagtgttaacatcttatagaacatgctacatttgttaaaacaaagaaatttacagtgatacaatcctatttactaacctacagactttatttggatttcaccagttttcccactaatgtcctttttctgttccaggatccaatctaagatcccgtcggagggaattttgacacagcctaaaaaaactattcccatggatgaaactttttactactgagtaacgtgtactagtaatcctccatcgatccttaaaccatacaggaatttggggatggagtgaacgtcagggaaagattcagaaacatctattttacacattatttcataacaaaatagaaagttttacaacttgatacggctgcattgaaaattgtgagg

SEQ ID NO: 733829 - DNA, 614 bp, Homo sapiens
gtaagcaacctaaaagtctaatgttagggcgttttatataataaaatattgggctattgtcgtcactttttttttataaagaattttttgacacacagggaaatgcttatgataaatggaagccctttaaatgtaggtattgggtctttttctgtattaaatctccaatctccatgcaatgctaagcacttaataggtgcttcaaaaaatttttttatgttgagttgaaataataaagcattaaaaattatatgtgtggaagaaaatatttacaaaagacatgtatgataaaggacatgctattcaaaatatacaaagaaactttaaaattcaacaataagaaaataacctggtttaaaaagtggcaaaatatatgaatagatacttcaccaaagatgacatacagatggctaataagcatatgaaaaaatgcccaatatygtatgtcattagggaactgcaaattaaaacaacaatgagataatacatagatactagaatggcaaaaatccaaaatactgacatcaaatgctggtgaggatgtgagaatacaaaatggggctgggtgcggtggcccacgcctgcaatcccagcactttgagaggatgaggtgg

SEQ ID NO: 733830 - DNA, 614 bp, Homo sapiens
gtaagcaacctaaaagtctaatgttagggcgttttatataataaaatattgggctattgtcgtcactttttttttataaagaattttttgacacacagggaaatgcttatgataaatggaagccctttaaatgtaggtattgggtctttttctgtattaaatctccaatctccatgcaatgctaagcacttaataggtgcttcaaaaaatttttttatgttgagttgaaataataaagcattaaaaattatatgtgtggaagaaaatatttacaaaagacatgtatgataaaggacatgctattcaaaatatacaaagaaactttaaaattcaacaataagaaaataacctggtttaaaaagtggcaaaatatatgaatagatacttcaccaaagatgacatacagatggctaataagcatatgaaaaaatgcccaatattrtatgtcattagggaactgcaaattaaaacaacaatgagataatacatagatactagaatggcaaaaatccaaaatactgacatcaaatgctggtgaggatgtgagaatacaaaatggggctgggtgcggtggcccacgcctgcaatcccagcactttgagaggatgaggtgg

SEQ ID NO: 733831 - DNA, 628 bp, Homo sapiens
gcaggatggagaagtcttcgtcctctatgagaagagaattgaatgtcaggggcctgtttctagacacccctcttccagctcacaggccctcccgttctcattgagaccgtggcagggtgggagcatgcaggactggcaggggtgaggagaacacaggttggccaggtgcccgtcacaccaaccccargtgccccaggggtcctgcagacctgtccagctcgtgctgctgaccagcagggctggccgctcacggagacgcgtcaccagcccgctcccagcatcccgctccgtgaaggccgaccgctccgtgactgggtcctcaggttctgagctgaaggagcagaaaaaaagcctgtgagaggccatagagcaggcccgggacccaggagaggcatctcctgccgtggcgaggcctgcaggctcccagaggttggggtgcccagccacatcagcagcaccaggccacccctgccatctgaggcctgggcttgctttctctaatattgttgctgggtgctaaggttacaacagcaaacaagactgactcattccttttctccacgggacttactgtcttatcatcccctggactcaagatgagggtgcagggacgccctcccacaccacc

SEQ ID NO: 733832 - DNA, 628 bp, Homo sapiens
gcaggatggagaagtcttcgtcctctatgagaagagaattgaatgtcaggggcctgtttctagacacccctcttccagctcacaggccctcccgttctcattgagaccgtggcagggtgggagcatgcaggactggcaggggtgaggagaacacaggttggccaggtgcccgtcacaccaaccccaagtgccccaggggtcctgcagacctgtccagctcgtgctgctgaccagcagggctggccgctcacggagacgcgtcaccagcccgctcccagcatcccgctccgtgaaggccgaccgctccgtgactgggtcctcaggttctgagctgaaggagcagaaaaaaagcctgtgagaggccatagagcaggcccgggacccaggagaggcatctcctgccgtggcgaggcctgcaggctcccagaggttggggtgcccrgccacatcagcagcaccaggccacccctgccatctgaggcctgggcttgctttctctaatattgttgctgggtgctaaggttacaacagcaaacaagactgactcattccttttctccacgggacttactgtcttatcatcccctggactcaagatgagggtgcagggacgccctcccacaccacc

SEQ ID NO: 733833 - DNA, 586 bp, Homo sapiens
ataaagcaaatgtggtatatatacacaacagaataccatttcagccttaataaagaaggaaagcctgtcactgtgatgacatggatgaacctggagaacactgtgttaagttgaatgagctagttacagaaagacaaatactgcatgaaacaaatacaaaaaatatrctaaaaagtacaatggtggttaccaagggctggcagggactaccctcactaccagggggtttgctggggagatctgggcctaaagacataaaatttcagtgagacaggaggaataagttaaaatattatacaacatggtgactacagttcacaacatgttgtaatcttgaaaattgctaagaaagtagatgttatgtgttctaaccacaaaaaaatgacgttgtgaggtaatgtatatgatattggctctatttagccattccacaatgtacacacattccaaacatcatgttgtacatgataaatatatataacttttgtcagtttacataaataagcaaagaaaaatacccagattctcaggctgtattttctgtagaaaatgccattgagaaatgaggtgagaaaaagcagctctc

SEQ ID NO: 733834 - DNA, 508 bp, Homo sapiens
ctaatttctgcatttttagcagacatggggtttgaccatgttggccaggctggtctcacactcctggcctccagtgatccgcccacctcggcctccccaagttctgggattacagatgtgagccactatgcccggcctctatgaaggatttaaattaacaaaaaattaaaaatatagcctagttcttaatagtatatcaacttcttgaggaaatgtggcaaaaggcrtatctgaaacactaagataataaaataattcaccataatatttgagagaaaattcaataagctgcatttgaatttcacctgtagatgtggatcaaaatacattaagaaagaaaccagtgtaccctgtttaaaatcctgactctaccacttaatatttatatggcttttcgcagcaacttatctgttctttagtttctgtatttcagaaaatggggttaaaagctctggtatcatcatatgggtgttagtgttagtactgagataagctatacagagtgctg

SEQ ID NO: 733835 - DNA, 593 bp, Homo sapiens
tccagcctccccataccttccggttgtgtaccagccagcgttctgatctggcctgaaagctctctgcctccaagatacttgccgcagtatctcctgggctgagcgagtttagagggaatcaaacccacacttaagttaccagggaactgttccaccgaaacccgcaacactgtaattacaataaacccttcagcaccactggctctgagaggtaaaagaaattaaatcaataagcatagatcgaatcaggagcaatcttatgggagrttcatgtaaatgcacaatcttacattggaaatgagtttgaagattaatacccttcacaaatgtaaaagtagaaagaagtatgtaggagaaaatgctgctgcaacagtaggtcaacccctctttttaagagctgtcagctatattgtatgaagaactcatgaaacttaacgttctcagtatttttttaaaccccataatgcaaattcttccacagaataacaagtgatgcatgcttgaaatttatttttaaatcaagagcaaaatgaaaccctttaattaatctcggagaatttagctccttgcctttcagatctgtcttctgcaca

SEQ ID NO: 733836 - DNA, 633 bp, Homo sapiens
ggtcttgtccttgaactctcagagccactttcttttttcttttcttttttttcttttgaaactgggtctaactgtgtcatccaggctggagtgcagtggctcagctatggctcactgcagcctcaacttctcaggctcaagtgatcctcccacctcagcctcccaagtcagaactacaggtgtgcaacaccacaccaggctttttttatttttattttagaggcagggtcwcagtatgttgcctaggctgccttgaactgctgagctcaagcaatcctcccatctcagcctccccagcatctaggactacaggcatgtaccacgatacctggctaatattttttatattttctgtagagatggggtctcactatgttgcctaggctggcctcaaacccctgggctcaagcaaacctcctgcctcagcctccctaagtgctggatcacaggtgtaagctaccactcccagccactttcttatctatgaaatgaaattaacagctctgtaataataataaataataataagtaattaatagaagcattatttacagtagccaacaggtggaaacaacccaaatgtctatcaacagagaaatgaacaaaacatgatataacaaaacaaaacatgat

SEQ ID NO: 733837 - DNA, 611 bp, Homo sapiens
aattctatatgtcatgaaccactacttttaattacttgctgggatatgccatagataacatggtaaatgtagtaatgaaattttgagtttcaagaaagtctgtcttaccaggtgactcggtttcacgaatctacttatggtaatttttaaaaaattattattattattattttttgagatgaagtttcgttyttgttgcccaggctggagtgcagtggtgcgatctcagctcactgcaacctctgcctcccgggttcaagcaattctcttgcctcagcctcctgaatagctgagattacaggcacccaccacctcacccagctgattttttgtattttagtagagacagggtttcaccatgttggctaggctggtctccaactcctgacctcaggtgatccgcctgcttcggcctcccaaagtgctgagattacagatgtgagacatgacacctggtcaaaattctttttttttttgttttaaccttgcctatggtgctgatgttttaaaaatttatgtaagcatgttatactgttatttttcatttcatttcaacaagccttgggttcagctattgagaggaagccctgagatcaggaaaggacagtgca

SEQ ID NO: 733838 - DNA, 611 bp, Homo sapiens
aattctatatgtcatgaaccactacttttaattacttgctgggatatgccatagataacatggtaaatgtagtaatgaaattttgagtttcaagaaagtctgtcttaccaggtgactcggtttcacgaatctacttatggtaatttttaaaaaattattattattattattttttgagatgaagtttcgtttttgttgcccaggctggagtgcagtggtgcgatctcagctcactgcaacctctgcctcccgggttcaagcaattctcttgcctcagcctcctgaatagctgagattacaggcacccaccacctcacccagctsattttttgtattttagtagagacagggtttcaccatgttggctaggctggtctccaactcctgacctcaggtgatccgcctgcttcggcctcccaaagtgctgagattacagatgtgagacatgacacctggtcaaaattctttttttttttgttttaaccttgcctatggtgctgatgttttaaaaatttatgtaagcatgttatactgttatttttcatttcatttcaacaagccttgggttcagctattgagaggaagccctgagatcaggaaaggacagtgca

SEQ ID NO: 733839 - DNA, 611 bp, Homo sapiens
aattctatatgtcatgaaccactacttttaattacttgctgggatatgccatagataacatggtaaatgtagtaatgaaattttgagtttcaagaaagtctgtcttaccaggtgactcggtttcacgaatctacttatggtaatttttaaaaaattattattattattattttttgagatgaagtttcgtttttgttgcccaggctggagtgcagtggtgcgatctcagctcactgcaacctctgcctcccgggttcaagcaattctcttgcctcagcctcctgaatagctgagattacaggcacccaccacctcacccagctgattttttgtattttagtagagacagggtttcaccatgttggctaggctggtctccaactcctgacctcaggtgatccgcctgcttcggcctcccaaagtgctgagattacagaygtgagacatgacacctggtcaaaattctttttttttttgttttaaccttgcctatggtgctgatgttttaaaaatttatgtaagcatgttatactgttatttttcatttcatttcaacaagccttgggttcagctattgagaggaagccctgagatcaggaaaggacagtgca

SEQ ID NO: 733840 - DNA, 771 bp, Homo sapiens
agtaagacaaaatactatttctcagtagagcacaaccttgaagaaaatcaatgtaaatgttattctacttctcacctctttttttctacaaaactaaacactccaaacacaggcacagcaaactgcatttcgaaaggttttgtaagttaaacaagccaaggaagttacatggaaaaaaaaaatctcctttgagatataaaactgttcatatctgaaggagactgtacagatagcagaagggaatatagtataatatttgatgaagagacgtaattatcatttatgaatgagaaagctcaatgttttcctaaattactcgaattaaacctcaaataaatatttgaagttctccatctaattcggctacaatgaaaaactgaatctcattacctctggatttacatcgactccaatttcaaagattatatttatttcagaggggatgaaaaagcatttttcactaggaagaaaatgaattgaggtttcaatataaaacaagactcaytgcatattataaagaaagtgctagtctaaatttttttttccaaagaaaacttctaagaaaaagtcagagatatttcacttagtttggagataagtttaaataaatgacaattatgtgcctgtaatagtggtacaaacagatattgtatacctcaatttaagcatatttattatatcaactagagagtattattccttttatgaaataattcctcattctacaaaaacacgcagtataggatccatttagtaatgagctccccagtg

SEQ ID NO: 733841 - DNA, 614 bp, Homo sapiens
cacgcagtataggatccatttagtaatgagctccccagtgtattctacctgtaatttaattcaattttcacagttttctagatacaacaattgcctcaagcaaggtaaacgtctttgccagtttaagtggatacgctgtagaaatcagatcagtgtgtgtatgtctgtacatctctttaaaagcttattgcaatgtggttataaaaggaacagtcagttgtccactattttcaccatatgcaatttcctcccatagattcayggccatatggagatgttcatcctgagccacctggatttccagcagggaaaacaaaaccaacaaacaaaacaggacatgacaatgaagatatcaaagaactgttatttacttttgctacaagaagtacagagaggattcatgattcttgaactatattttccaaaataagtgacagtcattcactttcttgacaaatatctatggagtactaacaataggccggacactatgatcgtcttttacaatatattctccctaaagaagattccaagtgaaaatatattgagagtgctcatcattctatatctcatacttgaaacattcataataggcgcgtcggccacttaagggc

SEQ ID NO: 733842 - DNA, 640 bp, Homo sapiens
aggatccatttagtaatgagctccccagtgtattctacctgtaatttaattcaattttcacagttttctagatacaacaattgcctcaagcaaggtaaacgtctttgccagtttaagtggatacgctgtagaaatcagatcagtgtgtgtatgtctgtacatctctttaaaagcttattgcaatgtggttataaaaggaacagtcagttgtccactattttcaccatatgcaatttcctcccatagattcacggccatatggagatgttcatcctgagccacctggatttccagcarggaaaacaaaaccaacaaacaaaacaggacatgacaatgaagatatcaaagaactgttatttacttttgctacaagaagtacagagaggattcatgattcttgaactatattttccaaaataagtgacagtcattcactttcttgacaaatatctatggagtactaacaataggccggacactatgatcgtcttttacaatatattctccctaaagaagattccaagtgaaaatatattgagagtgctcatcattctatatctcatacttgaaacattcataataggcgcgtcggccacttaagggctccaagaaatcttaaagaaacttgtttaatccaaca

SEQ ID NO: 733843 - DNA, 629 bp, Homo sapiens
cttgggtcaggcaggtttggatcatcaacattttcatttccctctttatatccaaaatgaaatgttcacatggtaagaccaaccagttttttcttcttgtgtttatagtggaatttggatgagaactgtggatataatctacataattaatctscgccaactccaaatgccagataatctcttaaattgtttgtcaagataaataagacagaaaaattgactcacacaccaacctcctctctaatttaacaaaattggagaatcgcacaatgggtggaatactgacaatatgcaatagaagttgccctaaagggattatttagcaggaacaaggaaaactccaacagttggcagagtcatgatgaggttaaacaaaagatgaaactcttctccaaacctgggtgttgaattattgaaatttgtttcaaacatttcagcatctgagtagtgacatatgacaaacacatgcctatattacaatagaaaactaaacttgtaacaaagtaatctttatagttaccttggttttgtcatctgtaaaataggagaaataatagtgtctacttcatatgggtaaacagtcaattagatgattctcataaaggatccaacattgtatatggcactct

SEQ ID NO: 733844 - DNA, 601 bp, Homo sapiens
gcccacatcaaataaatctagattttcatatataatatatgtggaggtgaagacttaagagaaataccttccttatatttcaaagtctattctatcacttcatgtgaattataaacacatatgaaaacaagaaacaattcaacctcaggatcctgcaaccacttcctacaaaaactccagacataatcagccttagaggataagctctctaacaagaaataacatttgacccagcaatcccattactgggtatatacccataggattataaatcattctgctataaagacatatgcacatgtatgtttaytgcagcactgttcataatagcaaagacttgcaaccaacccaaatgcccatcaataatagactggataaagaaaatgcagcacatataaaccatggaatactatgcagccataaaaaaggatgagttcatatccttcgcagggacatggacgaagctggaaaccatcattctcaggaaactgacacaggaacagaaaaccaagtactgcatgttctccctcataagtgggagttgaacaatgagaacacatggacacagggaggagaacatcacacaccagggcctgtcggg

SEQ ID NO: 733845 - DNA, 637 bp, Homo sapiens
tgcacactcacactctctgacagcctggctcctaggagcacctggactatctgtcctgtggggtgagggcagaggcgagggcctggcatgcagcttctggcctgaacgcagtgatttgcaggtcgaactggctatttttgcaggttcaccaacaatttcggctgctcactaaacacagcctgtgagtcaggagtcaggcaagctgtgcacccagaactgtatttaagataatctttggacaggagttggcagtcagaaaatraagtgtataattttcgattagtgcattacaagcttccaggtttgcctgggccatagcagtctcttctggaatttgttttgcaacttgctgccatctacaaacaaacaggcctgggactcctgcaacaaaagaaaaatattttgtatgtgaggatttctgaagccaaatatttcccacacacccacctctctctctgctctctctcctctctcattctctttctttcacacacacacacacacacacacacacacacacacacacacacacacacagccttgtggtggggataacaaccccttccgttcatccaccctggggctcctcatcatgtctctcttcatctaggatgctttccttgttcttgctttttac

SEQ ID NO: 733846 - DNA, 637 bp, Homo sapiens
tgcacactcacactctctgacagcctggctcctaggagcacctggactatctgtcctgtggggtgagggcagaggcgagggcctggcatgcagcttctggcctgaacgcagtgatttgcaggtcgaactggctatttttgcaggttcaccaacaatttcggctgctcactaaacacagcctgtgagtcaggagtcaggcaagctgtgcacccagaactgtatttaagataatctttggacaggagttggcagtcagaaaatgaagtgtataattttcgattagtgcattacaagcttccaggtttgcstgggccatagcagtctcttctggaatttgttttgcaacttgctgccatctacaaacaaacaggcctgggactcctgcaacaaaagaaaaatattttgtatgtgaggatttctgaagccaaatatttcccacacacccacctctctctctgctctctctcctctctcattctctttctttcacacacacacacacacacacacacacacacacacacacacacacacacagccttgtggtggggataacaaccccttccgttcatccaccctggggctcctcatcatgtctctcttcatctaggatgctttccttgttcttgctttttac

SEQ ID NO: 733847 - DNA, 551 bp, Homo sapiens
aaaatgaaaattaaatcaatgagaatgagaaagaagaagcctaaactggaaattttaaaaaagaatccaaatttcttcttcttcttcttcttcttttttttgagacagagtctcactctgttgcccaggctggagtgcagtggcatgatctcagctcactacaacttctgcctcccaagttcaagcaattctcctgcctcagcctcccgagtagctaggattacaggtgtacgccaccatgcccggctcatttttgtatttttatttatttatttatttttgagacagagtctcactccatcgcctaggctggagtgcggtggcgtgatcttggctcactgcaacctctgcctcccagtctaacgggattctccagcctcagcctccccgaatagctgggactayaggtacacatcaccatgcctggctaatttttttgtattttcagggctccaccatgttggtcaggttggtctcgaactcctgacctcaaatgatctgcctgccttggcctcccaaagttctgggattacaggtgtgagccagcacac

SEQ ID NO: 733848 - DNA, 609 bp, Homo sapiens
atcaatgagaatgagaaagaagaagcctaaactggaaattttaaaaaagaatccaaatttcttcttcttcttcttcttcttttttttgagacagagtctcactctgttgcccaggctggagtgcagtggcatgatctcagctcactacaacttctgcctcccaagttcaagcaattctcctgcctcagcctcccgagtagctaggattacaggtgtacgccaccatgcccggctcatttttgtatttttatttatttatttatttttgagacagagtctcactccatcgcctaggctggagtgcggtggcgtgatcttggctcactgcaacctctgcctcccagtctaacgggattctccagcctcagcctccccgaatagctgggactataggtacacatcaccatgcctggctaatttttttgtattttcagggctccaccatgttggtcaggttggtctcgaactyctgacctcaaatgatctgcctgccttggcctcccaaagttctgggattacaggtgtgagccagcacacctggcctcatttttgtatttttagcagagatggggtttcaccatgttggccaggctggtctcaaactcctga

SEQ ID NO: 733849 - DNA, 619 bp, Homo sapiens
cattctgggtagcatatggggcatagatagtccctggaatgaggtggtagtccagttgctgaaacttccactggtgttaacttggtagaatattctggtggacagtaaacatctgggttggtgcaaagattcagactctttcagcatggggatagcagmattttttttttctgagacagtcttgctctgttgcccaggctggagtgcagtggcacgatctcagctcactgcaagctccgcctcctgggttcacacctttctcctgcctcagcctcctgagtagctgggactacaggcacccgccaccacacccggctaattttttgtatttttcagtagagacggggtttcactgtgttagccaggatggtctctatctcctgaccatctgcccgcctcggcctcccagagtgctgggattacaggtgtgagccaccgcacccggccagggatagcagcatttgaaaacaatgaactggcttgctgtgatgaagcctaaagagaataatgggtaactgaagatagttgccaaacagttaagaactaagtgtgaggaccaccaggcatctttagtagcttacaaagtgtctctccctcctgttatgggagaatagctgca

SEQ ID NO: 733850 - DNA, 600 bp, Homo sapiens
gtgtatgatagaagagaaattttcaagttctctgtcttgattaaaaattgagacattttctgagacagaaaatttaactgaattgttttttatacagcttactgtaacacttattgctaactgcagtgatctgatcttgcaaatctagaaaatataggttttytattcataggtttattaattctaggagcacaaacaggtcatctgcaaagaaatactagctttcaaccacaggtaccccctgaatattaacagaaatacagctttgctttggtaaagaaaacaaacaaaaatattatccttctacctaaacaaccattcaaataatatgaagcaattgctatatgtatgatggcatgtagtataaggaggatacatggaacataatgtccttgctctcaaggagtttactattttatatttataatgtaatataaacagagaccagaagagatcattcaaagaagttcaaatcagtatttatttagtgagctctgcatgtgcccaccattggacaataggacagtgaattaaaagcctaaataattttgaaagtgatgaacatgtaaaataattctgacaagatgcaattttaataaa

SEQ ID NO: 733851 - DNA, 600 bp, Homo sapiens
gtgtatgatagaagagaaattttcaagttctctgtcttgattaaaaattgagacattttctgagacagaaaatttaactgaattgttttttatacagcttactgtaacacttattgctaactgcagtgatctgatcttgcaaatctagaaaatataggttttctattcataggtttattaattctaggagcacaaacaggtcatctgcaaagaaatactagctttcaaccacaggtaccccctgaatattaacagaaatacagctttgctttggtraagaaaacaaacaaaaatattatccttctacctaaacaaccattcaaataatatgaagcaattgctatatgtatgatggcatgtagtataaggaggatacatggaacataatgtccttgctctcaaggagtttactattttatatttataatgtaatataaacagagaccagaagagatcattcaaagaagttcaaatcagtatttatttagtgagctctgcatgtgcccaccattggacaataggacagtgaattaaaagcctaaataattttgaaagtgatgaacatgtaaaataattctgacaagatgcaattttaataaa

SEQ ID NO: 733852 - DNA, 581 bp, Homo sapiens
atgtaaaataattctgacaagatgcaattttaataaaataattcaaacaataaaaatgatagagtagaggtataaattatatgccataggagaattaattagctgattatctattatcaacccattagtgaaaaagaacaaggcaggactgcgaaatgagaaagaaggagttataagaatgttaacacttgagttttgctccaatctatattttctgaataagagctacacagacaataacctaagaataagatcatcttttasaagagggctaagccttttaatgtggccacgattaaatttttccctcaaattctatcagcctgcagaataactcctttctttggcttagaggagaatattataattgcttgaaaaggttagctattctggctacagtttcaatatttaggagattgaagccccaagataacccacagtagacaggacttgctgacacatgtaacataatttaaagatgcccatgctccagggaatttttattttgtttggtttttagctagatgtgaacatgaacaagatataaatatatagtttgggttttggtgatttggttcagc

SEQ ID NO: 733853 - DNA, 592 bp, Homo sapiens
cccctccctccctctcccatctagtagcctccacttcaaagtgagaacatgtggtatttgattttctattcctgcattaattcacttaggataatggcctccagcacattttctttatccaatccactgttgatgggttgattccatgtctttgctattgtgaatagtgctgtgatgaacctacatgttttctcagtagaaagattggttttcttttggatgtgtatacccaataacggcactgctgggtcaaatggtagctctgttttaagttctttgagaratctccaaactgctttccacagaggccgaatgaatttacattttcactaacagagtataagttttccttttcctttgcagcctcgccagcatctgttgtttctttgactttttaaccatagccatcctgactcgtgtgagatggtatctcactgtggttttaatttgcatttctctgatattagtgatgtggaacattttttatggttctaatccatctctctgattcattccacctttccaattgaaaaagaacccagtgacaacttagaagaaaaaaataaacaatttgcagtttgagcttatacta

SEQ ID NO: 733854 - DNA, 592 bp, Homo sapiens
cccctccctccctctcccatctagtagcctccacttcaaagtgagaacatgtggtatttgattttctattcctgcattaattcacttaggataatggcctccagcacattttctttatccaatccactgttgatgggttgattccatgtctttgctattgtgaatagtgctgtgatgaacctacatgttttctcagtagaaagattggttttcttttggatgtgtatacccaataacggcactgctgggtcaaatggtagctctgttttaagttctttgagaaatctccaaactgctttccacagaggccgaatgaatttacattttcactaacagagtataagttttccttttcctttgcagcctcgccagcatctgttgtttytttgactttttaaccatagccatcctgactcgtgtgagatggtatctcactgtggttttaatttgcatttctctgatattagtgatgtggaacattttttatggttctaatccatctctctgattcattccacctttccaattgaaaaagaacccagtgacaacttagaagaaaaaaataaacaatttgcagtttgagcttatacta

SEQ ID NO: 733855 - DNA, 618 bp, Homo sapiens
aaaacctgagattttcttaagcctgaaaattcactttctgaatatcaactgggggaaaataatttctattaatgcttacttcttccttgatttataactctgaatgaacacagagaatgaaatgaggtgattttgtctgcaggtaaaagtagagagttgcccaactctgcactggagaggagaactggggcagccttcagatacgtggtcactggacacagcccctgtgaggtccctgcccctgctgtggggtccacgtggactctctattccatctgctctggggcttctgctgaggctgatggcctggaacacttgaagggctcctcttcctctgtcctcttarcagtgtcagtggggtctgttatcctgcttcctgaatttcagctaatctctccatctcatcaccactcactgggatgtacaattatttgagccacttaaactatgtacatcatcacaactggaagaccattcaatttcagatatgtttaaatgataaagtctattatactatataccactaacaacggattaagagcagcctttcttagccagggattccctgcagggattcctttccatttggatggaacatttaaaatctgaatgccttgc

SEQ ID NO: 733856 - DNA, 598 bp, Homo sapiens
tatgtattttgtttttgttatgttgtcactagcaatagcggtttctcttttatttcacttttatacataacctttccatgctttttcttgaattcaccatttaaataatctctctgcctcaatataatgatatataaactaatcagtaaccaggattctgagtcaactgaactgcatacaattagaattgtagggttgaaaaatatcttagaggttaatatggctaataatatggctagttaattattaacatggctaattattgaatgccttagtcaggaattcaattccattttaatgcagtatgtactaagtgtcatgtactcagcacactggtaaagcactacagggaaaactagagggataggatctgaatagccatgggatgggtggggcakgaaggaggtaaaggaacagggctgggcatccatcctggtcaagggcagcaggaggaacaaagactcagaggagggcagatcgcacctccaggtgtggggtggaggagcctttgaggaactgcaggtaacaggcctgtgtaggtggggcaggccagtgaaaccagatgcatgcactttttttttctttttccctgcttttc

SEQ ID NO: 733857 - DNA, 594 bp, Homo sapiens
acagggaagttcatctgtgctttcccagggatctattacttttcttatgatatcacattggctaataagcatctggcaatcggactggtacacaatgggcaataccggataaagaccttcgacgccaacacaggaaaccatgatgtggcttcggggtccacagtcatctatctgcagccagaagatgaagtctggctggagattttcttcacagaccagaatggcctcttctcagacccaggttgggcagacagcttattctccgggtttctcttatacgttgacacagattacctagattccatatcagaagatgatgaattgtgatcaggaccaagatccctgtggtaaacactctgattgaatctggggttccagaaggtggaacaagcaggaatgggatccaaagagactcccactcagattctaaagcatttaaagacaattmtagcagaatttatcaaaacaagatgaaacacagaaaagttgaaaccacaacaaaatgaattctattaaagaatagccccagatataaattctcttgaaagcaatgttcataaatatttaagcaaattaaagacaatgttaacaaat

SEQ ID NO: 733858 - DNA, 622 bp, Homo sapiens
taaatcatggcaattcaccaggaaacgtttattgcatttttcttcaaatggctttatatcaggttcaattcctgaaaagtccaacctctataaaagagatagtatgaatcattttcaaaaaaagatgggattcatattgatttacatcaatatacaaaaaatggcaaaaatccaacagttctctgtccattcttcatttgaaccctttttatgttttcatctaacaagcttttatagactttttacactaaggttaaacagtgatggagaaatcctagagggagatgatgaaactcggatctaagggcaatggaaaagtcacaagtctgtactatggcctacaaagccctacatggcatgattccctgtctcttctcactgctctgacctcatctcctaccacaattgccctcttccctcttgcagccacactggcctccttggttattttgccagcacarcaaggacactcccatgccggggcttttgcacttgctactctgtcaggaaccctcttccctcagatagctgtatggcttgctccctcatttccaagtctctgatcagtcgacacttctgcagggagacctttcctaactccctatagaaaactgcacactcc

SEQ ID NO: 733859 - DNA, 558 bp, Homo sapiens
catcaagctttttcactgacactactggaaaatgctcactacattatccatcatcagctatattttagtttatgatcaatacaggttcactaaagccaaaaagtgagctctcatacattttggaatttcaaagaggaaagttaaaacctattcaattaaccaaaacactgcatttaaccaaacatgcaggttccttgaagatttgctttattacaaattataactgaaaggtttcacaagtggtgtttgtttgttttgagatggagtctctatctgtcgcccaagctggagtgygatggcatgatctccgctcactgcaacctccgcctcccgggtttacaacattgtcctgcctcaccctcccaagtagctgagactacaggcgcctgccaccacgcccggctaattttttgtatttttagtagagacagggtttcaccgtgttagccaggatggtctcgatctcctgaccttgtgatctgcccgcctcggcctcccaaagtgctgggattacaggcgtgagccactgcacccggcctcacaagtggttttaacaag

SEQ ID NO: 733860 - DNA, 644 bp, Homo sapiens
atactcttcagaacagacaatattcagtatgatttcagtactgcaaaagagatgcaatgatcacggtagatatcattttctgtggggcatgtcagttggcctttgtcattgtctctacacatatgtagccaactacacagtaacaccttgtttctattgcactcatattttgattgtcagaatggctgatatgtacgtaaacttcttcatgaaaaatttaaactctggagcccagatatcttttttcattaccgtgtatgtgaggtcgcaattgtctgcaaactggggagctcagaggttactcagtgcgccgcatttcctcaccccccgccccccaaatcatcttagctcaaccatatatgarcgtccctcggttagcctgcctaaaaggtatgaggtaaggggcatatgcacttagtggctcagcaatcagaggcttccttggatgggacttatactggtaatattaatgaagaagctgcgcggtactggcagtgattccagaccaaatcttttaactgccgaatgtcactcgctgaattatgagttggggagctctgttgcttaaaatacagggttctcaaacacaatgcaagtgtttgtcacctcaagtcgcatactacccaacaggaagcaaaaggcaa

SEQ ID NO: 733861 - DNA, 598 bp, Homo sapiens
tagaatataatgaggcttaccctaagcaccttactcaaaattgctgctcctcatcccctaactaatctgtcttaccctgatctaatttttccccacagaacttttcaccttgtaacaaattctgcaatttgctgattatattccatctccaaccattagaatgtaagctctacaaagggaagaatatctatcctgttcagcaatgtatcttcagcacctasaacagtttctggcacctgataggtgcttaacaaacattggcgggagggaggaaggaaatttatgcaagttacaaaaggttagataaaatcaaaatctgagtttagcaagatagattttaaaaatagaggaaaggcacatataaacagtattaggaatgaaaaggagactaaatacagagtttaaaacttcataagagaataatgatggtaatttaaatattaatatttagtagggacttacacatgccagctgctgttctgcacatcttacatgcttattcattcagtcttcatccaaccataagttagtcacgatgattgtctccattttacatataagaaaactaagacacaagggcacatacccagtgattcct

SEQ ID NO: 733862 - DNA, 598 bp, Homo sapiens
tagaatataatgaggcttaccctaagcaccttactcaaaattgctgctcctcatcccctaactaatctgtcttaccctgatctaatttttccccacagaacttttcaccttgtaacaaattctgcaatttgctgattatattccatctccaaccattagaatgtaagctctacaaagggaagaatatctatcctgttcagcaatgtatcttcagcacctagaacagtttctggcacctgataggtgcttaacaaacatyggcgggagggaggaaggaaatttatgcaagttacaaaaggttagataaaatcaaaatctgagtttagcaagatagattttaaaaatagaggaaaggcacatataaacagtattaggaatgaaaaggagactaaatacagagtttaaaacttcataagagaataatgatggtaatttaaatattaatatttagtagggacttacacatgccagctgctgttctgcacatcttacatgcttattcattcagtcttcatccaaccataagttagtcacgatgattgtctccattttacatataagaaaactaagacacaagggcacatacccagtgattcct

SEQ ID NO: 733863 - DNA, 556 bp, Homo sapiens
atctaagccctgattgcaggctgactggatataaactcaatatggttgctggggcatggcaggattgagactgaccttgccggttatgagggagctgggtaaggcctgtcactgctggctttcccccacttccctggtgacctgtatgatgcagcagaggcagccataatccccctgggaacaaaactccattggcctgggaaccacctccyaccccccacagtggtggcagcaagccccgtccaagaaaagcctaagctcagacctgcctaacagtgcccacacctgatggtttttctctactcactctggtagctgaagacaaaaggcataagctcttgagagctctatggccctacccatcacctgagaaacctaagtacccatcctgccaaatgtagggcaagattatatacccctcctactacctcagctggtgctctcttgaaaacaccacctcctggctggaggcaaaccaactcaagccattacagcaactcataacagaacaactgttaccagggggtccttgttcttagagctcccaagatggtgg

SEQ ID NO: 733864 - DNA, 556 bp, Homo sapiens
atctaagccctgattgcaggctgactggatataaactcaatatggttgctggggcatggcaggattgagactgaccttgccggttatgagggagctgggtaaggcctgtcactgctggctttcccccacttccctggtgacctgtatgatgcagcagaggcagccataatccccctgggaacaaaactccattggcctgggaaccacctcctaccccccacagtggtggcagcaagccccgtccaagaaaagcctaagctcagacctgcctaacagtgcccacacctgatggtttttctctactcactctggtagctgaagacaaaaggcataagctcttgagagctctatggccctacccatcacctgagaaacctaagtacccatcctgccaaaygtagggcaagattatatacccctcctactacctcagctggtgctctcttgaaaacaccacctcctggctggaggcaaaccaactcaagccattacagcaactcataacagaacaactgttaccagggggtccttgttcttagagctcccaagatggtgg

SEQ ID NO: 733865 - DNA, 586 bp, Homo sapiens
gcaacatcctgagttaagaaggaactgactggaacacctcaggctctgttccagaccctcctagaaacaggatgtccttaaacactttaatgcagtgatactcaggtataaaactcagagtgagctgctttccgggttctctcagctgacgtgcaagtggacatgtgcataagagactctatctgttccaggaagcttttctgagccttggggaactggctttcaatgaatgctaggcttctgttgtcctttgctgcctattaaataataaatccacttcatgaaacttgttttgtgtatgaatgctctgtctcaccagactcggscaagtaaccagtgcacagtaaacttgcttcacagtccttacttggtgaaaggaactagttagtgcgctcagtctcttttataaggttgaagacatcatgcctttttaccactaagtactttagtgaatacttcctaagaacaaagacacattttatgtaatgacagtacacgtatcaaagtcgagaaatttaactctgatctaatagtattagctaatctatagtttatattgtttcatcaattatctcaaccatgtcct

SEQ ID NO: 733866 - DNA, 586 bp, Homo sapiens
gcaacatcctgagttaagaaggaactgactggaacacctcaggctctgttccagaccctcctagaaacaggatgtccttaaacactttaatgcagtgatactcaggtataaaactcagagtgagctgctttccgggttctctcagctgacgtgcaagtggacatgtgcataagagactctatctgttccaggaagcttttctgagccttggggaactggctttcaatgaatgctaggcttctgttgtcctttgctgcctattaaataataaatccacttcatgaaacttgttttgtgtatgaatgctctgtctcaccagactcgggcaagtaaccagtgcacagtaaacttgcttcacagtccttacttggtgaaaggaactagttagtgcgctsagtctcttttataaggttgaagacatcatgcctttttaccactaagtactttagtgaatacttcctaagaacaaagacacattttatgtaatgacagtacacgtatcaaagtcgagaaatttaactctgatctaatagtattagctaatctatagtttatattgtttcatcaattatctcaaccatgtcct

SEQ ID NO: 733867 - DNA, 622 bp, Homo sapiens
ccttagaaaagtgggggaataaagagataaaataacagtatttgtgtgtagcaataagggccattttgatggcagtggctgctgccatgctggctgcagcagggaggcccggctggagctgcacactccatggtgccagtaggagccccgacccttctgagttggggcaggagctcctcgggtgccgctacagctgtccaaatcgcagctgcagacccaggcctgctctatrgaacaagcaggagccacgccctcctgggtggggctacagccgcggaaactgtggctgggaatctgagcctccctgtgctctttccggggggccaggaaaaggcagtatctgccctcccctccgggtgaggatgtagctgcagctgctggacccacatctgcagacctgcgcctcctgttccacagagctagcaggagccagggacaagcaggagccctgccccttctaagttggtggggcaggagctcccaggtgctgctgcggccaccctctcagggaaggacccgggcatctctacagcctgcaccctcacaggttccagaaaggacactcccccatcccccaggcaggctctggggtgttttctcccactgcctggcctctctactt

SEQ ID NO: 733868 - DNA, 522 bp, Homo sapiens
ttataccccttttccccaagtggtcatgatctctcttgtacttccagcctgtggtgttttcaggtgcacaggccgtggctgcgtgagaaaactctcagcccgttggaagtcaggagtgcaccacagtgaaaagggctatgggggcagagatggatagagcatgacagttctgctgtaagtggcccaagttgaagggagctgttctcccgtctgcctttttgccttcttataaaaaccaaattagcaaagacattgatacatagacttgtcttataaccaattatggacttatattaattacccatcaatattctctgatccatagtacatatggaaatgtgtgtgtgtgtgtgtgtgtgtgtgygcgcgcgtatttgtaaaatgccattatccctggtattctatattagcctaagcttaaaattcagtccttgtactgttactttttactgtacatctgtgacaaaattaatactgccatatgatgggtgcctaacaccacccactgcttttaaattatat

SEQ ID NO: 733869 - DNA, 522 bp, Homo sapiens
ttataccccttttccccaagtggtcatgatctctcttgtacttccagcctgtggtgttttcaggtgcacaggccgtggctgcgtgagaaaactctcagcccgttggaagtcaggagtgcaccacagtgaaaagggctatgggggcagagatggatagagcatgacagttctgctgtaagtggcccaagttgaagggagctgttctcccgtctgcctttttgccttcttataaaaaccaaattagcaaagacattgatacatagacttgtcttataaccaattatggacttatattaattacccatcaatattctctgatccatagtacatatggaaatgtgtgtgtgtgtgtgtgtgtgtgtgtgcgygcgtatttgtaaaatgccattatccctggtattctatattagcctaagcttaaaattcagtccttgtactgttactttttactgtacatctgtgacaaaattaatactgccatatgatgggtgcctaacaccacccactgcttttaaattatat

SEQ ID NO: 733870 - DNA, 650 bp, Homo sapiens
aataatgctcacacatgattcaataactgcaacaatttatactgaaggctatatatgcaacaatatatactgcaacaatatatactgaaggatatactgaatttatacagaaggatatacgtataaatatacgtttaaatatacktttaaatatacttatatttaaacaatatatattgcaacaatagatactgaaggatatactgaatttatacagaaggatatacatatccactgcttcagatccttgtcttaaaccaatctggagatattcaaattattgataaccctccagacctggaatctgaagctgtagacctgaagattagcctgatatatttattttcccaatatttataatcaatcagataaagagtccgatattttctgggtaaaatcctaggtaaaatatcaaataaaattcactggaagtactcattatatagcagattactgaatgactaaaaaacctaatagagaattctgttgtgagagcacttctaacataaatttattttataatggcaaatttcattagaattcagaaaatgtaatgtctattcaggactgtttacttcttaacatattaaagacaaactatattttgctaggtgaacaagtatttttcttaagtcaatacaaaggattgg

SEQ ID NO: 733871 - DNA, 543 bp, Homo sapiens
agatatctaataattaaatctattaaatgtcttgaatgttctgaatttatcttttcttctaatgttgagaatctataagttgaggtgagttatgctgagaaaatatgtcatagaataaaatgaaaattggaaaagatggaaaggaaataggaaaggtggatacagcatgtcttctaatatcttccaactggaagcttagattaggattttagattaaattttcaaagccccaaccatgttctattaaatacatatttttcaggacatacattactcttttgaattctgaataaaaattctttctccaggtgttaagttgctggaattctattgtgtttttttttcctctctctgtctctctctstctctctctctctctctctctctctctctctctctttgtagtaagaatgtttcagctttcaggtgaatgatcatgtttaactcttgggatgtgttattttatagtaaacaaactaaactttttattacataagtatttacacaaaacaaattgttgagtaaatgctaaccagcattatt

SEQ ID NO: 733872 - DNA, 621 bp, Homo sapiens
catttcccaaatgcatctgtgcatagaagacagcaggggcatccaggcaccaggaaatgagaaagatccctcagcctgccaggtccttaggagccacagccacagcaacacctgagttccaggtaatgcatctgagacctgtggtttagaccacaggaagcacaccctccattttcagaataaaggtgaaaagggaagtgtaagactgaagcctagagaaaaggaaaatggattagcagagaaaggaccaaatggatcagttctgagtcagatgttcagttttaaaggacgatggggttactgtgaaaactgtcaggattctaaggacccaggccctgggcgagcctccctcttggtcccaatctgaatcccaaagcctgttccaatcagagattcccacagagackcctgccctgagtctgactgaaaaacacttcccaggttcccctgggcttcctcaggactctgattctggtgaccagggcagggacacttctgtccccaaagtgacactcaggcttctgtggaggtgagaatgtgtcctcctgtcacaaaaacaaagacacaccagggaaggaaagtgtcacattcagagacattaaacgtaagtacagaattgta

SEQ ID NO: 733873 - DNA, 620 bp, Homo sapiens
tagattccaccaattagatgggctttcaaggttttgatggtggtgggaggcagacaggttcctacgcgggaaagggtaggtccccagtgaggaccaaccttcaagccagggatggcctgaagcctgtgggccaggctacctgttctgggtagagtccatgaccaggagtgagaagttctttgatgcctttyggccaatcagatggtgctttttctgggcccacccatagaccaatcagcatgcactttctacattctgagcccataaaaacctcagactcagccagactcagacacatttcaggactacctgcctgaggatgggagctaggtattttgggtctcctcttcactgagagctgttctgtctctcaataaagctccttggggggcacttccaagatggcccaatagaaacagctccggtctacagctccctgcaagatcgatgcagaagatgggtgatttctgcatttccaactgaggtacctggttcatcccactggaactggttggacagtgggtgcagcccatggaggacaagccaaagcagggtggggtgtcacctcacccagaaagctcaaggggtcagaggatttcccttttctaaacaagggaagc

SEQ ID NO: 733874 - DNA, 655 bp, Homo sapiens
ttaagtaccgggaaattcagaaattccagcattatcaaactactgtaagacagatccatgagagcctgcgtaggtatatgaatacacagagatacagaaaataatctaaaaaaggatccagattgactagctgctagaagggtcagagaactctattaaktaggtctctatcaagaaatatccagtgtaaactggtaataaatacatctagctagtgatactataaaaagagaggatgggcacagtggctcacaccggtaatcccaaatacagtgggaggttgaagcaggaggatcacttgaggccaggagtttgagaccagcctgggcaacacagtgagatcctgtctctacaaaatattttaaaattagctgggcgtggtgatgcatgcccttagtcccaggtactcaggtggctaaggcgggaagatcacttgagcccaggaattcaatgctgcagcaagctattatctcgccactgcacttcagcctgggggacagcacaagaccctgtctcaaaaagaaaaagtataggaagacgtattaataaactaatatttaaaagataaaatttcagaagagggtctgcttgtttgcatttaaaccttctgcattatagatttaaactttaagtaagttaagaaaatgattcttgc

SEQ ID NO: 733875 - DNA, 655 bp, Homo sapiens
ttaagtaccgggaaattcagaaattccagcattatcaaactactgtaagacagatccatgagagcctgcgtaggtatatgaatacacagagatacagaaaataatctaaaaaaggatccagattgactagctgctagaagggtcagagaactctattaagtaggtckctatcaagaaatatccagtgtaaactggtaataaatacatctagctagtgatactataaaaagagaggatgggcacagtggctcacaccggtaatcccaaatacagtgggaggttgaagcaggaggatcacttgaggccaggagtttgagaccagcctgggcaacacagtgagatcctgtctctacaaaatattttaaaattagctgggcgtggtgatgcatgcccttagtcccaggtactcaggtggctaaggcgggaagatcacttgagcccaggaattcaatgctgcagcaagctattatctcgccactgcacttcagcctgggggacagcacaagaccctgtctcaaaaagaaaaagtataggaagacgtattaataaactaatatttaaaagataaaatttcagaagagggtctgcttgtttgcatttaaaccttctgcattatagatttaaactttaagtaagttaagaaaatgattcttgc

SEQ ID NO: 733876 - DNA, 624 bp, Homo sapiens
ggcccaaggttacttacttgttttgaatgttcactcagacaatgagaggcccacaccagcaacatggagcagacacgaatagggatgaagaaaataaccacaaccacctaaaaggggtgagtggttattatgctctactcacagccacatcacactgggcaacctttgtatgaaaagatagatttaaaagatcttccaggacggctctctgtcacttccagaacaaaagctcaactctttcgtgtggccttgaaggatttccaccaactgacatcaagtggctttctaagcccatttgctgctgctcccctcagcactactgctgtgtcagttgaactaaactccyagctctatatgtcattgtatgtctgtctttctgcctttgcccatgttgctcccaccaccaggagtgccctttctccacttctgaatatcaaaatgtgatgaatacttcaaggtctagcacaaatgtcatgatactgctttcaatataactaaatcacactagcactcacatatacttaccagcaatataactaaatcacactagcactcacatatacttgtcagcacttgatattcgttaactgatttaacttgtaaaagaatcctgtgaattatgta

SEQ ID NO: 733877 - DNA, 622 bp, Homo sapiens
ccatactgatataaataattgaataggtaattaaagtggggaggaaaatctctttctcacaattgaattcttttttttttttttgagccagagtctcactctgtcagccaggctgcagtgcaggctggagtgcagtccagtggcacgatcttggctcattacaacttctacctcctgggctcaagtaattctcctgcctcagcctcctgagtagctgggactacaggcaagtgcccatcaactaatgagtggataaagcaaatggggatactacgcccagctaatttttgtatttttggtayagatggggtttcatcatgttggccaggctggtcttgaactcctgacctcaagtgatccaccagccttggcctcccaaagtgccaggattacaggcatgagccaccatgctcagcactcacagttgaattctaatttataagtgtagaaggaaagatgaaaatagaaattaccagttgacaaacaccacagtattaattgtaggcaagaatcatcaatagatcctaaaattactggggttaatattctgagaaaaaaaatatttgcatagcctcaaagtatatccccatgaaagagagaaagtaataacttcgtagggaag

SEQ ID NO: 733878 - DNA, 641 bp, Homo sapiens
cttttgcatatgattttatccatgaaaacatcctcacaatcaagcgagtgaacatatccatcatcctccaaagtttgtgtctttatagttgctccctcctgccactcttccaaacctcttgattcccaggcaatcactgatcagctttctgtcattatcatttacatttcctaaaatttaacataaatgaactcatacagtatgtactctttttttttcagtatttgctcttttgtatctggcttcttttactcagcataataattttcagattcatccatattgttgcacatattaacacctcatttctttttgttgctaattagtatttgtttggaaaaatcaaatttgctcatccattcacctgtagatagacattttgggttgtttttggtttgggctgctacaaataaaggctctataagcayttgtttgtaagtctttgtatggaaatatgatttcatttcctttgggtaagtagctaggaatggaatggatgggtcatatgataggtgtatgttcaacttaagtgccaacttacttaagtaattttggaaataaatggagtctgtaagactaaaaacaaaaagaattgcacataagcactgtattctgcttgataaagttattgccatgggtta

SEQ ID NO: 733879 - DNA, 641 bp, Homo sapiens
cttttgcatatgattttatccatgaaaacatcctcacaatcaagcgagtgaacatatccatcatcctccaaagtttgtgtctttatagttgctccctcctgccactcttccaaacctcttgattcccaggcaatcactgatcagctttctgtcattatcatttacatttcctaaaatttaacataaatgaactcatacagtatgtactctttttttttcagtatttgctcttttgtatctggcttcttttactcagcataataattttcagattcatccatattgttgcacatattaacacctcatttctttttgttgctaattagtatttgtttggaaaaatcaaatttgctcatccattcacctgtagatagacattttgggttgtttttggtttgggctgctacaaataaaggctctataagcacttgtttgtaagtctttgtatggaaatatgatttcatttcctttgggtaagtrgctaggaatggaatggatgggtcatatgataggtgtatgttcaacttaagtgccaacttacttaagtaattttggaaataaatggagtctgtaagactaaaaacaaaaagaattgcacataagcactgtattctgcttgataaagttattgccatgggtta

SEQ ID NO: 733880 - DNA, 574 bp, Homo sapiens
cccatcaatttctttctgtattagttaacattttcaattttatgctttccctgtcatattgtcagattaagcatttttactgttctacttttttcatagatttttcttccattaatataaaatattcccctttttttatgtaatgatttttcatcttgaattttattgcatgcaaattaacatcacggtattttctttttattggcatttactttagctattttctttccaaaactttatttcaattgttctgggtcattttattttagatacgtctctaataaaaagcatatgactggattttttaaaaaaaatactgagttttttttcctgtcaatagaagaacttaattcattcatattattggggcacatcctgacattttctcttatgctccccagttaatattcccccttgttaatttttttyctttcctctggagatcaagagaaaatcctaaaagttgccagaggaaagagggtaagttgcttactgaagaataagaagcagaatgctaatggactttgcatcagcaatgcgaaatactggaggacaacaagcagtatctctagtt

SEQ ID NO: 733881 - DNA, 643 bp, Homo sapiens
caaattaaaagtcagtgttcttcaagaagaagaaaaatggaatgaatttcatgtaatatctagcatgagtaagaggcttgactccatttgtaaccgggtctcactctgttgcccaggctggagtgtagtggcacaatcatggctcactgcaaccttgacctcctggcctcaagctattctctgacctcagactcctgagtrgctgggaccacaggtgtatggacctcctgggctcaagtgatcctcccaccttgacctcccaaagtgctagaattataggcatgagccaccatacgcagtggaagatatttcttctcaaaacaaacaaacaaaaaactagatgcaatcagaactaccagaaaaacaaagacctacacaaaaaagtcagaatctaaatatgcaatttaaatatgcataatgactttcaaaaattgagagagaagaagaaagaagaatccatttgacctcaactccaaaacattcttctttgagtggcacaggggttgtgatgttggcactatacaaaagaaacggcacacttcaccatgactgtgcttcttctctatagaaggtcattgctcctgaagagcagctcatcccttccacaaagcttaccctggaaattctggcaactactccttct

SEQ ID NO: 733882 - DNA, 519 bp, Homo sapiens
catgcaaagaaacaagaaagttttcttaatttgtctactgaaaagacatagaaacaatgatcaatccagtagcaataagcatccctactgccaagattgtggtctctaaatactatttcctacatcaagaaataaaaacagtgcgggtgtggtggctcacrcctgtaatcccagcactttgggaggctgaggcagggcggatcatgaggtcaggagttcgagaccagcctggccagtatggtgaaaccccgtctctactaaaaatacaaaaattagccaggcatggtggtgcgtgcctgtagtcccagctactcacaaggctgaggcaggacaatcacttgaacctgggaggtggagattgcagtgagctgagattgtgccactgcactccagtctgggctacagagtgagactctgtctcaaaacagaaataaaaacaaagggttttctggagaaatggttgattgcaggtctgaggaaggaaatgtacaaaatgagagcaaaacttcttgtaatacc

SEQ ID NO: 733883 - DNA, 519 bp, Homo sapiens
catgcaaagaaacaagaaagttttcttaatttgtctactgaaaagacatagaaacaatgatcaatccagtagcaataagcatccctactgccaagattgtggtctctaaatactatttcctacatcaagaaataaaaacagtgcgggtgtggtggctcacgcctgtaatcccagcactttgggaggctgaggcagggcggatcatgaggtcaggagttcgagaccagcctggccartatggtgaaaccccgtctctactaaaaatacaaaaattagccaggcatggtggtgcgtgcctgtagtcccagctactcacaaggctgaggcaggacaatcacttgaacctgggaggtggagattgcagtgagctgagattgtgccactgcactccagtctgggctacagagtgagactctgtctcaaaacagaaataaaaacaaagggttttctggagaaatggttgattgcaggtctgaggaaggaaatgtacaaaatgagagcaaaacttcttgtaatacc

SEQ ID NO: 733884 - DNA, 616 bp, Homo sapiens
ctagcacataaaacctgattttttgtgggaggggtattattacttaggatgaagctgaaggaggtgggcactcagactggtgaactttctatttctttttcttacctttccctaacctatatgctgttttcacatcctccatataagactggttttcttgaggaagckgaacatgaaaggctatatgtctgattccatttatttgaaattctggaaagggcaaagttataatgaaagagagcagatcagtggttgtcagagactgggattatgagaagcagaatgactgcaagcaggtctgaggaaacttcttggggtgatgagaatgatatatgtggttatacgactgtatacatttgtcaaaattcactgaattctaagcttaaagttggtgaatagcatataaattagatcttaataaaactgaactaaaaaagactgattttcttgtaatcattttaaatattttcccctcttctcccattttgtttcctctgtttccattcttaccttgtgttgttaccatgttgctttacgtgataggggatgagcaccatttttgccctcctccaaggaaggacagttcttgaagttgctgaatgttttcagatgccaa

SEQ ID NO: 733885 - DNA, 541 bp, Homo sapiens
tacaagagtatacactgtattatcccatttgtatgaaattatagaaaatgcaaactaatctatagtgacagaaaacagatcagtagttttccatgttgggttgggagaggtggacagcaaagtgaaatataaaaatttctggagtggtggaattgacctatatcctgactaggttggttrttacacaggtatttacatttgtcaaaacccatcaaactgtacacttaaaatggggccgtttactgtctatggattatgcctcagtgaagttgacacaaaaaggtagctagtgacttctagttaatagcagtgactcaaaagttgttttttatatgtctttaaacaattctttatataatccagttattttgtaaaatagcaaacccaacaatgcttgtgactaaaaagccgaaatgtaagatcaagtgagattggagcagttcttgcttctccatttcccctccatttgtgtgtgcagttttcctcctcttgccccctcctcctactctctccccacacatctgatacttaaaaatcctta

SEQ ID NO: 733886 - DNA, 625 bp, Homo sapiens
cttaaaattaagcctgttgtagaaaattttaataacaggaagggtgtggcctcaaaaacctcctgaaacaaaagcacgcacttatcaagcataggcatccaaaaatctggtaccttactgttgaggtcaaatggttccactattttctgcaggttcaccctcttgatgaataaagcccttagaagagcagactgtagacatcccttgaaaaacaaaaaactggcaggaatccctaaaataagactattacaaaactgaaattattgattcatttttagtgtcttcaagtaagccctttagcagaaaagagattattatattttagcatttgcatgaaaaactgtctcaattcaattcaataactgtgtagattgstcattttgtagtttatattgtccttcataccgtgggagaatatgaagaggtgtaagaccccattctgaacttccaggccccgatcaatgaatacatctgaaggctatgaatactataacaaaaagcaggagatgacatatgacctaagatgtgtgccaaatgtttggggaacttagacattgggacaatcccatctaactgaaggattcataataaaattcacaaaaggagatcttaactgaattgtgtg

SEQ ID NO: 733887 - DNA, 656 bp, Homo sapiens
ttacaggcgtgagtcaccacgcctggcctattataccattttaaggtgaaaaatgaaacagacacaaaataataatcagaatgaaaggtgatgtgggggattgctttagtcctactgatgcaggacaggtgactcccaaagtagagattagctggcaagggttcttggttttgcccaggaaataattcaagggcaagccagaggtagaagaaacagctttattgaagagacagtcttacagctcctgcagtgttacagctctgtgactgctcccgcagagcagggataccctgtaggcaaagagtagccactcagggcagttttgcagtcatatttatacccacttttaattgcaygcagattaagtggtggcttatgcagaaatttctagggaaggggttgtaactttgaggtcattgggccattgccatggcaaggggtggtaactggttgttgccatggtaatggtaaattgacatggcacactagtgggggcgtctgattgaaagctgcttttgccctggctctgttttagctagtcctcaatctggtctggtgtccgaaccctgcctactaccttcactacctccctctatcttaggtaagagcttgtatttaaatatttcctcacatggaaacctattaagtaaaaatgt

SEQ ID NO: 733888 - DNA, 603 bp, Homo sapiens
aagcccaataacaacaacaaaaaataaactcaattttggggggtaaaaatttgagcatgagcttaactaaaaaagaaagtgattgtgtggcaaatacacacctccaaagatgccccgcataattccttaggaaatactaattaaaaccacattaaaataatattacaattattagaattgtattagratatattagaaatgtctaaaattaaaagtctgaccctatgaagtgttgagaatatagagaaactgtaactctcaatacacttgttgggaatttaaatagtgcaatttccttgagaaacaatctggcagtttctttaaaagctaattatgcatgtatcatatggtccagacatcctacttctagggatatacctgagagaaaaataaagcaaatatccatgcaaatacatgtacacttatgtccacagcagcttaatttgtaatagccaacactagaaacaatcatctgttcattaacagataaatctgataaagcaattgtggcatattcatattcgttaatagtgaataatacaattcactatcagcaatacaaataaataaactatttatatatgcagcaacatggatctagct

SEQ ID NO: 733889 - DNA, 619 bp, Homo sapiens
tgctccatcatgcgttagttgtgttgtgtcccaatatagagtggactggacctaacaacaatctcttgtaagatgaaaatggaatatgtggatatgatcaagtgaaaagaacccaagattctgttcacaaacaggtggaacagatatgagtgcctctctcttggctcactattatggttgtctgttgggggagaatcacttggattatagatccatcggctcagtatgtaagatgaagataaaaattaactgctactataggtcttcaccctggagtggacawgaaagtcagccataggggaaactccttgtactggtcagaaatttgtatagtaggccatccatattgcctgggggaaaatatagtctcaaggcagtggtgaatgatttgactattgggccatagacatgaaaagagaaaaattggaaaacttggaggtctggtaaaaaaaggaatgtagataggtctaagagaatttttgtagatctttgtattgtatgttgacactcatgcaggaacatccaccatagaagtggcactgataacatagaaatcagaacaactctgccatttgacatcagccagtctctatcattggccatttcggtgctctgggct

SEQ ID NO: 733890 - DNA, 397 bp, Homo sapiens
gacagaaccacccccacctcttaactgtttcactgttcttttattaacagaaaattctggaattcaggtctcagtcctggaagttttcccagcccttcacaatagaaaaacaattagtactttattcacctgctacaaaaattaacatcatattttgtgcaaaaaaaaaagaaataaaaagttacttccatccgtgggagtagctcgatgattttgcctgaaatagaagtgatarcaacacctagttccaagttcaacaagcatagagtatgaaaaatctaaaactaatctgaattttttttaggaaaatatatcttttaactagaactgaatggaaatgtggaaatatttctaactttatatgagggtgtatccaaaccctgtattaatgaattct

SEQ ID NO: 733891 - DNA, 550 bp, Homo sapiens
actacatgccagattctgttttgtgtttggggtacatcagtgaacaaagctctctgccttcctggagtttacgttctactggagcaggcagacaagaaacaggacacatttaagaaaatcatatggtatgttagcaagtgatacactctatggaagaaagaaaacttacagcatagtaaagggtaccaggaatgctggagttggggtagacagggtacacttttaaataaagtggccaagagaggtctcattaagaaggtggcattcaaacacaaaaatggaaggaaatgagggaagtaactgtgtccacatrtagggaagagcattacagacagagggaagaggcagtgcccagcatgttgaaagaacggcaagagggtaacatggccagaactgtgaatgaggaagagacagcaatagagatgtgatcacagcatggtgaggacccagtcatggcaggcccccatgtcactgtgaagactctgagtgaaatggagcgccctggcagggctctgagcagaggaatggccttttcttgtttttgtgttta

SEQ ID NO: 733892 - DNA, 556 bp, Homo sapiens
ttcatataggtaacgcaccgaatagtccctaacacacagcaagagccccacaaatttggggttagagacctggggtttcccagaatttagagcttgtctcattttttaaagagccttggttttcccacctgtaaaatggggctaatcagaatacctccagaagagccaactgaacaataatattaatgcctgtaagcccatcttaactgtaggtaaagtaagtaaataagtgttctttttggaaggagtgggagatcattaaaaagggattcactccattgcaaaagtgtgagaaagcccccaggatacagtggaaagggcaccagaatccagctgactgtaaaatgttagggtttggctagggtcccttccagctctgggcttccttcatctgccagcgccctttctccctcctgrccgtgtgaaacagggcaagaatggctcatggttctggatttcactggggagaagcccacacagccttcctgctgggaccgcccaggccatacccaaagaaatgactccaaagacagtaagtgggccaggaagacaaaag

SEQ ID NO: 733893 - DNA, 635 bp, Homo sapiens
gtgcttcaaggttgtagaaagagcacaattaatgcttaagcgatcacagacccctctcccctgcagtgggtgttagctccaaagagatgccattgctgatcacccagtcttcggagaagcctaaaatttctttgaattaaaaactgatyctttttcataaagacccagtcacttctcccagtttagtgataacaggtatgacacaagaagctgaagtcttttagattttatagagagtaattctgaaacctgccagaatgctggtagcctgtggtgtccatggcaatgggtgtccatggtaaaatatctatagcttctgctcactgggcaaatataaaagacaacatattatttaacataatatgttgtcttttatatttttatttaaatctggattacgaaaatatagtacccatgagcatttcatgttagaaaccccatttaaagcactataaggctgaataggcacaagcgattaaaagtagatgccaggccacataaaaataaatgttttaatttacttagagctgtattcaagttgtttgataccagacagaaagctgacagtctgttctttgtaaactgcctttccctgtttttctgttttgttttgtttctcaagtttcattttttac

SEQ ID NO: 733894 - DNA, 634 bp, Homo sapiens
atactggagccgagtaacgtagctcatgcctgtaatcctgacagtttgggaggccagggcaggaagatcacttgaggctaggagttcaagaccagcctgagcaatatagcaacaccccatctctacaaaaaattttaaaaaattagcygggcatgtgcctatagtcccagctactctggaggctgaggcttgagcctaggagcttgaggctgcagtgagctatgattgccaccgcactacagcctgggcaacagggtaagaaaaagaaaatacaacaacaacagcaaaaacacatttattatctcacagtttctgtgcctcaggaatctgggtgtgtctctgcagaatcctctgcttcagggtctcttatgaggctgcagtccaggtgtcagctagggctgggggctcatctggaagctcagccgggcaaggacctgcctctaaggcattccgcagttgacagaattcagttccatctgagcagttagaccaagggcctcagttcctgccagctgttggctggaggtcactgtcagttccttgccacatgggcctgcttactttatcaatgtgtgtgacccgagaaggcaataaagaatctgcttgtaagggaggctacaatctcttgaaacct

SEQ ID NO: 733895 - DNA, 634 bp, Homo sapiens
atactggagccgagtaacgtagctcatgcctgtaatcctgacagtttgggaggccagggcaggaagatcacttgaggctaggagttcaagaccagcctgagcaatatagcaacaccccatctctacaaaaaattttaaaaaattagccgggcatgtgcctatagtcccagctactctggaggctgaggcttgagcctaggagcttgaggctgcagtgagctatgattgccacygcactacagcctgggcaacagggtaagaaaaagaaaatacaacaacaacagcaaaaacacatttattatctcacagtttctgtgcctcaggaatctgggtgtgtctctgcagaatcctctgcttcagggtctcttatgaggctgcagtccaggtgtcagctagggctgggggctcatctggaagctcagccgggcaaggacctgcctctaaggcattccgcagttgacagaattcagttccatctgagcagttagaccaagggcctcagttcctgccagctgttggctggaggtcactgtcagttccttgccacatgggcctgcttactttatcaatgtgtgtgacccgagaaggcaataaagaatctgcttgtaagggaggctacaatctcttgaaacct

SEQ ID NO: 733896 - DNA, 502 bp, Homo sapiens
gatcccaatgatgatgcttcctgtttgactttggacaatgtatttaattgtatgcctcagtttcctcatctataaaaagaagatggtaatttcaccaatcttagaaaattgttgtgaggttgaaatgaggtaccatatacaaagagctcacaacaatgtaagtgctgcataaataccggttattgttcttattattcttcttattcttgttattgagtgttgtctaagcacgaccccagggtctgggaaatcttggaagaggtgacacttcagctgaatcctgaaggatcagcaggagctgggatgaaaaggaaggagagggccacatcgagcagagggaatgaaaggctccactttggaagtcrcttctctgtctaagctaataattctaggagattataccctttctaaagcatctgaaaataccttctttggttacaagataatttttgatatcactttttgttttgtatccactgcagaagaattagagtaggagtgg

SEQ ID NO: 733897 - DNA, 622 bp, Homo sapiens
tgattattaagatcatcacatatttcttgcataattgaaaactaaaaacctggggccacaggccagctgttgaatcttaggcacatccacatctcttggcatgagtgtcctcaatagtaaaatgagcaaattagatagatgaccttaaaggcccgtccccattctgtgatgacataattcaacagggatgcttctaytgggccctgaatgtagcacagaggtgaaagggaacactacatagcaggcttacagagggggctggtgggaagagaacgagatggggcctgtgggatagatcagagccccgcaagctttgtggagtgcgggggaaggaagactgcaagaaagccagccaaggcggctgcctctccactcaactatgtgattaagtgactggcttctgtttttcacaaagccagtctccagctcaaagaacctcagggactattttaaagacaagttattcctttgtttttaattgtaattaagtaggtattttataatatttaaatggtgcaatttacatgtcacttccatgatgcgctgggtacccttcaccagaaggagagaacgtaagtttaagaggactgctgtgtattattttgtgactagggaagtgcat

SEQ ID NO: 733898 - DNA, 602 bp, Homo sapiens
attgaggattggaagaggagtggccgaaaaaaaaatggaattggtccagaagacacacacaaaaataaataaataaataaaataaagagggagtgttgcagagctctttaaaaggctcacatgccctgcgagaaaccttcaaaggcgagaagaatgagctaacccttcagaccctttgaartacttatataaatggtggaatccctgggtccactccttcttcaaatcctgccgagttaaggaccccccacccccaccaccccccctcccaactacatgctttaggcagtgtgtacctggaaagccaagtgccgaggcattgcagagaatttctctcactatttcataaggaatgcttagaatattcaggctgagaagtatttcttaatttcctgtgcaatctgaaagcattatccaagggttatttttgttttgttttattcagaagtggggttgctggagcattcctcttggacatgttcagatttgaattaattagaattcctgtacagttttcttcggttataattatagcttaatttgattgcttaatggctctggttttcgtaatgtttagcacctgttgtaaattgcacaagcta

SEQ ID NO: 733899 - DNA, 602 bp, Homo sapiens
attgaggattggaagaggagtggccgaaaaaaaaatggaattggtccagaagacacacacaaaaataaataaataaataaaataaagagggagtgttgcagagctctttaaaaggctcacatgccctgcgagaaaccttcaaaggcgagaagaatgagctaacccttcagaccctttgaaatacttatataaatggtggaatccctgggtccactccttcttcaaatcctgccgagttaaggaccccccacccccaccaccccccctcccaactacatgctttaggcrgtgtgtacctggaaagccaagtgccgaggcattgcagagaatttctctcactatttcataaggaatgcttagaatattcaggctgagaagtatttcttaatttcctgtgcaatctgaaagcattatccaagggttatttttgttttgttttattcagaagtggggttgctggagcattcctcttggacatgttcagatttgaattaattagaattcctgtacagttttcttcggttataattatagcttaatttgattgcttaatggctctggttttcgtaatgtttagcacctgttgtaaattgcacaagcta

SEQ ID NO: 733900 - DNA, 559 bp, Homo sapiens
cttactgtttaacaggcactgctctaagtgtgttacgtgcatcaactcaaacccatgacaatcctacaaaataagtacatactctcattaggcctattttataggtgaacaaactgaggcacatgccctctgttgccaagctactcagtggctgagcagaatttgaacatagtctggcttcagaaggttcattcttaatcgttacgctttactgtctccaaaaccagagagaggacttgatccaatgaaccgcctcttcctgaagcactcctccagatgacaaaactatcaacagagaaaggccacccggccagcacagcctggatacccctgtgttygggctgcagaagcacaagcttaatgaagaccccaaacttcctgaagggacagaggcacctggaacaatgctggccccctggccagggtctgcagtggattcccatcagtgcttgcagcttctctcctgcaggggagcccaacagttcatgctcctgcacactctctgggcctccggtgcagtctggtcacctgggtgacccctgcccacctgggaccaggg

SEQ ID NO: 733901 - DNA, 559 bp, Homo sapiens
cttactgtttaacaggcactgctctaagtgtgttacgtgcatcaactcaaacccatgacaatcctacaaaataagtacatactctcattaggcctattttataggtgaacaaactgaggcacatgccctctgttgccaagctactcagtggctgagcagaatttgaacatagtctggcttcagaaggttcattcttaatcgttacgctttactgtctccaaaaccagagagaggacttgatccaatgaaccgcctcttcctgaagcactcctccagatgacaaaactatcaacagagaaaggccacccggccagcacagcctggatacccctgtgtttgggctgcagaagcacaagcttaatgaagaccccaaacttcctgaagggacagaggcacctggaacaaygctggccccctggccagggtctgcagtggattcccatcagtgcttgcagcttctctcctgcaggggagcccaacagttcatgctcctgcacactctctgggcctccggtgcagtctggtcacctgggtgacccctgcccacctgggaccaggg

SEQ ID NO: 733902 - DNA, 614 bp, Homo sapiens
caggatgaaaggggatggagaacagtttcactgggatgcggaatttgattttgatgcatcctcttgttccttttaggtcactcttgtcctggaagcgcccacaggcaaagccattttatgcatcaggcgctgtaggcacagtgcctaggggatgtggggttgtcaagggccaaaacaagtttgagatgaaaaaaaaaagggctctaaattacaaaacagaaactgtgaaatcaaaataataattgaagtgataattaacaaagcaaattataaaaattattttacagcagaaatatstgcatgcacacccacatatagggcgaaatgtaaatgcgttttaaaaattaatataatatgagattaggatttcaaaagtaagagtgcgtttggccctaaaatggctctatctactgattcaaaacacatttccatgtgcctgggtgagtcaattacacataaattgcatcactaatattcaggttcttcagcaccagtgtaccatgccaggtacaccgggggaacaagggaaattaccctcacagctatgagaatctatttgagaagatataactaagttatgaagaacaattcacttattcatttattcagtaaat

SEQ ID NO: 733903 - DNA, 531 bp, Homo sapiens
ttgggcggtcgatgggactgggtgctgtggagcagggggcggcgctcctcagggacgctgggcgcgcaggagcccacggcatggaggggaggctcaggcatggtgggctgcaggtcccgagccctgccccgtagagggaggcagctaaggcctggcaagaaatccagcacagcagctgctggcccaggtgctaagcccctcactgcccggggccagcaggccagccggcccacccaagtgcggggccgcagagcccacgcccacctcgaactcgcgctggcccacaagtgccttgcagtcccagttcccgccygtgcctctccctgcatacctccccacaagctgagggagccagctccggccttggccagcccagacggactcccacagtgcagcggtgggctgaaaggctcctcaagcgcggccagagtgggtgccaaggccaagaaggcaccgagagtgagcgagggctgccagcacgctgtcacctctcagtccaagttaccacttccgtcttttacacagagtaca

SEQ ID NO: 733904 - DNA, 575 bp, Homo sapiens
gggtgtcccaaaggcaatcacagtggtaggatgggccctgggtggcctgaaggaggggaagccaggggattgggggaaaaaagatagcttcaggaacgggaggcctgggaggccagggaggtgggcagagcagcagctggcgacaggasgggcagggatggcactgagcagagctggacttaaagaagtctcagcctctccagggggatctgacaaggccctatgaggactggggcagcaaacccagtgcctgccctttccagccccggggtcaccccatggccttggtgtcttcacccccagcgactggtagctggtcagtccacaggctttcctgaggacacctgggaggggccaggccttgccctcaggccacagggccctacctccagcccaccctgctgtgtatccaggtgaacatggagacagccagattcttcaagtctgactttgagcagaatggaaccatggggaacgtctgcctcttcctgaacttggccaatgaccccacgtgagctttccctgatgcccaaactgccctcaggtgggcagaccccgtccccttccaagaccta

SEQ ID NO: 733905 - DNA, 560 bp, Homo sapiens
ctcatgactgaatcctctatacctaggtggcctcctttagtttctgagcaataaccctgtcatccaggtggaatcacaaccttctttttatatacgtgaagtcctcacttcattttggaattccctgaaaattgactttatggaagcaatgtacagcaggtcctccaacaccattggtgcattcaaagttgtgtagttataatgttggtgaggaataactggtttcactctacctaattttgcttaaaggtgaagtttccaagagacttccaaagatgttaagtgaggacatactgtatatcaaattcatatcctcttccagagttcatgtggaatttctttataaactgcttctasagaatctatttgggcaggttatgtgtagagatccatgtcactggtcctcaagtttggctttgagtcaaatcacctgaggagcttacaattgatgaggcctgggtctcattacctgagattctgatttccctgcacctgtgtgagtatgtggattttttttttttttttttaaagcaccagaggtgcttgcaatgacaaagttt

SEQ ID NO: 733906 - DNA, 647 bp, Homo sapiens
cactttaagctccgcctcctgggttcacgccattctcctgcctcagcctcccaagtagctgggactacaggcccccaccatcacgcccggctaattttttttttttttttttgtatttttagtagagatggggtttcactgtgttagccaggatggtctcgatctcctgacctcgtgatccacccgcctcggcctcccaaagtgctgggattataggcataagccactgcgcccagtcctctttctttttttctgagacaaggtcttgctctgttgctcaggctggactgcmgtggcacaatcgtggctcactgcagcctcaacctcacaggatcaagttatcgtgctacctcagcctacagagtagctgggactacacttgtgtaccaccatgcctggataatttctgcattattttttagagatgggcttccactatgttatctaggctgtactcaaaatcctggactcaagctccgaaactcctgggattacaggcgtgcactaccacgctggcctgtttttatcatctcgaaaagaaaccgcatacacttaggctgtcactcccttacccttctaccccctagttatcagcaaccactaatctactgtttgtctacatagataatttgcctatttggacattc

SEQ ID NO: 733907 - DNA, 539 bp, Homo sapiens
gggagaatcactgacctgtgatcctgccactgcacttcagcctgagtgactgagcaagaccctgtctcacaaacaaacaaatggaatcacaccaaatattagtctgactgatttaaaggacttatacttggatgccttttttaaagtgaagaatcaaataatataactgtgtttcttaggcagatcacccaaatctctaattttttttgttttgttttgttttgttttttgtttttgttttttctgttttgtttttgagatggagtctcactctgtcgcccaggctggagtgcagtggcacgatctcggcttactgcaaactccgactccctggttcaagtgattytcctgcctcagcctctcaagtagctgggattacaggcacacaccaccacacccagctaatttttgtatttttagtagagacggggtttcaccgtgttggtcaggatggtctccatcttctgactttgtcatccgcctgcctccaaatccccaattttaatgtgcaaccccgatactcagaaataaatgtaaaa

SEQ ID NO: 733908 - DNA, 495 bp, Homo sapiens
atactgtgatggacaacctaagtcttttgatgagatcaaccaaagataaaaaaccgcagtgagttacccctgtgtgctcaaaaaattttatctttcacaaatgccagtgaacaaaaacggacatctcttcatttactgaggaagtttcaacgtttttacatacatgcgcattgcttacacacaaaggcaacattgaggtaatgtaattttgtggaagcaaatttgggtaaaatataaaagtctttataaaatttatacctcccctattggaaatgatgcgaygatgacatccattgcatagctgagcatggtggcacacacccatagtcccagcaactcggtaggctgaggcagaattgcttaagcccaagagtttgaggttgtactgtgctatgatcatgcctgtgcgtagtcaatgcacttcagcctgggcaacatagagagacccatctcttaaaaaaaaaaagaaatccatagcatagtgagttgttgaaa

SEQ ID NO: 733909 - DNA, 492 bp, Homo sapiens
tgtgagccactgcgcccggcctggaggtagctctttaaatcaaacactcagcaaagaattgactgatttgcaggcctgttcttttactgaagcataaccatagcatcaagaggcttccaaactggtgaaaatcatgcaagggatggggtaagaaatggcagagatcagttgatggtcccgagctactctgacctccacaaaacttcagcagcttctgggtctctaatatgcttttgtgtgtgtttgtgagagatataccaagatttcccatcacaatgtctttgatttccttgctcytctctccatcctggcagcttgtatacaccagggcaaatctacacatgacttaatgatttatctgcaatttgaatcaagagttttgctcatttgcagaaacataaatgatctccaaaccatgttttgaggctgcatgtaaccgaattttaaaaatgaaaacttattttaaccaagtgatgcgcacgagttgcttta

SEQ ID NO: 733910 - DNA, 582 bp, Homo sapiens
atctttccaccttggcctcccgaagtgctggcattacaggattgaggaaagcaaaagtttaaggaaagaaaggatagttgtttggtctcaaagtatctccctcaaactttcaaaccaaatgcaaagggaaaaaatttataactttttagtgaagaaacccatcagacaccaagtgatgaaggttaccattaccagcgatggtgtcctattcctatcatgtgcctcatgaaatgatgtaaccagaagggcatttggtattcttcccccaaatccacaacctcaatgcaataatgagaaaacatctgacaaatccaagttgagggacactgaacaaaatacttgactgtcacagatagaggaaaccaagaggacatggtcaaatcctggaacagaaaaagaacattagtggaatctgaataaggtctgtggtttaggtataatatcatactaatgttaatttcttagttttgataattgyactgtggttatgtgagacgttgccatgaatggaacttttgtactatctttgcaattgttctgtaagtctaaaattatttcaaaataaaaagttaaagagacata

SEQ ID NO: 733911 - DNA, 631 bp, Homo sapiens
actgagggtccagagaaaaggaatgatatgattgtgtgtatatttttaaagatcacactggtttcagtgaagggacaggattggaaagggggaaagcgatggggacaggagctgaatttggctaggctgtcacaggtgtcaaaatcagcgatgctggtggctctgacctggtgaaagtggatgggcttgagaaacaacttcagggggaggcacatgtcctcctgatggagaggacgtgctcctggttgagtaaatgggtggatggtggccatctctgagctggggaggatgggaggaggatggagctttcagaactcttgccygtcaagctgttttcctttgtgggtcccttcatgaagatggcaatgaacatgcctcgcaggtcatgaaagaagtgctgaggctaaactccctgtcccaccccatccctcctggactgtcagtcccccatcaccaccatgaccatcagcctggaggggcttggcctccaactgcagcctagaatgcagtccaccccttaccggtgagccttgtcctgggccaggtgtgggactgagggagccagctggaagtcagatgggcaagaccagctggtggggtcacagatagcccatggaggtccggcaggaca

SEQ ID NO: 733912 - DNA, 657 bp, Homo sapiens
ctgtgggcaccggccatggaatcaaggaccatggggttctgcccagtgctgtgttttactgtagcagagctggtactgggctccaaggcaaagtttaatgcacactctcttctccctcctggaagtggacacattgtctctctgcactgcctggggttgagggagggatggtataggcactgcaagactgtcttttccaccctgtttaatgtgtcttttcttgttttyaagctaaaaccaggttctgtgatctgtcacctgatttctttggctcttgtgaaggtattctcttgcttagattgttggtggttcaatttgatgttcctgcagggagacaatcttgtagagttctattctgccatctcgctccaccacttctcatttatttaattgttcttcaacttatttcaacaatattttgcaggtttcaaagtatgaattttgcactgctcttgttaatttctaaatttattacttgttttgttggtattatacatgggtttgtttccttaataccattttaaagcagtttattgatagtatatagaaataaaattaaatttttagtattgcatttatatcttgaaactacgtcaaatttatttctaatagtattttactgaatttcttagaattatatatgagatcgtgccatgt

SEQ ID NO: 733913 - DNA, 623 bp, Homo sapiens
ctggataagtctagaacatgtgttccggtgtctgggacatgcccttactcctcttcagctagggctctgtgcaccccagcaccgtgaatgcacaggactttggtgggagaaatctctgtacttgttcaactcagcatttagcaaatgaagtcacatcagtccccgtttctgaccttgctaacctttgcgagaatcaccgcgagccattttgctccattaggtagagtgatgaggcccggcaggccgaggctggggctcctgcactctgtccctcctctcccaggcagaggtgtcttgaccacaaagcagtgggaacagtccattccatcggttgatgtcccactgggccagtggctttggatagggacctctgacccagctgtgctggaagtrccctgttgtggtcacgctctgtgccttagccccccaccccctggtctcccagcacacgtggttcaggaacggcctgcacccagcatcccttgcagcactgtcaggcacagcccatggaacaggcaggacagaaagagcatttcgctccaggagcttggtccacgtggtgctgaaagggcagtgccaccctgccctctgctgcctggtggggtggtgaggagggcagcatt

SEQ ID NO: 733914 - DNA, 621 bp, Homo sapiens
ggcaaagcatggggccacagaactggctgcagaggctgtggcagaaacagacccacagctcttctccagaaccggaggaaaagtgacaggaggctcttctgaagtttaactccatcacccacagatccttcattctggatgaagccttctggaactttgtcagcaataaaggcaaagtctcccatgcatagacgccacgggcaccggactacaggwtgtgtgcccagggcatgctgcctagagagagagtggggagaggcgaggcggagggggaggaagcaggccaggctgcttgtaggagggcgccaggccccacacaccatgagtatggcggcttgctcatgctctggaggaggtgggggagtggggggcagacaaaggaggctaactatggtgccactatggtgggcatgggtctgccctgggccatcacttcatgggaaagcacaaaggcactgctgatggtggaggagacagacgagaacgcggctcccagaggcattgcagctcccccacccccacagcaaaagtgccacaacctcatctgttcctgttgccagggagggggctccggaagctgcacaggaaaggccctggagaggccagacctccaggcctcag

SEQ ID NO: 733915 - DNA, 596 bp, Homo sapiens
ctacctgtagtttattcttattggcttaggggagaaaaaacatatcatagaaaggggataaagcagatgcagcaaagtgttaatttggaaatctggatgaagggtctatgaactttttttttttttctgaaacagggtcttcttgtgtcaccccaggctagagtgcagtggcgcaatcatagctaactatagccttgaagagtgcacaagagatcctcccacctcagtctcctgagtagcttggtccacagttgcacgtcaccatactcagctgattttattttttgtagaaatgaggtctccctatgttgcccacactggtctcaaattcctggcctcaagtgatcttyctgccttggcctccctaagtgttgggattacaggagtaagccaccatgcccagtctgcaagttctttttattatgcgtggaaacttttctgtaagtctgaagttatttcaaaataaaaagttagctaggtgtggtggcctgcgcctgtaatcccagctacttgggaagctgaggcaggttcaccctcccaatccgtgcagtatggcatcaggctcagcctgtttggtctggcacaacaggctcttt

SEQ ID NO: 733916 - DNA, 623 bp, Homo sapiens
ggctggcgaatcctctcaagaccctggccacttggaagaccctaagcctccttgcaggtggccatactaagcaaagtcacttgcagccacccttccacgatgcgttctacatcacccagctgtgaaaaccacccacccccatccccatccccttcacactcatgccttcctcctgagctcaaggggccctggcccaaggttcctttagaaccaggaaggaggttttgtccctctgaaaatcatccttttcaaacagaaggcatttatcttggccaggcttaaaagacaaaaagatgatagctgagctctagggcccatcccacagacaatatccagaaaccttctccccacaattcccacaccagcctcccagcagctggwtcttttctccacgggatttgcctacaagacttctctccggctttatctcaggcgggtttgtcaggggagcaatgtcaccatccctccaccaaattcacctcaacaacatttactgagcaccaagtgtgtccccaccgtggctcagccttcccacgcactgtcctgatttaaccccacgtgcttataacccaagggagaatcactgcgatattttatcaatgtaaagacacacatcttaattg

SEQ ID NO: 733917 - DNA, 574 bp, Homo sapiens
cacccctgtaaacaagagatatcatccaaaggttaagtaggaggtgagaatatagctgctattagtggttgttttgttttgtttttgtgatttacttatttagtttttggagggttttttttttcttttagaaaagtgttctttactttccatgcttccctgcttgcctgtgtatcctgaatgtatccaggctttataaactcctgggtaataatgtagctacattaacttgttaacctcccatccacttatacccaggaccttactcaattttccaggttccttccacctcctcctgaaagtatttctggaaaatactcagaagggatcacaggctctagccagcaattggtgctaacctgggctagtccctgtggcacaagctccaccacsaccatccatgtcaaactccacctcagttgataagttgttgcctgctgccattactgcctgatcacaggcagctttcaactctgcaccttgcctctcacagctgaagcctcccatattcagccatttcctgctgagatagcttacagctgatgtgaagtgaaaaggcataccgctccctcct

SEQ ID NO: 733918 - DNA, 574 bp, Homo sapiens
cacccctgtaaacaagagatatcatccaaaggttaagtaggaggtgagaatatagctgctattagtggttgttttgttttgtttttgtgatttacttatttagtttttggagggttttttttttcttttagaaaagtgttctttactttccatgcttccctgcttgcctgtgtatcctgaatgtatccaggctttataaactcctgggtaataatgtagctacattaacttgttaacctcccatccacttatacccaggaccttactcaattttccaggttccttccacctcctcctgaaagtatttctggaaaatactcagaagggatcacaggctctagccagcaattggtgctaacctgggctagtccctgtggcacaagctccaccaccaccatccwtgtcaaactccacctcagttgataagttgttgcctgctgccattactgcctgatcacaggcagctttcaactctgcaccttgcctctcacagctgaagcctcccatattcagccatttcctgctgagatagcttacagctgatgtgaagtgaaaaggcataccgctccctcct

SEQ ID NO: 733919 - DNA, 626 bp, Homo sapiens
tttattatatgttcttttaatgaaaaggaagcttctgggtgggatgcagtggctcacacccgtaattccagcacttagggaggcagaggtgagaggattgcttgtggccaggaatttgaggctgcagtgagttatgatggtgtcactgcactcaagcctgggtgacagagcaagactgtctcttaaaggggacagggggccgggcgcagtggctcatgcctataatcccagcactttgggaggctgaggcgagcggatcacgaggtcaggagatcgagaccatcctggctaacacggtgaaaccccatctctactaaaaatacaaaaaattagccaggtgcggtggcgggcgcctgtagttccagctactctggaggctgaggcaggagaatggcgtgaacctgggaggcagagcttgcagtgagccgagattgtgccactgcactccagcctgggcgacagagcgagactccrtctcaaaataaataaataaataaataaaataaataaagggggcagggaagaaaggaagctttgctttttttttgaccttgtgatgcaacagtagaaaggaaacttctgttagtggaataaatagattctccctctggagttgtctcactcag

SEQ ID NO: 733920 - DNA, 517 bp, Homo sapiens
tatttttataacattatttaatttaatgcctgcattaaattaactataatttaaaaatcccctttttgtccaataccaacaaaccttgtcatatggaattataaagtatttaatgtcagtattttaattgaatattgtatttttcccatattcagttgccttccagctagtgattcattccgcagtgatgtggggaaggcagttgaaaatttaattcctcctgtacaacatatcctcttggatcgaaaagataaagaggtaaaattcttgargtgtcatttataattgaaagttacattgaaaaacttctacaactgtatttattgtcttgtgataggtttaaaaaatttgatacaattcaaagcactgtgttaaatgtaaaacattttgagatggtcagttataaggacatttcaaaatctgcttgtttaaaaacatataatatgcctatgaaataacattcgtttttctaagagtacaagtgatcttatgctaattgcgtattgaaattgacttt

SEQ ID NO: 733921 - DNA, 565 bp, Homo sapiens
cctgatatctggaggtgtggatttttcagtcataatttgggacatattttctggagaaatgaaacatatcttctgtgttcatggtggtgagattactcaacttctagttccacctgaaaactgtagtgtaagttgatttatataaaagattatttcactatggtagagccaagttatattrctatcaggaatgtaaatggaatctagactaacttaaaggaagtgtgacaagataattaagaaaaccctttcaattttaaaactaaaataatagtaacatttaggcaaagttacggccactaactattggggcacatagaaacagaagagagacatagtgtttttttactagcttcaaaatggtctggcttctttctgaaacatagcagcagttgagaaaatgtttattgaatgatgtttcaattttacattttaaaataatttaagtatgcctgaagacattgtacaatctcattatttttgggtccatctgagcaaagacaatgaatatatatgttggtaaaggcaaaatacttatcgatagagttcacttaaataaaaaatt

SEQ ID NO: 733922 - DNA, 613 bp, Homo sapiens
gtacaattattatgacaaaacacacaataaaagcaaaaaaaaatccaatcaacacatgaagagatacttggcatcattagtcatcagagaaatgcagattaaaaccataatgaaactcctgcatataacccctagaatggctaaagttaaaaagactgaaacaccaaayactggcaaggatgtaaagcaattaaacctctcgtacaatgttggctggagtgtaaaatgggccatttacttttggaaaagatgtggcagtttgtttttaaagttaaacattcgcctatcctttgatccagtagttctacagaagttctacagatattagccaagaaaaacaaaagcctacatcctcaaaaagacttgtaaaagatagttcatagatgctttattagtaatagaccaaagctggaaacaacctaaatgtccttcactgggtgaatgtataaataaattggcatgttcatacatacaatgaaacactactaagcaataaaaaaataaactactgaaacatgcaacaccatggataatctcacatacatttgctaaggcacgatgttgatactgaagaatacacgttttatgatttcattaatatgaagttctagaa

SEQ ID NO: 733923 - DNA, 550 bp, Homo sapiens
gatgacaaaaaattgaaagatgcatatcaactttaaaagtgttttttaaaagggagagaagtttcatcttaaaatagatgacaactttaaatggcttcagagactctaagccaaaatataaacagcaaagtactacgatgttcatccataagytagtaactagtagtccttgaaaggatacagaggaaaaaaaaccaaaaggcagaaaaggccctaaacccctttctttagctaaattattctttacagaatttataaaacatttaaagattttcattgaattaaaatttttcatgaaaaatcaaagagtcataaaataggagggcaaattaaacatagcagaatttcatattttggtttataaatgatgccttttatccatgtggggtgtgtgtgtttgtatgtatcatcacaaaagtaaattgcaagtagtttgtcattcattcatgtaagtttcattgcataaagattatactttaaacatttcttacatttcctttataatttaaaaaaaacctcttaagtatgtaaaagtagaaattgaatgtac

SEQ ID NO: 733924 - DNA, 550 bp, Homo sapiens
gatgacaaaaaattgaaagatgcatatcaactttaaaagtgttttttaaaagggagagaagtttcatcttaaaatagatgacaactttaaatggcttcagagactctaagccaaaatataaacagcaaagtactacgatgttcatccataagctagtaactagtagtccttgaaaggatacasaggaaaaaaaaccaaaaggcagaaaaggccctaaacccctttctttagctaaattattctttacagaatttataaaacatttaaagattttcattgaattaaaatttttcatgaaaaatcaaagagtcataaaataggagggcaaattaaacatagcagaatttcatattttggtttataaatgatgccttttatccatgtggggtgtgtgtgtttgtatgtatcatcacaaaagtaaattgcaagtagtttgtcattcattcatgtaagtttcattgcataaagattatactttaaacatttcttacatttcctttataatttaaaaaaaacctcttaagtatgtaaaagtagaaattgaatgtac

SEQ ID NO: 733925 - DNA, 524 bp, Homo sapiens
cctggcctatggtaggcaccgaatgaatgaataattccagagcctgccatcttagaattatggcatttggagctggaaaaggctgagaaactgtctaactcaactcttttttttttttttttttttttgagacggagtttagctcttgttgcccaggctggaattcagtggtgcgatctcagcttactgcaacctccgcctccagggttcaagtgattctcctgcctcagcctcccgagtagctaggattacaggcatgcgccaccacactcggctaattttgtwtttttagtagagacgggggtttctccatgttggtcaggctggtctcgaactccggacctcaggtgatctgcccgcctcggcctcccaaagtgttgggattacaggcgtgagccaccgcacccggcctttgctcaactcttaatttacagatgacaacaccaagactctcttcactgacttgaatctccccagtgccaccacagcttttagttataaaaataactaaaggagagcagaac

SEQ ID NO: 733926 - DNA, 571 bp, Homo sapiens
tctaccatcaaagcaagctgagacaggctggtcatggtggctcattcctataatcccagcactttgggaggctgaagtgggaggattgcttgaggccaggagttcaagagcggcctcgacaacaaagcaagaccccatctcaaaacaaaacaaagctgggacactgcacagtgtcacatgcccttggcaattatagcatagtcaacttctatttcagagagtaaactttgaagggaaagggatcaaatctttttaattttctctgtgtagaatattgcctagcacaagttagaccttcaattagtgaggtctggagatttaaaattaaacaagaagatgagtgagtcctacactagtgaaatcagagaactgataagttaatgtctgcgagartattatcagttcagataggagtgaagttagcacaacagatagaaatcttaggattactgttctgtattactcaaattgttagtttaaaatactggagaaaaactgctcaatttgagctagtcaacagggctagacagacaacaaaatcctattttactaagtaacaaatggccactca

SEQ ID NO: 733927 - DNA, 566 bp, Homo sapiens
caaaatagaaaagcagatcagacaaagggtcccttttgtgaaatgacttctcaatatgggctttcccaaacctgtgtaggctcacacaatagaaggtaatttctaaaagggcactgttgcacacttaaggacaaggtcactaaaggactttgatttataaattattgccaaatataaagtcaatatataatcttctgcaggagaaccttgagaatccttgaaactgtcagcctgaatccataattcattccctccaaacctacttacactactaaagatatttctttctttgtaattataattaatcccttgctttttcttctgatgataaaagttytagtaagaacacacacacacacacacacacacacgtgccttgaccaaggtggtctatatcattaaataaatcaaattttagaagagttaggccatatatatatatatatatatttatgagattttgaagttaatcttttacctgcattgaatgaatcattcctttggtgaaacgatagggatacaagatgttgtgaattttaactgctaagctctcagcctggccactg

SEQ ID NO: 733928 - DNA, 519 bp, Homo sapiens
attccttggaggtaagtattattattatccccactttgcagatgaggaatctaaggctcataggtcagtaagccagtaaaaggcagagttgggatttgaacccaaggctacactctttccgtggccaggattttaaccggggtattcagtactggtgcsattatgggggaggaaaagatgatggattcattttggacatgttgagttagaggggcccatgagacctccaggagaagaggtgagtctgaagcttgaagatggaataatttgaaataaaatgaatttgtttctgaaagttgtatcctaacgttggcatattcagaacaccagtcacattgacttgccctgcagaatttccagatgggaattctagcagctcacatgccaaggctgctccttagtgtgtgtatggcttgccagacccatcttccaaagctgcactcaggttttttttttttttgacatgtctcagctcctttctccaccatgtgtgcctgcagtactgtctccttttatcta

SEQ ID NO: 733929 - DNA, 519 bp, Homo sapiens
attccttggaggtaagtattattattatccccactttgcagatgaggaatctaaggctcataggtcagtaagccagtaaaaggcagagttgggatttgaacccaaggctacactctttccgtggccaggattttaaccggggtattcagtactggtgccattatgggggaggaaaagatgatggattcattttggacatgttgagttagaggggcccatgagacctccaggagaagaggtgagtctgaagcttgaagatggaataatttgaaakaaaatgaatttgtttctgaaagttgtatcctaacgttggcatattcagaacaccagtcacattgacttgccctgcagaatttccagatgggaattctagcagctcacatgccaaggctgctccttagtgtgtgtatggcttgccagacccatcttccaaagctgcactcaggttttttttttttttgacatgtctcagctcctttctccaccatgtgtgcctgcagtactgtctccttttatcta

SEQ ID NO: 733930 - DNA, 611 bp, Homo sapiens
aagatgagtgctcagggcagtcattagagaactgagacctgaaagatgagttgacttatccaggcaaggagggaagagaagagtgtgtctggcagagggaacaggatatgtatagagccaaggagctggctgtaacttggcatagctggagcaaaatctatgggtggtgaggggtaagactggaaagcggagcaaggactgggtcatgaagagccttgcaagccacgaggagtttggattctgccataggcttgtttgtgttgtccaggggcatagccatgaactctcaaggctgatttttgtttccttggccttgrtgctcacccaggtcgagagtagtatcttgcactttttctctttgaagacaaaagcccaaggagggtgtggcattttgatgcccagggctgtaggcccatctcataagaggagcattgccgtctttctggagagaccatcaagtgtcgcaactgcactgcaccccctacatgggaccttccatcaccaggacttgggagttagattccccagccctccttctatacttccacatcttgggtggaccctgggggagcttccacatccctctttacacatccttcccattcctttca

SEQ ID NO: 733931 - DNA, 641 bp, Homo sapiens
aatcctgatgcccatgggtgatgtggtaagggccagatggtagttgcacatatagtggagcctgttaagcaggagacaccccccgctccagtttagaaaattctctgaccttatctagggctgctggtgacctgctcatactcttccctgcagagagagaagaccttaactttactctagaatatgagcaaatcttcagagaaaggagggagacctaactatcctggaatgtctctggggaaggagacagtctctatctttgttatactggtcagraaacaaatctgccttctgacctagagagagacactctatttcatttccaagaatttttactatgcaaccaacccagaaaaaattgtcagtagagccctttgctcagaggactcaaactgtgcagaaatgtgagatattcacagagaattgtcttccaacagggactcttaggtgtgaagtgaggggcttagacaacattagagacttgaaaaatgtggaatgtgtgtaccaccactctccaaatctatgcccaaggcagccatcactaattaattggggttttttggtgcaaaaccctaggcagtctgtactatactgattattacctgagtcccctctagctgtgtgaaatcatattcttcacg

SEQ ID NO: 733932 - DNA, 641 bp, Homo sapiens
aatcctgatgcccatgggtgatgtggtaagggccagatggtagttgcacatatagtggagcctgttaagcaggagacaccccccgctccagtttagaaaattctctgaccttatctagggctgctggtgacctgctcatactcttccctgcagagagagaagaccttaactttactctagaatatgagcaaatcttcagagaaaggagggagacctaactatcctggaatgtctctggggaaggagacagtctctatctttgttatactggtcaggaaacaaatctgccttctgacctagagagagacactctatttcatttccaagaatttttactatgcaaccaacccagaaaaaattgtcagtagagccctttgctcagaggactcaaacygtgcagaaatgtgagatattcacagagaattgtcttccaacagggactcttaggtgtgaagtgaggggcttagacaacattagagacttgaaaaatgtggaatgtgtgtaccaccactctccaaatctatgcccaaggcagccatcactaattaattggggttttttggtgcaaaaccctaggcagtctgtactatactgattattacctgagtcccctctagctgtgtgaaatcatattcttcacg

SEQ ID NO: 733933 - DNA, 641 bp, Homo sapiens
aatcctgatgcccatgggtgatgtggtaagggccagatggtagttgcacatatagtggagcctgttaagcaggagacaccccccgctccagtttagaaaattctctgaccttatctagggctgctggtgacctgctcatactcttccctgcagagagagaagaccttaactttactctagaatatgagcaaatcttcagagaaaggagggagacctaactatcctggaatgtctctggggaaggagacagtctctatctttgttatactggtcaggaaacaaatctgccttctgacctagagagagacactctatttcatttccaagaatttttactatgcaaccaacccagaaaaaattgtcagtagagccctttgctcagaggactcaaactgtgcagaaatgtgagatattcacagagaattgtcttccaamagggactcttaggtgtgaagtgaggggcttagacaacattagagacttgaaaaatgtggaatgtgtgtaccaccactctccaaatctatgcccaaggcagccatcactaattaattggggttttttggtgcaaaaccctaggcagtctgtactatactgattattacctgagtcccctctagctgtgtgaaatcatattcttcacg

SEQ ID NO: 733934 - DNA, 659 bp, Homo sapiens
gctttgttaattaacattgtgaagctaagtgctcagtgaaaaaagtactagagaattgcatattgtccttacagaattgtttgtaaatacaatcaagtaaaagctgtattgaaagaggtaggccttgttcagagccrtgttactaatctcaagtctaggggtttgctctgagtgtcttggtgtcttggtggccacatggatgttcctttactctgcttattttcaacacaagaaaggttcttgcaaagatgccttggatgaaaaattctgctgccatggctggtatgcaactcattttgcatggatgttctctcggttctaacctagtttgtgttcaggtaattctggtaatgggacatttgcctctcccctgggggaccatttttagtgtctgtccatccaaccagttagtcagagaaaagagccctgatgtaagtagagaaagaggtatttgtagaactgtgggaaaaagaaaaacataacacactgacctgttttaagagtgcagggtgggttcaaggcttttttaaatttggtttcccaagatgttggggtcactataagcttcgagaatggctgaggtccaaatcctaaaaattactttcatctcagaaaatttgattagcaatcagaataattgaagtgtacctttccagaca

SEQ ID NO: 733935 - DNA, 536 bp, Homo sapiens
tagaggtaggacctatatgctatttaattttgcaactcccgcagaggttagcatggtaagctgcttgcatcaggcttacaatagatgtgttaacacataggggcaagttcatctgaagtggccaggaattctgcctggttgggaattgattcatggtacccagagcatgttgcatgttgtgctgactgctttatgactttcgaagttgagtgactctaggttattgccaagctctcctctcacctcttccctctttctttcaagtatctcaggtggtattgatagtaaaacagtcttggcattaatgagtgtctgactggagagtgaaatgtaaataagagttgaatagagcacagscaaagcctacaaattaccgctgacaaataacagggcagacaaagagtatttcagccttaccaaacacctctgctacaatcagctaagaacacctgggaatgtcagggtggcagacacagagccaacaacatgatcaagaagaggacatttgatggcaaagagcaaagcagcaagttgct

SEQ ID NO: 733936 - DNA, 589 bp, Homo sapiens
gtgattgggaaatattctatgtatgaaatggcagttctactggtcacccatacaggaaaggattcactattttggatgacgtttggcttagtgcagatgtttaaatcagtaatagattcaacttacacatctaagaatcctcttctttcttagtaccacaccctggaccttctcacaaggtttagaaggtaagacactctttattcctccatttactgcagtcttgtcctagtgacacctacaaggaagcacttggtaaatgctacgagatccaaatgtcaagactgaacctttaggactacctgtgacaattgttagaccacagcttaccctttgactcctgtgaaaatcaaggagggtgaggagcaactgaagaaaagtcctctgatttttattccttttttmcttctataaggagctctaaggtattagattttttttttttaactggcaaaacaaaagagcaaaaaaagtcccattttcagtatctgactgtctccttaaagagagacgggaggataatagagggatagatagatgcgggcagacagaaacagttacagtagccagacagatctatattcagttt

SEQ ID NO: 733937 - DNA, 661 bp, Homo sapiens
ctagagagtaagtgattgagccaaaactgaaattcgcgcttctgactccaagtgcgaggctcctttgactacatttaggcttattgagtgtatgcgcagctgcaggaaaatggagcctacagcactgtagtgagccattgtcttagtcatgagtgagaaaccagtttgtaaccaacattgaactactgataaggaaattttgagggaaagaagagaaagttctgttaagaaattagtaaataaaatccattaaaaacgttttaataagcacaagattttttttttcttactaaagaaagtaattcatgttcatatggaacaggggttggtacacagaggtctgtgcaaataaagttttattggaacacagtcatgttcatttgtttccatattttttctgrctacttttgctctacgatggtagagttgagtgatggcaataaagactgtggcctgcaaagccttaaatatttactatctaaccctttatagagttagctgaccctgaaatagaacacttggaaaacagaagtacaaaggaagtaaaaaaggattaatctagaaataaaccctactgcattttgctgtgtttacttcttaatttttccttcccaatcattaagtttttggagaatttaactttaatggttgaataatagtc

SEQ ID NO: 733938 - DNA, 627 bp, Homo sapiens
gttttacagtctttttatcttttggtctggcttccccagggtcactcctgcatagctaaatgtcagaggaggctgtgctagttaaacacctcgagcctctcggagggcttctatgcaccgcgggtggatctgagtgtaggctaagcagctcactcaatggccagtctcatgtttgtctaggcttttccgtcccatggggcgctctcaagtctcagccatggcccttctatgcctctctgtttcaggaggtcagcattaaatttctgctgaccaccacctgtcctatctggaattgcaatctcaggctagcaaaacrgagttttctccgtttgtttccttccaagctcaccacttttagttgacatcatgggttctgcaccacctaacctccaccattgttcaccacctcaggcaacaaagctgctggttttcataccagctcagggctagaaaagccaggaggtttgaggggtgacagaagccccaggtaggaaggccacagactccaggttcccacccaaagctctagaagcttttcaaaaataacccaatttcttctctgcctttggtcaatttctagagaccccaaatggttggttttgacaactttagttttatacttgtttc

SEQ ID NO: 733939 - DNA, 627 bp, Homo sapiens
gttttacagtctttttatcttttggtctggcttccccagggtcactcctgcatagctaaatgtcagaggaggctgtgctagttaaacacctcgagcctctcggagggcttctatgcaccgcgggtggatctgagtgtaggctaagcagctcactcaatggccagtctcatgtttgtctaggcttttccgtcccatggggcgctctcaagtctcagccatggcccttctatgcctctctgtttcaggaggtcagcattaaatttctgctgaccaccacctgtcctatctggaattgcaatctcaggctagcaaaacggagttttctccrtttgtttccttccaagctcaccacttttagttgacatcatgggttctgcaccacctaacctccaccattgttcaccacctcaggcaacaaagctgctggttttcataccagctcagggctagaaaagccaggaggtttgaggggtgacagaagccccaggtaggaaggccacagactccaggttcccacccaaagctctagaagcttttcaaaaataacccaatttcttctctgcctttggtcaatttctagagaccccaaatggttggttttgacaactttagttttatacttgtttc

SEQ ID NO: 733940 - DNA, 696 bp, Homo sapiens
atctcagttttgctttaaaaagggtatataatgtatacacacagacataaaagtataaaaaggcacacaaaaagattatctctgggcatgtggggctctgtgtgatttgtgtgattttcctaaacatgaaaaatataacctttttacaactaaaaaaaaaaaaacaagaaaaaagttttcttgagagaaataaaaatctaaaatatataaacagggaccgggtcactcaagagtgctaataaacccagttaattcttcatactgaccttggtctctactctgctacttcctttactctcttcctgctaacatccacatcctgttcaacttaagatcatttgatgaaaaatacaaccacataaatagttattttggagttgaacagagccaattaaaatcagtcagaatttcaaactatactcctaaaatggtaasaggcagtgatctagggtgatggtcaaaacacagacagtttgaatgccagatctaaagagtcacagactcaaatgtgaaacccccacacacactctgagtgcctaccttgggcaggttatttaatctctttaccttcagtttcttcatccataaaatacagataatgaattttgcaaggatgagctaacatacaaaaaatacttactgagtctgatatttaagaagtgttcagttaaagttaatgcaaaaaaatgaaaaaat

SEQ ID NO: 733941 - DNA, 497 bp, Homo sapiens
acaaggctaggaggggtctggggctacacggagaggccaccccagccgtgataacacagtgaggataacagtgcctgcggaaatggagaagtgcagaaaggggttaagtaggaaggtgcagaaacagactctctccatcaccytgttatcctgggccagtctgctctagaaagcctacatatcccggggtcacaccaagtcttcaggagggtgtgcatcatggagaccatggaggacaagttggccatttggggcaaaatgagtcaactgaaaatcttggccaaatcggcaaggatgtaagcttctcaagaagccaaaagtctcttacacctacacttagggaagataaattaacatgtaatgactaaaactccactgtgtccaaaaaaaacctccttgaaagagaaaagtccagagtgttgtggggtaggcaggaatatttgtctctcagtggcccgcctaccttggatcctccctgggacatgggaagcagcagc

SEQ ID NO: 733942 - DNA, 573 bp, Homo sapiens
tattttttggaaactggtattaggcttgtagaaatggacaaggagctctaccatgcttgaagatggtttaagccttcagcaaaataattgagagcttcctcttctgaatattccgaatacacaggtctatcagttagtgtatcatgttatgtgtagatgtgtgttggggtgatcagatccaacaccaggtcgtgggggtgacaaagkccggcaattcaaaggaatgagaaaaagacagtttgagagagaaagtgggaccagggggccatcgcgagtgtggaggctgtgaaggccccaagttctgggagcccatgttatttatgggtgctcaaacaggtggtgaggatgtcgagtgaatgagaaacatatggctgtttgacataatgggagtactagaagcaagaagccagcaagtctagcagacatgcaagccctgcctcagcttctctcccaacactcagcttttctccaacagatgtgtatgaataaggcttattaataacaaagcctggctccacaggtgagagggaagatgtaacttaatctactggaagtcaccaacatagccctcta

SEQ ID NO: 733943 - DNA, 633 bp, Homo sapiens
ttgtttcacttcttgatgcatgcacattctaccaacgctttttaacttcagcctaccgatgcatcaggtagaaccaaaaacaagaggtctcttgccctgtgcaagccaagcctttctgattagcaatcctagagagracaggtggctcacgcctgtaatcccagcactttgggaggatgaggcaggtgaattacgaggtcaggagtttgagaccagcctagccaacatggtgaaaccccgtctctacaaaaaatacaaaaaattagcagggcgtggtggcaggcacctgtaatcccagctacttgggaggctgaggcagaagaattgcttgaacctgggaggcggaggttgcagtgagccaagatggtaccgctgcactccagcctgggcgacagagtgagactctgtctcaaaaacaaaaacaaacaaacaaacaaaaaaacaaaaaaaaaacaagaagaggtctccgggttgccctatctttccctttcatgtcatcgtctttactgtaaatggttggttgatacagagacttaagaaaggatgtgataggttctcctgaatgccattgccttctctctgtcttctaagcaacttctggttcaaagggagagcatgagctcctggggatgt

SEQ ID NO: 733944 - DNA, 633 bp, Homo sapiens
ttgtttcacttcttgatgcatgcacattctaccaacgctttttaacttcagcctaccgatgcatcaggtagaaccaaaaacaagaggtctcttgccctgtgcaagccaagcctttctgattagcaatcctagagagaacaggtggctcacgcctgtaatcccagcactttgggaggatgaggcaggtgaattacgaggtcaggagtttgagaccagcctagccaacatggtgaaaccccgtctctacaaaaaatacaaaaaattagcagggcgtggtggcaggcacctgtaatcccagctacttgggaggctgaggcagaagaattgcttgaacctgggaggcggaggttgcagtgagccaagatggtaccgctgcactccagcctgggcgacagagtgagactctgtctcaaaaacaaaaacaaacaaacaaacaaaaaaacamaaaaaaaacaagaagaggtctccgggttgccctatctttccctttcatgtcatcgtctttactgtaaatggttggttgatacagagacttaagaaaggatgtgataggttctcctgaatgccattgccttctctctgtcttctaagcaacttctggttcaaagggagagcatgagctcctggggatgt

SEQ ID NO: 733945 - DNA, 616 bp, Homo sapiens
tgctaccgaattgattaattcctacagtgttaaaagagaagcactaacaacgccagtgaccatgtaacacggatttaagctacaagtcatagaactgtgatgagaagcctcagcgctgtaaaacagagggtggaggaaagcttttcctctctcaaatgagctttgccgggtatacttcttgaagaataggaagttgaagtgttcaggacttttatgtctattctactttggcttagtttacataattcttagtttattagcctagaaatggccaagaaaacttaaggctcaataattagttataaatatgaaatatccccaatttttmagataaaaacaacttataaatgtatttgtctgtaaaaattgtctatatttttacagaacatctatttctttcttttttaaatttttatatatatatttttttttattatactttaagttctagggtacacatgcacaatgtgcaggtttgttgcatatgtatacatgtgccatgttggtgttctgcacccattaactcatcattcatattaggcatatctccaaaatcgatcgctcccccctccccccaccccacaactggccccggtgtgtgatgttcctcttcctg

SEQ ID NO: 733946 - DNA, 616 bp, Homo sapiens
tgctaccgaattgattaattcctacagtgttaaaagagaagcactaacaacgccagtgaccatgtaacacggatttaagctacaagtcatagaactgtgatgagaagcctcagcgctgtaaaacagagggtggaggaaagcttttcctctctcaaatgagctttgccgggtatacttcttgaagaataggaagttgaagtgttcaggacttttatgtctattctactttggcttagtttacataattcttagtttattagcctagaaatggccaagaaaacttaaggctcaataattagttataaatatgaaatatccccaatttttcagataaaaacaacttataaatgtatttgtctgtaaaaattgtstatatttttacagaacatctatttctttcttttttaaatttttatatatatatttttttttattatactttaagttctagggtacacatgcacaatgtgcaggtttgttgcatatgtatacatgtgccatgttggtgttctgcacccattaactcatcattcatattaggcatatctccaaaatcgatcgctcccccctccccccaccccacaactggccccggtgtgtgatgttcctcttcctg

SEQ ID NO: 733947 - DNA, 565 bp, Homo sapiens
cccaaagtgctgggattacaggcgtgagccaccatacctagccctaataacctgttttagagctcactctaaaaatcacatttgatttttttgttgtttgatctgttttgctggtgagagtctcttgaatttttcacttcagccaatgtgtttcttagttccaggattttttaaattatttcatttttwaaaatttctctcagaagtttattagttccttttctgtcattttagagatctgaatttcctgaaaaccgccattttgaattcttgattagagaactcactgatagccatcacattatttagcactggtcaatggtttagtgctttgtccatttgggaagattatgattccttgttcggtattatttctagtggttatacatctatatctttttattgaaggactagttattcagttcattcttttctctgtattattttgtgttttactgaatatatttgcgttgaggtttttttagacacacctatggtgggtttttgtttgcttgctttcagctacgtcagttcctttgttttgacagtagatggtgccttaagc

SEQ ID NO: 733948 - DNA, 622 bp, Homo sapiens
atagtcacaaagatcaggatcaatgacgagaacatcatggcaccaagtggacaaaataaggtgccagttgtgagtgacccgaaagagatgggcatggacacatagcctgacaaaaaattcaaatacttattttaagacaatgtagtggacttaaggaaaacacaaacaattcagaaatttatcagagaaccttagcaaggagattgaaataatgggaggaaaaaactaataaaaaagttgaagataaaaacacaataaaataaaaaaaatacagttgagagyattgacagaagtggccaagcagaaaaactcaaggacagatcaattaaaaatatacagtcagaagaaaaaaaaaagaaatctagaaagttcataggatttatgtgataacatccaaagaacaaatgtattagtcactggtgttcaaggaaaagctgggtgcaatggctcacacctgtaatcgcagctatttgggaggcggaggcgggtggatcacatgtggtcaggagtttcagagcagagtgcccaacatggtgaaactgtgtctctactaaaaatacaaaaattagtcaggtgtggttggtggacgcctgtaatcccagccactcaagaggctgaggca

SEQ ID NO: 733949 - DNA, 622 bp, Homo sapiens
atagtcacaaagatcaggatcaatgacgagaacatcatggcaccaagtggacaaaataaggtgccagttgtgagtgacccgaaagagatgggcatggacacatagcctgacaaaaaattcaaatacttattttaagacaatgtagtggacttaaggaaaacacaaacaattcagaaatttatcagagaaccttagcaaggagattgaaataatgggaggaaaaaactaataaaaaagttgaagataaaaacacaataaaataaaaaaaatacagttgagagtattgacagaagtggccaagcagaaaaactcaaggacagatcaattaaaaatatacagtcagaagaaaaaaaaaagaaatctagaaagttcataggatttatgtgataacatccaaagaacaaatgtattagtcactggtgttcaaggaaaagctgggtgcaatggctcacacctgtaatcgcagctatttgggaggcsgaggcgggtggatcacatgtggtcaggagtttcagagcagagtgcccaacatggtgaaactgtgtctctactaaaaatacaaaaattagtcaggtgtggttggtggacgcctgtaatcccagccactcaagaggctgaggca

SEQ ID NO: 733950 - DNA, 559 bp, Homo sapiens
agatgcaaagggagaaaaaaactacaaggtactaatagaaaacttcagcaccttactttcagaaatgaatagatcatgcagacagaaaatcagtaagtaaacatcagattaaaatgcactgtagggcaaatggacaaaacagttacagaactatccatccaagagttatagaatacacattctttactgcatacatggaacattttcctggatatatcatacattaggccaaaaaacacatcttgatgaattcgaagagatcaaagtcatacagggtatctcttctaatatcactaattcataagtacatgaaaattaaattacatactcytgaacaaccagtgagtcaatgaagacattacacagaaaataccatatttcttgagacaaaaatagaaacagaacacatcaaaacctactggatatgaccaaagcagttttaaagggaaagttatggcaataaatgtcttcatcaaaaagaagatacgaaatacaccaaaccaaagaattagaaaaacaaaaagctaaaatcaaaagtaaaaaaagtcactaataaata

SEQ ID NO: 733951 - DNA, 627 bp, Homo sapiens
aatgtcttcatcaaaaagaagatacgaaatacaccaaaccaaagaattagaaaaacaaaaagctaaaatcaaaagtaaaaaaagtcactaataaatataatcagagacaaaaaaggagatgtcataactgacacccagaaacaaattaatggtaagaaatcaaatcagcaataaaaagttacccattaaagaaaagcccaggacctgatagattaactgctgcattctacctaccactaaaaaataactactatcaattctttttaacctagtggaaaaaaataaaaaaaagaagatatgtgaactgttccagttcattctgtggggccagcaatatgctcaatacaaaaccagacaaggatacaacaaagaagagaaaactacaggctaatatacctgattaacataatgtaaaaatcctcaacagaatactgggaaactgagttataaygcacatttagaaaatcattcatgattttccatgatcaagtgagattacaggaatacaggaatggtttaatacacaagaatcattaagtgtcatacattacatcaacaaaataaataacaaaatctaggtggtcatttcaataaataaaaaagccatttgacaaaattcaacatctt

SEQ ID NO: 733952 - DNA, 636 bp, Homo sapiens
ctgcttcctactaaagccaaaatgtaagttctatcagtacatggatatttgtcttttctcaggtgaactgtggaaaacaatacgtgatatattttcagttcactttgatcttttttttctttttcactttcttctttttttttttttttttaataggaagtaacaaagtcttgctctgttgctcaggcagaagtggcaggatctcggctcaccacacaacctctgcctcttgggttcaggcgatttcctgcctcagcctctcagtagctgggaccacaggygcccaccacccgacctgactacttttttttggtaattttagtagagatggggttttgccatgttggccaggctggtctcgaactcctgagctcaggtggtccacccaccttggccccaccaaagtgtttggattcaccctgagtccaccgtggctggcctgatctttattctaaaaggttcacagacttaatttctgtaacaggcttactattcggtcttcttattaaactaaggagactaaagcaagaaaagattaagtaatttgacttgattctttatcctggtggttttgttatcaaaatagaaaactctgtttgcttatatgtatgtataacatgaactaaaatgtaagtt

SEQ ID NO: 733953 - DNA, 636 bp, Homo sapiens
ctgcttcctactaaagccaaaatgtaagttctatcagtacatggatatttgtcttttctcaggtgaactgtggaaaacaatacgtgatatattttcagttcactttgatcttttttttctttttcactttcttctttttttttttttttttaataggaagtaacaaagtcttgctctgttgctcaggcagaagtggcaggatctcggctcaccacacaacctctgcctcttgggttcaggcgatttcctgcctcagcctctcagtagctgggaccacaggtgcccaccacccgacctgactacttttttttggtaattttagtagagatggggttttgccatgttggccaggctggtctcgaactcctgagctcaggtggtcmacccaccttggccccaccaaagtgtttggattcaccctgagtccaccgtggctggcctgatctttattctaaaaggttcacagacttaatttctgtaacaggcttactattcggtcttcttattaaactaaggagactaaagcaagaaaagattaagtaatttgacttgattctttatcctggtggttttgttatcaaaatagaaaactctgtttgcttatatgtatgtataacatgaactaaaatgtaagtt

SEQ ID NO: 733954 - DNA, 560 bp, Homo sapiens
tcaccttaatgagaaactctgtaccattagcattctataccagcttccccctttcctagagcccttggtatccaataagccattttctgtctctgtggatttgcctattacagacacttaatataaacagactcatacaatatgaggctgttcgtgacttacagccttttgttgtagattatcttcatggagctgtgtataacaatcactgtagaagataaagataatgggccgggcgcggtggctcacgcctgtaatcccagcactttgggaggccgaggcgggtggatcacgaggtcaggagatagagatcatcctggttaacacggtgaaaccccgtctctactaaaaatacaaaaaattagcctggcgtggtggyaggtgcctgtagtcccagctactcgggaggctgaggcaggagtatggcgtgaacctgggagacggagcttgcagtgagccaagattgcaccactgcactccagcctgggcggcagaggaagactctggctcaaaaaaaacaaaaaacaaaaaacaaacaaacaaaaaaaaacaagaagaag

SEQ ID NO: 733955 - DNA, 618 bp, Homo sapiens
gtttggactccaatactattaatttgagattaaacttggcagttcattgaaatagttaattgagaagtaaatttggatatattcccaagaaagagaccatttctgtgtccaatggggctgggctccctgcctaaataattggtgaaagaaagtgttgttcagacatttagctgaaatatttgtgtcaattggaaagtcattgcccatggatactaggatctaacacagaaagaagttttcattcaaagccatgagaagaaagattcatatcacaacctctgacctgtgtgatattcaagactgaggttagatttttcatattacctgtattatataactacctgaaaagcagaaactggtataacatactagattgaacaattaagttcttaaaaacctggaaagattaacataaaactgyccccacccaagaataaatttacatttaagaacttaagattgctttaccacctcaaaggcaacattactaattcatggatggacattccatgccctaagagatagccaaggaagacacacttaagggtcacactcaaggataaaaagtggagtcaaaaaaagtcatcataattagtagtttaggggttctctgagacc

SEQ ID NO: 733956 - DNA, 467 bp, Homo sapiens
agtgatcacaggtactgattgacaggacatagcagccaggacttgagcaggcagggaggagtgccatgccacagggccctgagtgtctgtcagccctgtccgagttcctgggcccctagtgtgtgtcagccctgtccgaggctctgggcgtagccaccaaactccagatatgatgacagtgacagtggcatggtgcagcttgtccttgacctgggacttcatttgmaggcaaaaattttctccatttggggcctcctttctcacctccccttccccacttctcatgctcatttttcctggaagctgccccagtggacagggtccctgagtggagtcacaggatcacagacatcctagactagcccccagtgtgggtttcccatcttccttccttcttttctccagaggtcagcaatccgcactgagctcttcaggctggggcctgcccagtgggcagagaggacaca

SEQ ID NO: 733957 - DNA, 628 bp, Homo sapiens
aacttagccaatgattttcaactacatagaacaaaaaattttttcaaatgtcccacgtttatttacatatgaaatgtgtttcatacagttatgatggatggagtgtataacacctgacagcagcaagacctttcgaggaactgaacattgactacagtatatcatgcaagtacctacatatatacacaaaagaattccttttcttaaaaaaaaaagtacaaaacatgttcagggataaatacaagatataagatgcaaaagaaaacacaagacgaaaccaaaaaatataactctctcagagaactataaacagaagggacagaagagtacctctactgcattttagtaaagcagaactaccaacattaaatatacctcttgaaatggctgaactaatcccatgtggctcagtgcttaaggtaacggccaattgcgatacacagccggctgcattgataagtcggtggttgaygtcgtgcatcccaactctaagcaccagaacgtttggcagtaacacccagaacaggaaacgccaactcttttgaaaacaaaggattaagtcagctgatttttttttctatcaagagccagagaaatacttgatattcttagttgtgtttctgtaata

SEQ ID NO: 733958 - DNA, 499 bp, Homo sapiens
aagttgcttctgtacgtataaaagagaacagtccagacacttgaaaacagatattttctggttttcaatatgttagtcaaagtggcgatacagcaaggcttgcagggtgaacacagtgttgcacatggaacacttatatattatttttggttctcctatcttgatgccaggatgctgtgttaagtgcttggggcrgacttaaacaccattggacaaataggacacttgtagaagacttcacagtgagaaccttgaatgcgagacttcagagcagccacatcagagttcacaacattgcaatgtacacgtcaaaaaccaactctccttgtgtagtgtagacagttcttggtgacatgggtctggaagtgcaccaacctgcagatggccctgcactcagggcaggtgtagggagatttgtgctgatggattctctgcactggttaggaagcagcatctggcagatagtacaagtcttttgtccactcatatctgcagcctg

SEQ ID NO: 733959 - DNA, 560 bp, Homo sapiens
ttactctttactgagatggttttatttttaaaatgaacataattttttttatttttaaaatgaaactaataaaactgcttattctttgagatggttttataaaataaaatttataaaatatttatatttatttacatatttaaaatatttataaagtaaaaccatctcaataaagagtaagcagttttattagtttcattttacaaatgaagacactgatttaragaacttaaaggaaaactttaaaagcatacagttaataaagaggcaaaactagaagtaaaacttgggtcctaaatacctacctctaaggtatacaaagtttctcagaaaacagttactattctagatcatattacttgtaatgaaggttgtactccctttaggctctagtttcttttgaactaaatattacaatgcaaacttaattttaaaagacttactttggctattccgtatagtcattaaactataacaaaaaagacatcatatcattgtcaaaggcactgaaaacacaaatctctgaaataaaagtcactgaataatcacagatgatttat

SEQ ID NO: 733960 - DNA, 582 bp, Homo sapiens
tattccctagggtactctgagtcactgctttttccttttgatgtacaaaggatgtacattgtctatgtagggcaattatgggaacgtcccaactttggcatgctttccagagtaagcaactttacaggaagatggatgaagacaacaactcatcttcacgtcaactgtaaatttctctctatttgtgttgcaaatgttgaaactaaatttaaacaytgcttggtgtgagggccttccagaggccacattctcatggaatactttgtatcccacttactttcttctgtcagaccctatgaatgattcccagttctgtatctatctttacagacactcctagttagtaaaatccaggctttgaccagaaagagtcaggacttccacccactactgaaaattatagcttaatcaataacacaattagacctccccaacaaactggatcctacgtgcctatatactacttaaggttcatttctggtttaataaagctctgttctcaacatcagttgctcctttgtgaatttgctgaaaagctcagacattttagcatctcttaaagttcacagcaaagacaatact

SEQ ID NO: 733961 - DNA, 628 bp, Homo sapiens
agatagaaatgcagatcagtgaaacagatgagagagtccaaatagacctacacgtttttggagtatttattttcagcataggtgccaagataactcaatagggaaaggacagtcttcaatatatgatgctggaacaaytggacatccatatgcaaaaaagtgaacctcgattcttaccccataccatgtacaaatattaactgaaaatgaatcacagacccaaacacaagtaaccataaaaattctagaagaaataggacaaaatttttgtgcccttataagcaaagctttcttagctaacatacttatctgtaaaaaaaagatcgataaatcagactatgtcaaaattaccaactcaagagaaatgaaaacatgtccatgttttataggtgaacatttatatatttttatgtaaactttattcctaattgctcaaaactggaaatatcccaaatgtccactacaaagaaaccaaatgcggtacacccatagaagggaacactcttcagcaataaaaaaggaatgtattattgatatatgcaataacacagatgaacttcaaatgcattatgctaaatgaaaagaagtcagactcaaaggggtacatatatacaatttgcatttgtat

SEQ ID NO: 733962 - DNA, 577 bp, Homo sapiens
tgaggtttatcaaaacactaagtagtaaaggaaaaattatacaataagattccttttctctggcctccatagacagaagtgaagagggagtagtccatcagctccacaaacatagataaaaccacccattccctggcctccacaatgaagaggtaccccagaacttgctgcacttctggcaaaatctagagattcacaacctytgtctcaagaccataagggatttctttttaatccctacttacatcagttaccataaaaagtcccttactctaattcttcatccttcagactttaattctaattcccattgacaataaagtaccaaaattcctccctccaacgccctgcactccatagaacctataaccgcttgacatatattttggtaatttaagtataatgtaaactagaacctaaggttcatgagggcaggcttttttatgtctgattaagtgttggacccctagcacctgtaataatgcctggcacatagcaggtgctcaactatttgttaaagaagtaggataaatagcaaataaagatggaaaagagcaagagccacccaaggaaaaag

SEQ ID NO: 733963 - DNA, 577 bp, Homo sapiens
tgaggtttatcaaaacactaagtagtaaaggaaaaattatacaataagattccttttctctggcctccatagacagaagtgaagagggagtagtccatcagctccacaaacatagataaaaccacccattccctggcctccacaatgaagaggtaccccagaacttgctgcacttctggcaaaatctagagattcacaacctctgtytcaagaccataagggatttctttttaatccctacttacatcagttaccataaaaagtcccttactctaattcttcatccttcagactttaattctaattcccattgacaataaagtaccaaaattcctccctccaacgccctgcactccatagaacctataaccgcttgacatatattttggtaatttaagtataatgtaaactagaacctaaggttcatgagggcaggcttttttatgtctgattaagtgttggacccctagcacctgtaataatgcctggcacatagcaggtgctcaactatttgttaaagaagtaggataaatagcaaataaagatggaaaagagcaagagccacccaaggaaaaag

SEQ ID NO: 733964 - DNA, 577 bp, Homo sapiens
tgaggtttatcaaaacactaagtagtaaaggaaaaattatacaataagattccttttctctggcctccatagacagaagtgaagagggagtagtccatcagctccacaaacatagataaaaccacccattccctggcctccacaatgaagaggtaccccagaacttgctgcacttctggcaaaatctagagattcacaacctctgtctcaagaccataagggatttytttttaatccctacttacatcagttaccataaaaagtcccttactctaattcttcatccttcagactttaattctaattcccattgacaataaagtaccaaaattcctccctccaacgccctgcactccatagaacctataaccgcttgacatatattttggtaatttaagtataatgtaaactagaacctaaggttcatgagggcaggcttttttatgtctgattaagtgttggacccctagcacctgtaataatgcctggcacatagcaggtgctcaactatttgttaaagaagtaggataaatagcaaataaagatggaaaagagcaagagccacccaaggaaaaag

SEQ ID NO: 733965 - DNA, 577 bp, Homo sapiens
tgaggtttatcaaaacactaagtagtaaaggaaaaattatacaataagattccttttctctggcctccatagacagaagtgaagagggagtagtccatcagctccacaaacatagataaaaccacccattccctggcctccacaatgaagaggtaccccagaacttgctgcacttctggcaaaatctagagattcacaacctctgtctcaagaccataagggatttctttttaatccctacttacatcagttaccataaaaagtcccttactytaattcttcatccttcagactttaattctaattcccattgacaataaagtaccaaaattcctccctccaacgccctgcactccatagaacctataaccgcttgacatatattttggtaatttaagtataatgtaaactagaacctaaggttcatgagggcaggcttttttatgtctgattaagtgttggacccctagcacctgtaataatgcctggcacatagcaggtgctcaactatttgttaaagaagtaggataaatagcaaataaagatggaaaagagcaagagccacccaaggaaaaag

SEQ ID NO: 733966 - DNA, 555 bp, Homo sapiens
tcaaagactatgtaacttagaatttgttcttcctttcctttgtctctcagcaaaatataatcatcttagaaattttcctctcttctatttgtctattctatccacatatctagcttatttcctgttactgggattttgcctattgtttttctataccttacttctgtaaaatttgttgagtttttctatttatccctctttctccttagttaatgaggtaccctaaagcactagcacttaggaattagtctacttgtcagcaagagcgatctattaacaaagggatatgtaagaaacaggagaactaaaacaatcttgtggaaagggattattttytaagcgtgtgtctactatattagtttacttccgaaaaacatcagttacttctcataaatccatcctgtgtttaagaacataaaatatagtgtggattacaaatgcaaagcatgcaaattttcaggtaatcaggcgagccattacttacggcacaggtgtgccgccaaaaagaaataataataataataataataataactactcaataaatagagagca

SEQ ID NO: 733967 - DNA, 555 bp, Homo sapiens
tcaaagactatgtaacttagaatttgttcttcctttcctttgtctctcagcaaaatataatcatcttagaaattttcctctcttctatttgtctattctatccacatatctagcttatttcctgttactgggattttgcctattgtttttctataccttacttctgtaaaatttgttgagtttttctatttatccctctttctccttagttaatgaggtaccctaaagcactagcacttaggaattagtctacttgtcagcaagagcgatctattaacaaagggatatgtaagaaacaggagaactaaaacaatcttgtggaaagggattattttctaagcgtgtgtctactatattagtttacttccgaaaaacatcagttacttytcataaatccatcctgtgtttaagaacataaaatatagtgtggattacaaatgcaaagcatgcaaattttcaggtaatcaggcgagccattacttacggcacaggtgtgccgccaaaaagaaataataataataataataataataactactcaataaatagagagca

SEQ ID NO: 733968 - DNA, 611 bp, Homo sapiens
ttttgaggtcaaatccaaaaattattgcccagaccaacgttgtgaagctttctccctatattttcttttagtagttttacagtttaagtctttaatcgattttcagttggtttttatatatggtaggaggtaagggtccaattttattcttctgcatgtggatatacaattttcccaccaccattcattgaagactwttttttccccattgtgtattcaacatttagggactggggctggggaatagagagatgttccccacatgtcacagggtagtaggtttcagttaagaggaataagcttttgagatctattgcacagcatagtgactatagttaataatagtgtattggatctttcaaaattgtcaagagaataaatttcaaatgttctcaccacagaaaatgataagtatgtgagatgatgaaatgttagtttgatttaatcattccatagtgtacacatatatcagaacatcacattgtattccataattatacagttgtcagctaaaaatttaaaaaataaaaatatcctttaaaaatgcaaatagcaactgcagatagaaatttatcatgtatctcccaatgtgcttttttattgtatatatt

SEQ ID NO: 733969 - DNA, 586 bp, Homo sapiens
ttcacagttgcagccatgctgcctctcaatgctctgaaagtttgggatcctctcccacttgagtgttggctgtagattatggcttgtcattcctgggctttcccccacagctctggggtgatctcagtgtttatgtttcctctccaacttggaggcagcagcagaagggaccttaggagtggttgtggctgaaggtcttttatttacctcctaggggctctaccccagagaggtgtgggtcagcaattgctcagtgcagtctgcccaggatgggggtatctgtgctrtgggcccaaaccagggtttctctgcttggtgatgagcaggggaagtgtgcaggacctgtgggagatgaactttgctcctctccttgggtcgactgttgcttgatgggggtatggataaggtagttagggtctttgctccttcattagtctgagggtagcaggagtagtaccgctgcagaggcagtggcagatgggcttttggttgcccctgggggtctcatgtctgaggaatgcagagctgctgttactggaagtgttcagccatgggggtggggcagctgcattgctggcatgagctt

SEQ ID NO: 733970 - DNA, 565 bp, Homo sapiens
cccaacaggtctcagaggggccataaagggtttagaagtcccaaaaattattcttagagtactgtcattattcaaactatcaaacatgatcttggaaattcccacctacgactttagttgatctcaaacagagctcgctcagtgcaaatgactttttccctaggggtatttgacaaaaacaatcagcacctattgctgtacattgcagctgcttaatatggaataacagctggggcaaaggaaaagctgaccaaaaaacttaagagggaaacttaagggatgggmtgcctatagtagttcattgaaatgatacaaaatattgatacagcttcaatgaatggaggaacaccagagtcctttgtctcacgccaatttagataagacaacatggacacacatggagtggttttaaggaacagagagtttaataggcaagaaagaaagaagaagctcccagctacagagacggggggtcggtgaggggtgggggtggctccaagcagagagaggaaaccccaagtatggtggaaacaatctgttatattagaaggctggaggaggtggt

SEQ ID NO: 733971 - DNA, 613 bp, Homo sapiens
gggaacctagtatctaaaaaacttaataaagtcaaaaagactgaatttagaacttgaaattttgattttggaaagtttgtcaaatagcaaacattaaaacgcttgatatgacaaaataagagcacagatctctgtaaagtaagtcatccatttagccaaaatgataattcaaagattttaaaaagcaaaaacccttactctgtaatagaagaatatctttcccaaacaataaaggctaataaagatggcatgaagtcatctgaatctgtgtcttctctcccyttactcttattttttttgcagtttactcaaaaggtaaacaaaaatattttattatctctaaatattacacagaaatcttgtttaaaagagaaaacctatgtatagtgtattattaacactaaagctaattttaataaaatcttataaagaaatacatccttaaaacttctaaattagacaaaattactttcactttagcaaaaactgtatttccatgccttcttataacccttctatttaccaaacacatcctgctttccttatactctttatatacagagatgttttatatccattagctttgtgtacatacattatacagttaactcat

SEQ ID NO: 733972 - DNA, 510 bp, Homo sapiens
attattttaaagccaattaactagagctcttttatatattttggtagtaaaacatcacattcaaatgacatgtataaacacatagacatacagacatagaagcagatcttgtagatttataagttcattattcgccagttttttaagttcgcttctcccattttagactgtcaatttctttcaattacctgccttattgccttaggcaattgttggctaggcaaccttaaatttgcatttctaaaggcacaactttggtaaaacaagatagagaatttgtattttaaaatcacarggctaagaaattaagcctaagtactgcatcatcatttgttcaaaccaaagggaaaaaatgctgtaagtaaaagttcaattaagacaaccaaaaaaggtaccttaaacaaaagcatatttgtaaatttaaaacaatggtaaaagttcctaatgtacacaggtaagcacccttacaagagatttccttaaagacataaatttctttttaggatagcc

SEQ ID NO: 733973 - DNA, 481 bp, Homo sapiens
tttaaaaggaggagctcctcccttactcattttatgaggccagtatcattctgataccaaaatctggcagagacgtaacaaaggaaaacttcaggccaacaaaggctcaacaacggccaggcatggtggctcatgcctgtaatcccagcatttttggaggccaaygtggatggagtctcaaaacctcaaaagtagagaagctgacagtgcagccttcagtctgtggctgaaggcctgagagcacctggcaaaccattggtttaagtccaagagtgcaaaagctgaagaacttggagtctgatgttgagggcaggaagcatccagcacaggaggaagatgaaggccggaagactcagcaagtcaagtccttccatcttcttctgcctgctttattttagctgtgctggctgctcattagatggtgcccgcccagattgagagtgggtctgcctctctcagtccactgactcaaatgttaatc

SEQ ID NO: 733974 - DNA, 481 bp, Homo sapiens
tttaaaaggaggagctcctcccttactcattttatgaggccagtatcattctgataccaaaatctggcagagacgtaacaaaggaaaacttcaggccaacaaaggctcaacaacggccaggcatggtggctcatgcctgtaatcccagcatttttggaggccaacgtggatggagtctcaaaacctcaaaagtagagaagctgacagtgcagccttcagtctgtggctgaaggcctgagagcacctggcaaaccaytggtttaagtccaagagtgcaaaagctgaagaacttggagtctgatgttgagggcaggaagcatccagcacaggaggaagatgaaggccggaagactcagcaagtcaagtccttccatcttcttctgcctgctttattttagctgtgctggctgctcattagatggtgcccgcccagattgagagtgggtctgcctctctcagtccactgactcaaatgttaatc

SEQ ID NO: 733975 - DNA, 680 bp, Homo sapiens
tgcttctttcagtgccgtcatgggatcccagtgccttagccctactaaatatggactgtctacttgcttttgaaataatcgtgaatcagaagcccttcaccaggatgttctgctctggacttggggatgggaaggtaccccgtccactagagccacttgtccacactctccctcagtcacctcctgcctgttgggctgcagaggcagcctcttttctcctccttctccccacatcttcatataccactcagcctccgtcccctcccctgtagtctttagagtgggctgagaagcaaggccagccgcctcacagtggtttagccaacaaggattcagtaagcacctactctgcccccagaatgaagggaggggcacctctaaaaggtaacatgtattgagcactcacttygtgctaggctaagtgggtagaaaccataatacccctaagaccatagcagagggtttggtttggtttccaatgttcagtgtaccatttggggagtgtaccattcattctgaacgtgcagtggggttgtctgctgacaggtaatcccgagctagggtttataagaactggagataaagggtcaggtaagtttgagaagcaccatatcaaacaaaaaacagacttcttcccttcaggggctgttctgagagagctggaagtacagcattttcca

SEQ ID NO: 733976 - DNA, 565 bp, Homo sapiens
tatgcatctgactgctctaggtacctcatataagtggaatcatatagtattcgtctttttgtgactggctatttcacttagcctaatgccctcaaagtccatccatgttgtagcatatgtcagaattttcctccttttagggctgaataatattccattttatgtatatgccacattttgtctatctatttgtccattgaagcaacttgggttgcttccacctttcggctattgtgaaggatgatgttataggtgtcttagtctgtttgggctgctgcaacagaataccgtagactgagtggcttataagcaacagaaatttatttctcatagttctgggcctgggaagtccaagatcaagacattggcagatttggtatgtgrcaagaacccactgcatagctggccacctctttgctgtgtctatgtggtgaaagggcagagggagttggaaggcactaatcccattcctgaggactctgctcccatgacctaatcacctcccaaaggccccaccaccaaataccatcacattggagatgaggtttcatcatatgcatttgga

SEQ ID NO: 733977 - DNA, 565 bp, Homo sapiens
tatgcatctgactgctctaggtacctcatataagtggaatcatatagtattcgtctttttgtgactggctatttcacttagcctaatgccctcaaagtccatccatgttgtagcatatgtcagaattttcctccttttagggctgaataatattccattttatgtatatgccacattttgtctatctatttgtccattgaagcaacttgggttgcttccacctttcggctattgtgaaggatgatgttataggtgtcttagtctgtttgggctgctgcaacagaataccgtagactgagtggcttataagcaacagaaatttatttctcatagttctgggcctgggaagtccaagatcaagacattggcagatttggtatgtggmaagaacccactgcatagctggccacctctttgctgtgtctatgtggtgaaagggcagagggagttggaaggcactaatcccattcctgaggactctgctcccatgacctaatcacctcccaaaggccccaccaccaaataccatcacattggagatgaggtttcatcatatgcatttgga

SEQ ID NO: 733978 - DNA, 549 bp, Homo sapiens
ggagctcataataggtggcacagacagtacatatgtcccccagaggagagttctttccctggcctttcgcctatgaacagtcaactgcaggggccatgtattgaacaccgaaggagtgaaatgcaagtcacactgtaggccctcccccaagggagctacaatggccaaccactggctgtgcaggcttggagggtacagggccacagccaggttttctgttccactgctttcaggggagctggagcagccaccagcaggttaccattygtccccatacctggtcgaaggaggtcatccttggaatgtatctgcaactgagtgggggcagtgccctggtgtaacaaagcctccactggggtctggctgcctttctgtggccgttcgttcaaggttaggagcaccaggtccagcttggaactccagccctgcaaagacaggggtgtgacatatgagggtaacccattattcaagagttcattatatcgctcaattatactcggggcttgtaggatgtatggcacatggaatccccactttatgtccatttgt

SEQ ID NO: 733979 - DNA, 609 bp, Homo sapiens
cctgtttgtgatgccaattgtcaggttccaactgaggtccaaggggagtcggtgggcaagtggtgggtagctggaaaaacacttgaggaatcgtagacagttttgacatggctttactctctctctggctgtaattgagccatatgtacagtattagcagggtaattataaatttacagataatagtggctccaagccaagcatgagcttacgtgggtgatcacctaatgcacctcacatggcatggttacataacgtgcggggttttgcgcctgcactccaaacctgctgagtcatgctgtgtcagaaggccgcctcggcctactcctgactagagcgcagctttkcagggaggtagtcctggattactttcagttaattggcccttgtttttctagtttctcaaggtagaagctgaagtcactgatttgagatcttctttcttcttgtctaaagtacgtgtttagtgttacaaatttttccctaattattgctttaggaatatctcaaattcttatatgttctgttttcagttatattcagttcaaaatactttctaatttaattgttaattttgatccatgttatttacaagtgtgttatttagtt

SEQ ID NO: 733980 - DNA, 609 bp, Homo sapiens
cctgtttgtgatgccaattgtcaggttccaactgaggtccaaggggagtcggtgggcaagtggtgggtagctggaaaaacacttgaggaatcgtagacagttttgacatggctttactctctctctggctgtaattgagccatatgtacagtattagcagggtaattataaatttacagataatagtggctccaagccaagcatgagcttacgtgggtgatcacctaatgcacctcacatggcatggttacataacgtgcggggttttgcgcctgcactccaaacctgctgagtcatgctgtgtcagaaggccgcctcggcctactcctgactagagcgcagcttttcagggaggtagtcctggattactttcagttaattggcccttgtttttctagtttctcaaggtagaagctgaagtcactgatttgagatcttctttcttcttgtctaaagtaygtgtttagtgttacaaatttttccctaattattgctttaggaatatctcaaattcttatatgttctgttttcagttatattcagttcaaaatactttctaatttaattgttaattttgatccatgttatttacaagtgtgttatttagtt

SEQ ID NO: 733981 - DNA, 623 bp, Homo sapiens
ttatttctgagggctctgttctgttccattggtctgtatctctgttttggtaccagtaccatgttgttttggttactgtagccttgtagtgcagcttgaagtcaggtagcatgatgcctccagctttgttattttggcttaggattgacttggcaatgtgggctcttttttgggtccatatgaagtttaaagtagttttttccaattctgtgaagaaagtcattggtagcttgatggggatggcattgaatctataaattaccttgggcagtatggccrttttcacgatattgattcttcctacccatgagcggagcatgcttttcttaaaggtattttatttttttgtcagtgtccatttgtggttctggttggaggcgtctggagcaccctgttcagaatatatggaggaaactcaccaccaccatgtcattcctcaagtcctgtgatcctaggctatccaccttcttctttctgtccttcagcatcttccaatgaactagaatcctttaaaatgtattaaaatttggtttcaaggaccaaaatacggtctagtttggtacatgttctgcatgcatttgagaagaatgtgtattctattgctgttcagatctatgttgggt

SEQ ID NO: 733982 - DNA, 623 bp, Homo sapiens
ttatttctgagggctctgttctgttccattggtctgtatctctgttttggtaccagtaccatgttgttttggttactgtagccttgtagtgcagcttgaagtcaggtagcatgatgcctccagctttgttattttggcttaggattgacttggcaatgtgggctcttttttgggtccatatgaagtttaaagtagttttttccaattctgtgaagaaagtcattggtagcttgatggggatggcattgaatctataaattaccttgggcagtatggccattttcacgatattgattcttcctacccatgagcggagcatgyttttcttaaaggtattttatttttttgtcagtgtccatttgtggttctggttggaggcgtctggagcaccctgttcagaatatatggaggaaactcaccaccaccatgtcattcctcaagtcctgtgatcctaggctatccaccttcttctttctgtccttcagcatcttccaatgaactagaatcctttaaaatgtattaaaatttggtttcaaggaccaaaatacggtctagtttggtacatgttctgcatgcatttgagaagaatgtgtattctattgctgttcagatctatgttgggt

SEQ ID NO: 733983 - DNA, 597 bp, Homo sapiens
tacatgttttctaatactttcccaatatattaattttatttttccccaaatattaattgaactcctactatgtttcagatgccttacagtattctgaaggcctacagacaaaaaaaaaaacaactgtgttgcccttaagaaaatattcatttcagtgattatctgacaattacgtgtgcgtgcctcagtgaaaaataaccaccattacaggacaaagaactaaaatgattacttagactgtgtgtgtgtgtgtgtgtgtgtgtgtgtctgtgtgtgtgtgtgtgtgtgatattccagtctgtaaagtctccattttgaaattgtaaatgaaaactgattagaatcagagttagaatttgttggaatrtatgtaaagattttaggaatcaagtaagaaggccattgaacgtggaggtggaagattgggggtaggtaaaacctatcagcatgtcaagctgtttttctcctgacagaatatgcagaatgtacttgccttcacattccataaccttgaactcttcttgacacagctattagagccaggcctttgaatagcctgtctcatagcattagaacccaatgtctgatttcctgaca

SEQ ID NO: 733984 - DNA, 658 bp, Homo sapiens
ggggacatgtttaacatgacttcactccatttccagcaacacccttccattccaacttgcctgtgaaggtcagtgaggaggcgcctgctagacctgtgaggaaggtaaatgcattttcgatgggctggaaaatctgtgtcattgacgagtggctcctgccttatgcattttttggatattttgaaaccaaatcttttaagtgcttacttcaaggagtggagtgtggttgggcaataagaacagaggaactgaattgtggcttttgaaaatggctgtccgactgggattattggacattgtatagcatctttgcaaaattctgcagtgtcaatcctgagagtaaggtttytgtaaaaaccacgtattaagggagtgacattctgataaagacagtggtcactttatgcccacagagaaacacccacagaagatgggtattttctggattgtgctaaaggaacgcagattacagctacatggtctggatgtagtcagcattcccactcagttatgtgcacgaaccaaccacagggatgaagtcagtgaagtttattacacacacacacacacacacacacacacacacacacacactccttgaaaatagaggacagatcagaaagacaactagttcatgggaattagctattcagcagaa

SEQ ID NO: 733985 - DNA, 590 bp, Homo sapiens
agccataaaaatatgtctccataaatttaaaagaatttaagtcttaaaaaatatgttttctaacttcaaaggaagttaaataggaaatcaaaagaaatgaatttcccaaatatttagaaattttaacacatttctaataaaccataggttaaagaagaaatcaaaagggaaagtagaaagtaatttgaacagaatggaaatgaaaacacagtgtaycaaaatttgtgaattccagtaaagcagtactggtggttggggagggaatttacaacagaaaatgcctatataagagaagaagaaaggtcttaaattaataaactcagcttttaccataagaaacaaaagcagcagccacacacaaaaaaaggtaatttaaagtgaagagaagaaaggaaataataactatcagagaagaaatcagtgaaatagaaaatagaaaaatgattttaaaaaattaataaaaccagaagcagcttctttgaaaaaaatcaataaaattggtaaacttacagccagattaattagtgaaaagggagaggagatatagattaccaaattcaggcaatacagaggtgacatcattacgattt

SEQ ID NO: 733986 - DNA, 575 bp, Homo sapiens
ttagaagattatggcatctttggaagcaaatcttctaaaatatgaatccttcaggactttctttaaaacaaaaatgaccacactaataaaattagtcttgtcttctttgtatgagcttgcccatacattcttatttgttggactttcctacatccctcatatcacatatactttaatcgtaactctatgccattaacttcaaaaaaccatccttatcctattaaatatacattggggggacaatacttgttagtgcggtcactgcacgtctactcttcctcccacacacacatccttttmttaactacactaagaaaatataattatttgcattcttcaaatattctcaaaattcctttacatacacattctcaggaaaaaagttgggtttcagggaaggctgaacacagtcaagattcatttgagtcaagacctgattttcttcaggctgtgttattttctctgaagtactaggtttgcacaaatgattgtttccaacggcacaaccatcagataaagtgtggggtggtgtcttccagctcttctcattctctcgggcgttgtctggagctttg

SEQ ID NO: 733987 - DNA, 579 bp, Homo sapiens
aagggatcctcctgcctcagcctcccaaagtgcccagattacaggcatgagccacagcgcccaacagcttttagtatatcaacaaggttgtgcaaccatcaccaattccagaaccttcttacttccccaaaacgaaacactacacccattaaacggtaactctccattctcccgtccccagtgacgactaagctacttcttgtttccatggttttgcccgtaatggacatttcataggatgcagtcacacaacatgtgaccttttgtgtctggcttttgttactttttcaaggttcctcctcractgtgattgcttcattccttttcacagttgagtaatattccatcctgtgaacgtatcacactttcattcatcagtggatgcagaatttgtttttttccactgtggggctactgtaaataatgctgccatgagcatccgtgcgcaggcttctgtgggcacattttcaattctcttgagaatgtacctaggagtggaactgtggtcatatgctaatgctgctttctgaggttctgtttgccaaagtggctgcattttacattcccagtagcagtgga

SEQ ID NO: 733988 - DNA, 579 bp, Homo sapiens
aagggatcctcctgcctcagcctcccaaagtgcccagattacaggcatgagccacagcgcccaacagcttttagtatatcaacaaggttgtgcaaccatcaccaattccagaaccttcttacttccccaaaacgaaacactacacccattaaacggtaactctccattctcccgtccccagtgacgactaagctacttcttgtttccatggttttgcccgtaatggacatttcataggatgcagtcacacaacatgtgaccttttgtgtctggcttttgttactttttcaaggttcctcctcgactgtgattgcttcattccttttcacagttgagtaatattccatcctgtgaacgtatcacactttcattcatcagtggatgcagaatttgkttttttccactgtggggctactgtaaataatgctgccatgagcatccgtgcgcaggcttctgtgggcacattttcaattctcttgagaatgtacctaggagtggaactgtggtcatatgctaatgctgctttctgaggttctgtttgccaaagtggctgcattttacattcccagtagcagtgga

SEQ ID NO: 733989 - DNA, 535 bp, Homo sapiens
ttgctgaaatttaaataacgtaaagtggatctgaattttgcccaaccttctctgtttacatcattttgggaaaagaagttttgtttttacttgtagtttctctagaacatcatctaaaatttaaaaatatagtaaaaagggtgataatagagaaagragatatatcttcatggtctttaaatccttgtttcattggagttatcttccagattaggggtgatgaggctcccttcctctgtcctcacaaagcactcagggaaaatttttaccatttcattatgcccctcatatattttttccatctaaggaaaaaacttctatcacagttgttggcatatggaactttcttaaaagaatatttacagtgcagttcagtttagaagtgatagcccagagggcccatggtcagttcttggtgaattcggagcaactgcacttgcttacaggacaccaaggttgctttcacataataggaaatattgtattagcacataaagcatgatgctaatgatgtcaacttcttggtttgatcaga

SEQ ID NO: 733990 - DNA, 614 bp, Homo sapiens
tcatggtgctcaactgctcggctgctcccatacagacaccttccactttttgcgcctcactggcaaagccacctgttgtttgtttcctggagtatgcaatctgccatttttcacagttgattgtgttagtctgggttctctagagaaacagaagcaatgggagatacatacatacatacatacacacacaaacacacaccccagttgagagagagagagactgatttactgtaaagaattggcttcgcagggcacagtgacttggcactttgggaggccgaggagggcggatcgcttgagctcaggtgctcgagaccagcctgggcaacgtggcaaaaccctatcttttcaaaaaatacaaaaatcagccaggcatgatggagtgtacctgtagtcttagctactcaggaggctgaagtgggaggatcamttgagtctgggaggtcgaagctgcactgagccatgatcacgccactgcactccagcctgggcagcagcgtgagaccctgtctccataaccaaacaaacaaaaaagaattggcatgtgtgagaggctgagaagtcccaagatctgcagtcagcaagctggagacccatgagagcccataatataa

SEQ ID NO: 733991 - DNA, 559 bp, Homo sapiens
attcaaaaagtggaaaaggtcttctaggaattacttctattagaggagaaatgagttcaaggtcaatggcctctcaacatattactgggagctaagaacgattagagctgacatttactgcaggcctacacattgttccaggtattttgttaaacattttaaatacaatatctaattcaatcctcataacagcsctacaagttagattctgttattatctccattttggaaaggaagaattgaggcgtgggtagctcactaatttgtcaaagccataaagtagctagtgaaggcggtggtcctatttaatctgagatccgcctacatctggcactcctgctcttaaacactatgctacaattttcattcttcaggtagcttaatagtaaatgggaaagactgggctttgcatgtcttttgcttcacctgcctccctttctttcatctttcctcagaaatatttctctagggtgaaggggaataataatactgcctctgttgggtcattttcatgaatgaagtgattttatattttgtcaatcattaatcaatggtacat

SEQ ID NO: 733992 - DNA, 559 bp, Homo sapiens
attcaaaaagtggaaaaggtcttctaggaattacttctattagaggagaaatgagttcaaggtcaatggcctctcaacatattactgggagctaagaacgattagagctgacatttactgcaggcctacacattgttccaggtattttgttaaacattttaaatacaatatctaattcaatcctcataacagccctacaagttagattctgttattatctccattttggaaaggaagaattgaggcgtgggtagctcactaatttgtcaaagccataaagtagctagtgaaggcggtggtcctatttaatctgagatccgcctacatctggcactcctgctcttaaacactatgctacaattttcattcttcaggtagcttaatagtaaatgggaaagactgggctttgcatgycttttgcttcacctgcctccctttctttcatctttcctcagaaatatttctctagggtgaaggggaataataatactgcctctgttgggtcattttcatgaatgaagtgattttatattttgtcaatcattaatcaatggtacat

SEQ ID NO: 733993 - DNA, 629 bp, Homo sapiens
ctagggaaagaaacaccggcatctacataatggatggcaccgtggaaatgctgggcttctttctggtgattatttaactttgaagagcagtggaggaactgtgaaatgagtttcatggctaggagctcgccactctcatttaaaaggccactccatatttttttcaaatataactaaactattatcttttgtgaatagatcctttcacatgattcagccaaaaaatggatcaagaggttaaacagtaaaattaaggaaaagcatattttctcatcatatacatgtcctcagactgcccaaattcatttggaaggtttttagcatttgcaaaaatgtactctaggccattgtttttaaaagatagaaacattccagaaatcccctggtagagatcatgttattaaccaattggcgaaatgtttacaagagacgtgggattatttgtataaaaacttacagcccaaaaatttatggcagtaatrtaaactcatgaacgtccagtgctgcttgggggaattctctgcagtagctagatgactgatgatgtggcagagtgtgataacaagtacagctgtttctataaaaatgtgatcataacaagctaaagaataaatcctccataagaaatc

SEQ ID NO: 733994 - DNA, 604 bp, Homo sapiens
ctcccatttggacggacagaatagtgcgtggagactcatattgtgaacttttgctctaagagctaccacaggaacataccaggaaagccaagagaatccacagaccctttgaaggaggcagattgctactgaagcctccatgggacagccaaggaattgtgagtctgtgagtccgcttgctttctcagctgggaggcttgcagccaggggcaagttttcagccctgctcactggctgcctgagaaataaacccagtgcagttggtgggggcacagtgagagtgagatcagcctttctggctgttgactgcaagggagctgggtgagcctgtggctaccrgctttcccccattccctggcaacctgtatgacacagcaaaggcagccataatcctccctggaaaccttcccttgcagcagacaaaccaagccccacccaaggagagtctgagttcagacaagcctaaccctgcccccacctgatggtctttctctattcatcccggtaggcaaagacaaaagacatcatcccttgggagccctatggccctgcccatctcttgaccctagggcaatcttgaatcctccctatacaagtgcagctg

SEQ ID NO: 733995 - DNA, 604 bp, Homo sapiens
ctcccatttggacggacagaatagtgcgtggagactcatattgtgaacttttgctctaagagctaccacaggaacataccaggaaagccaagagaatccacagaccctttgaaggaggcagattgctactgaagcctccatgggacagccaaggaattgtgagtctgtgagtccgcttgctttctcagctgggaggcttgcagccaggggcaagttttcagccctgctcactggctgcctgagaaataaacccagtgcagttggtgggggcacagtgagagtgagatcagcctttctggctgttgactgcaagggagctgggtgagcctgtggctaccggctttcccccattccctggcaacctgtatgacacagcaraggcagccataatcctccctggaaaccttcccttgcagcagacaaaccaagccccacccaaggagagtctgagttcagacaagcctaaccctgcccccacctgatggtctttctctattcatcccggtaggcaaagacaaaagacatcatcccttgggagccctatggccctgcccatctcttgaccctagggcaatcttgaatcctccctatacaagtgcagctg

SEQ ID NO: 733996 - DNA, 542 bp, Homo sapiens
agattctttaacacccccaaaagatcacactagttcaccagcaatggatccaaaccaagacaaaatctctgaatcgtcagaaaaagaattcagaatgtcaactattaagctaatcaagaaggcaccagaaaaagtgaattccaacttaaagaaatttaaaaaaagatacagaatatgatatgaatggaaaaatctccagtaaaataaatagcattaaaacaaaaaataattatgagttctggaaattaaggacacagagaattgcaaaatttgctgaaaagtctcagcagtagaatcaagcaygaagaagaaagaacttcagagctcaaaggcgaggcttttgaattaacccaatctgacaaagacaaagaaaaaagaattttaaaaaaatgaacaaagcctccaagaagttaggaattatgttaaatgaacaaacgttagaataactggtgttcccaaggaagaaatctgaaagtttggaaaatgatatggtttggctgtgttctctcccaaaattcattttgaattgtagctcccacaat

SEQ ID NO: 733997 - DNA, 655 bp, Homo sapiens
acaaagtgactcaccttaggaaagtaaataagtagcgtgttattgagaggtgaagccagatggacttcctgggtcgagtggggacttggagaattttctgcctagctagaggactgtcaacgcaccaatcagtgctctgtgtctagctaaaggattgtaaatgyaccaatcagcactctgtaaaaatgcacaaatcagcactctgtgtctagctaaaggaatgtaaatgcaccaatcagcaccctgtaaaaatgcaccaatcagcactctgtgtctagctaaaggattgtaaatgcaccaatcagtgctctgtaaaaatgcaccaatcagtgctctgtgtctaaaggattctaaacgtaccaatcagcgctctgtaaaaacgcaccaatcagctctctgtgtctagctacaggattgtaaatgcaccaatcagcactctgtaaaatggacaaatcagcactctgtaaaatggatcaatcagcaggacacgggtggagacaaataagggaacaaaagctggccaccccagtcagcagcagcaacccccttgggtccccttccatgctgtggaagctttgttctttctctcttcacaataaatcttgctgctgctcactctttgggtccacaccacatttaagagctgtaacactca

SEQ ID NO: 733998 - DNA, 624 bp, Homo sapiens
aacaccaatgtgattctatttggaaatggggcctctaaggaagtaatcaagattcaatcaggtcataagagtggggctttgatctgataggattagtgaccttataagaaaagacaactagcctgggcacaggggctcatgcctgtaatcccagcactttgggaagccaaggcgggtggatcacctgagctaacgagttcaagaccagactggtgaaaccccgggggtctctactaaaaatacaaaaattagcctgcatggtgacacatgcctgtaatcccagstactcgggaggctgagtcaggagaattacttgaacccaggagctggaggttgcagtgagctgagatcgtaccattgcaccagcctgggcaacaagagcaaaagtacatctcaaaaaaaaaaaaaaaaaaaaagaaaagaaaagaaaagaaaagaaaagaaagaaagaagaaaagaaaagaaaggaaaaagaaaagacaactaagggatctcctctatgggcatgaatggcagaaaggccatccaaggacatagtgagatggcagctgtctacaagccagaaagagagccctcgccagaaattgaattggctggcaccttgatcatggacttctatagcct

SEQ ID NO: 733999 - DNA, 625 bp, Homo sapiens
actcagagtgtggagccctcatcgcctaatacctcttaggggccccacctcctaatactgttacaatggcaattaaatttcaacatgagttttggaggggacaaacgttcaatcgttgcagaaaacaactgttgcttgcttttactgagactactggagcccatcagtgcatttcatggcacctcttctcagtctacctctgcacatcagctggccacttccacaagagctcagttgcaagaacttgctgaggctgagctgggattagaagacctaaactatcaagaaagagaaagtattgggttcatcagagcatgctgtggggtatgagggatagagtgtggggtgaaggatgcagacacagggcaggaggaagtagaggaagccaggtattagtgcctggccagagagaaagctraagacagaaggcttctatctggtcacctatggatacccaaaatggattgcatttgaactagaatctagtatttcaatgtctttgaagaagtgatgcatttaggccagatttgtgatgctttgaacccagatggtggctagagagatgccagttcactgacacatcttcctggtagataaagaaaggcttgcagatagacgagtcatt

SEQ ID NO: 734000 - DNA, 492 bp, Homo sapiens
acattggagtaccagatgtagggtctagccctatggggcttagcgggtgttctccccgtgtgcggagaggagagattgtaataaataaagacacaagatgaagagataaagagaaaacagctgggccctagggaccactaccatcaagatgcggagactggtagtggccccaaaaggctgggcgcgctgatatttattaaatacaagacaaggggacagggtaaggagggtgaatcttgtaagtgattgacaaggtgaagcaagtcacgtgatcacargacggggggcccttcccttttaggtagccgaagcagagagagagaaggcagcatacctcagcattttcttctatgcacttataagaaagatcaaagactttaagactttactattccttctaccgctatctactatgtacttcaaagaggaatcaggagtacgggaggaacatgaaagtggatgaggagcgtgaccattgaagcacagcaccac

SEQ ID NO: 734001 - DNA, 620 bp, Homo sapiens
tcaagaccaagccatactccctctgaaagtgctaggcaagaatctgttcctggcttctctcttagcttctggaaggtccttggcttttggcaacataactccaatattcacctggcctccttcctgtgtgtctgtgtgcaaatttctccttttgataaggacaccagtcacatcagattggagacccagcccacaccagtataaccttatctgaactaatcacttctgtaataaccctattttcaaatactattcacattctgaaatactggaggttagaacttcaacatatggatttggggttggggggggcaaaaatcaacccataacaattccatcctctgtctttaatcaaaaacttccccgatcctctttaacatttagctcctaccgctcctttaagacacagattaacttcttaraccttgtctgaccatgctcatcaaagctcaaaagtgttctgccttctttagaattctagtaggacttgtctgtatttcttatatgaaacacttagttttaagttcccatatgtggttaattgtcgttattccatatgtattttatgtctttaactaaaggagaatactatatatagttgtatcttttcgagctctttg

SEQ ID NO: 734002 - DNA, 585 bp, Homo sapiens
attttgctaatgattttgcaactattatgattaacacacacacacgatttacctcatttattgtggtaatatggtgattttgtattgactggtgaatattcaactaaccttgcacttttgggataaagttcacttggtcatcttgtatcatacagttcatataattgcagaatttgatttgatagcattttatttaggagtttttaatctatattcttgaggaatagggatctatagtttgttttgggtttgtttgtttgtttgtttgtttgataacatctttgtcttgggagtcatgataatgatggtttcagagctgtgttasaatatgccctgtcctctaatatttgaaaggtttcatataaaattggtgtgatttttcttaaatgattgacagaattcaccagtgaagctatctggctctggaattcttattttagaaacattttttaaattaccaattgcattttttaaacacatatattgctatttatattttctatttattctagtgtcagtttttggtaatttctgtctttcaagcaacttctctatttcatctaagttgtcaaatttactgactta

SEQ ID NO: 734003 - DNA, 585 bp, Homo sapiens
attttgctaatgattttgcaactattatgattaacacacacacacgatttacctcatttattgtggtaatatggtgattttgtattgactggtgaatattcaactaaccttgcacttttgggataaagttcacttggtcatcttgtatcatacagttcatataattgcagaatttgatttgatagcattttatttaggagtttttaatctatattcttgaggaatagggatctatagtttgttttgggtttgtttgtttgtttgtttgtttgataacatctttgtcttgggagtcatgataatgatggtttcagagctgtgttacaatatgccctgtcctctaatatttgaaaggtttcatataaaattggtgtgatttttcttaaatgattgacagaattcaccagtgaagctatctggctctgkaattcttattttagaaacattttttaaattaccaattgcattttttaaacacatatattgctatttatattttctatttattctagtgtcagtttttggtaatttctgtctttcaagcaacttctctatttcatctaagttgtcaaatttactgactta

SEQ ID NO: 734004 - DNA, 656 bp, Homo sapiens
catcacttttcttttgtgatgttgaaatttttcccttcaatctggctgttacaaatatgaatgtcttccagccctgtgtggattctaggaattgctcagcttgctgtgatccagtgttttttctttgccgaggcttttatagcttccctctttgcaatatccaatcagaaactcatgaagaaccctaatagattcctagagctctttctctgtgtttctgccccctctgcactgctctgcatcacaagttctagccacctcatcctcttacattccaaaatctgtcttctcacctcagtgataagattcttctctgtgatttctcctccctttctcatggtttgttacatgcttcctggcagaaagccatgtgagttcaggtcttacctcacttacttccttttcgtcagggatctcagttgtgtgttatctgttgtccaacatataagaacaattatttcatatagtttgtccagtttaccagttgtttgtttgaagtaagggtaygtctagcaccaattaatatgcaatggccagaaaaaaatagagatattacagatgaagggaactgagacagagatttaatttttgcactgtacatagctaataggtatgactaaacctccagctaggctttttctgctttaccatgctgc

SEQ ID NO: 734005 - DNA, 626 bp, Homo sapiens
gctatgggtgcacaaaaaaggagacatgatattccaaattatgagaatcccttgtgtggggggaggctcagtgtaaaattaggtggggaggccgaatcaagtttccttcaggcatctgcaaagtagccacttaacgcagttgatgttctaattacaaactagttgttcattataacaactcttctaattctttttttccccctttaaaaaaaacaaaacaaaacagagtctcrctctgtcacccaggctggagtgcagtggtgtgatcatggctcactgcagccttgactcctgggctcaggtgattctcctgcctcagtgtcccaaatagctgggactacaggcatgcaccaccacaccaggctaattttattttattacttttttatttttatttttatttttttttgtagagacggtatctcactttgttgagcaagctgaccttgaactcctggcctcaaacaatcctctcacctcagcctcccaaagtgcttgcattacaggtgtgagccaccataccccaccaactcttctaattctaaccatagctatagaaaaaaatatatagataaatgaataccaccaccattaacctagtttggtctctttgcttcatatacaat

SEQ ID NO: 734006 - DNA, 616 bp, Homo sapiens
ctttggcaaggcagaagcattgaaagaagctcattatggtcaagagatgaagctagaaagaccaggaaaacagaattaaagagtctgaattatcctaaaggtaacatgcagaactaccaaagagttttaatctgggaagtgagatggccagattcactctccttaagatcattctagyggctgtttggagaatggctgggggaaaaccaggctagacacacagaaaacagttaaaaatctattggcatggtaacagagatgaagatagattaagctaggatagtggccatgtaaaaggagagaatatcatatctggaagaggggaaatgccatgtcttctgactggggaggctgcctttccttaccagttgggccaagactaccattcttgcttgttttctgtggttcagtgaaaatgtgtggcaggtccaacatgccccactgcagaagagcagtgagcccccaacagatttcccagacagggtccatacccttgagatttggatgagaaccctgtgaattctggcaaatgcccaacagattgcccatgatcggtagattggcaattctggcagattgcccaacagattgctttcactgcttgtgacacagcagg

SEQ ID NO: 734007 - DNA, 616 bp, Homo sapiens
ctttggcaaggcagaagcattgaaagaagctcattatggtcaagagatgaagctagaaagaccaggaaaacagaattaaagagtctgaattatcctaaaggtaacatgcagaactaccaaagagttttaatctgggaagtgagatggccagattcactctccttaagatcattctagtggctgtttggagaatggctgggggaaaaccaggctagacacacagaaarcagttaaaaatctattggcatggtaacagagatgaagatagattaagctaggatagtggccatgtaaaaggagagaatatcatatctggaagaggggaaatgccatgtcttctgactggggaggctgcctttccttaccagttgggccaagactaccattcttgcttgttttctgtggttcagtgaaaatgtgtggcaggtccaacatgccccactgcagaagagcagtgagcccccaacagatttcccagacagggtccatacccttgagatttggatgagaaccctgtgaattctggcaaatgcccaacagattgcccatgatcggtagattggcaattctggcagattgcccaacagattgctttcactgcttgtgacacagcagg

SEQ ID NO: 734008 - DNA, 524 bp, Homo sapiens
caaatactttggcatagagttacatttatttgttaaatttcttctgatttttaaaattataatttgttttaatacaaaacatttacctggttagaaagccaaactataaagccaggtatattgggaaaaaaaactctagattccattttatcttctcaatgctgttttttcgtacatctatctataggtaatcatttatgttaggttttggtttgatctattaattgytttactttgaaaatatcaataatgtgtgtgtgtgtgtgtgtgtgtgtcctccatacagaagacagcatactctatacactattttgaaccatttacttttcacttaatggtatatcctaaatgtcattttatataaataagctgtaattttctcatttatgtttatggctgcatagtatatttttatatgaatgtcccatatttcatttaactgatcccttgttgttcaaaaaataatgccatgataaatagccttatcgatatgcccttttgtatttttctagtgtatcttttag

SEQ ID NO: 734009 - DNA, 668 bp, Homo sapiens
gggattgctgaatcatatggtaagagtgtttttagttttgtaagaaactgccaagttatcttccaaagtggctgtgccattttgtattcccactagcaattaatgagagttcttgttgccccacatcctcaccagcatttggtggtgttcgtattctggattttagtcattctaataggtgtgtcatcacaggtatcttgttgttttactttgtgttgatgtggagcatctttttgtgtgcttatttgctatctgcrtatcttcactcatgaggtctttggccatttttcaataggactgtttgttttcttgtggttgaactttcagagctctttatatgttttgcatagtagtcctttatcagaggagtcttttgcaaatattttctcccagcctgtgattctcttttcattcccttgacagtgtctgttgcagagcacaagttttaagttttagtaaagtctagcttatcaattctttctttcatggatcatgcctttggtgctgtatctaaaaagcaatccccaaacccaaggccatctagattttctcctttgttatcttctaggagtctcacagttttgtgttttgcatttaggtttgtaatcatcatccattttgagttaattgttgtgaagtgtataaggtctatgtctagattcattttt

SEQ ID NO: 734010 - DNA, 612 bp, Homo sapiens
ggttcaagctttgtaggttgtatgtatccaggaatttatccatttcttctagtctttccaatgtattggcatatagttgctcataatagcctttaatgatccttttaatttctgtggtatcagttgtaatgtctcctttttcatctctgattttatttatttgggtcttcttagtctggttaaaggtttgttgattttgtttacrttttgaagaaaccaactttttgtcttgttgctcttttgtatttttttatttcaatttcacttacgtatgctctgatctttcttatttctttttatctactaatttggtgtttggtttgctcttgcatttctacttctttaggatgcatccattatgttgtttatttgaagtttatctactttttttgatgtagatgcttattgctataaactttcttcttagtactgctttcattgtatcatgtaggttttggcatgttgtgcttccattttcatttgtttcaataaatttttaaatttccttcttaatttcttcattgacccccaggttattcagtagcacattgtgtaatttccatgtatagtttccaaactttgtgtagtttccaaagttcttcttgttattga

SEQ ID NO: 734011 - DNA, 612 bp, Homo sapiens
ggttcaagctttgtaggttgtatgtatccaggaatttatccatttcttctagtctttccaatgtattggcatatagttgctcataatagcctttaatgatccttttaatttctgtggtatcagttgtaatgtctcctttttcatctctgattttatttatttgggtcttcttagtctggttaaaggtttgttgattttgtttacattttgaagaaaccaactttttgtcttgttgctcttttgtatttttttatttcaatttcacttacgtatgctctgatctttcttatttctttttatctactaatttggtgtttggtttgctcttgcatttctacttctttaggatgcatccattatgttgtttatttgaagtttwtctactttttttgatgtagatgcttattgctataaactttcttcttagtactgctttcattgtatcatgtaggttttggcatgttgtgcttccattttcatttgtttcaataaatttttaaatttccttcttaatttcttcattgacccccaggttattcagtagcacattgtgtaatttccatgtatagtttccaaactttgtgtagtttccaaagttcttcttgttattga

SEQ ID NO: 734012 - DNA, 616 bp, Homo sapiens
aattacatacacatcacattttctttattcattggctgaggttacttaagttgattccatatcttgcaattgtgaattgtgctgcagtaaacatatgtgtgcaagtgtctttttatataatcatctcttttcctttgggtagatacccagtagtgggattgcttcatcaaatggtagatctacktttagttatttgagaaatctctatatggttttccatagaggttgttctaatttaccttcccatcagcagtgtataaacaagagttccctttttttttttttttttgccatatctatgccatctattgctttttgactttttaataatggccattccagtaaggataagtgatatctcattgtgagtttaatttgcatttccctgatgataagtgatgttgagcattttttcatatatttgttggccatttgtatatcctcttttgagaaatttctatttatatcatttgcccactttttaatgggatttttttttcttgctgatttgtttgacttccttggagattctggactgatctttgacaaggcacacaaaaacataaactagggaaaggataccctatttagtggatggtgctgggaaaattggata

SEQ ID NO: 734013 - DNA, 616 bp, Homo sapiens
aattacatacacatcacattttctttattcattggctgaggttacttaagttgattccatatcttgcaattgtgaattgtgctgcagtaaacatatgtgtgcaagtgtctttttatataatcatctcttttcctttgggtagatacccagtagtgggattgcttcatcaaatggtagatctacgtttagttatttgagaaatctctatatggttttccatagaggttgttctaatttaccttcccatcagcagtgtataaacaagagttccctttttttttttttttttgccatatctatgccatctattgctttttgactttttaataatggccattccagtraggataagtgatatctcattgtgagtttaatttgcatttccctgatgataagtgatgttgagcattttttcatatatttgttggccatttgtatatcctcttttgagaaatttctatttatatcatttgcccactttttaatgggatttttttttcttgctgatttgtttgacttccttggagattctggactgatctttgacaaggcacacaaaaacataaactagggaaaggataccctatttagtggatggtgctgggaaaattggata

SEQ ID NO: 734014 - DNA, 621 bp, Homo sapiens
ggctgcctctgacaccccagtggagagggggagggggaggaggatctagttatttctaggagggggcggatgtccaggcttcccatgtagtccttactgatattgccagggaaggtagctcattactagcaatctcagatgaaagtctcatctctccccttgkgccttctctgacatcactctggcaagggtgttggagtttcttgctatggtctcttaagggtgaaagtctaggctatctacccaggctttgctggtgtgggtgtgggtgtggatgaggccatgggttttttgttttttaaaatgatgtttggctaaagtagagtggctattgtctaagagttttctgtcttgctagaacactcctttcctggtcctctggctagagagagcaggcatttgttgggagtctgtttgtctgcaccagttgtgttgggtttctggattgctggcttcttcagctacctcatctccttggttcttagtgtgcattatcctttacctggactactgagttgaacccccaacaagtctttcagaccatctctggcttctccaacacatcctgcacacttctgccagtgttttcttcctacaaggcagaactgaccatgtcactct

SEQ ID NO: 734015 - DNA, 511 bp, Homo sapiens
tttctcattcttttagacaactatgtattattccattatatagatagacatccatagtttaaccggttctttacttatgtccagtgaaaatggtttaaatctttccaaactgagcaacaaacagagctgcaataaataactatgacatgtatgttcaagtgctgttgtagagtaagtgccccaaagaagaactgtgggaacaaagtrtgtgtaaattatcaactgagaaaaatattaataacttatcttttaaataattttaccaatttactcctaaaagatatatgagaagcccctgcagcagtgttttcaaacttttgaactttgacaatctgatagatgaagaacgatatctaagtgctatttaatttctgcttctctagatcagaggtcaggaagctttttctttaaagggtgagacagtaaatattttcaggtttgtgagccagtctctgctgtaacaactcaactttgcattgtagcacgagagcagacatagacaatgcacaaa

SEQ ID NO: 734016 - DNA, 620 bp, Homo sapiens
tactacacatgtcccgattttaaaagattatcatcttgtaaaatccccattttatttagctgtttagttctaggaggtatctgagttataaaaggatgacttaaatatgtttctgatttagatccttttgagacatatatctctatatacgtatatttacctatatttttgagacatatatatctatatttaggtctttttgagatgtacatattcacctatctagaagtctatatatctagaaataaatatatctagatatctaggtatctatgtatatatatgtgaggtgtgtgtgtatgtatgtgtatgtgtgtgtgtgtgtgtgtgtgtrtatatatatatatatatatatatatataaaggattttttctctctgtgtgtgtgtgtgtatgtgtagatagatagatagatagatagatacatagatgtaatcatattgctaagatgcccagtttctatttgtagtcttttctcagtaaggcagtaggacattggtgctttcaagggagcttagaaacattgaatatgacattcatgtcattaaaaatagttagctttcttggctacattcataaaaattcccctaatgcttcctttaattggcaggatccacatg

SEQ ID NO: 734017 - DNA, 635 bp, Homo sapiens
atggtaatccttgatgtccaagattattgccagaggccatggcagttgtccaactgagagatgacaggagtttagacattgatgtgacagtggggatggtccagaggaacttgactctgtgtattttgaaagtagagccaaccagatttcctgatggtctgaatgtgaggcataagagaaagagaggggtcacggataacaccaaagttttctctctgagtcgctgaaatgatgcaattgaagtaagctaagatttagggggctgaagatatgcaggctttgtgagaatcagtttggaacattttatgtttgagatagctcttatatatccaggtaagaggtcatgttagactggtgagtttagtctttgggagacaatctggactaaarataataatttgccaattgttggcatataatttgaatttaaagccacaagacttgataaactcacttagaaagtgagttgtagattgagaagagaagaggaggtaggactaactaaactatggggcacttaacagaggtcaagaagaagaggaagagtcaacttgactggacaggaactaacagggagatgtgtgatgtcctgcacatcaaggggatgatggagaatattgaggcagaaggaatgg

SEQ ID NO: 734018 - DNA, 635 bp, Homo sapiens
atggtaatccttgatgtccaagattattgccagaggccatggcagttgtccaactgagagatgacaggagtttagacattgatgtgacagtggggatggtccagaggaacttgactctgtgtattttgaaagtagagccaaccagatttcctgatggtctgaatgtgaggcataagagaaagagaggggtcacggataacaccaaagttttctctctgagtcgctgaaatgatgcaattgaagtaagctaagatttagggggctgaagatatgcaggctttgtgagaatcagtttggaacattttatgtttgagatagctcttatatatccaggtaagaggtcatgttagactggtgagtttagtctttgggagacaatctggactaaaawtaataatttgccaattgttggcatataatttgaatttaaagccacaagacttgataaactcacttagaaagtgagttgtagattgagaagagaagaggaggtaggactaactaaactatggggcacttaacagaggtcaagaagaagaggaagagtcaacttgactggacaggaactaacagggagatgtgtgatgtcctgcacatcaaggggatgatggagaatattgaggcagaaggaatgg

SEQ ID NO: 734019 - DNA, 635 bp, Homo sapiens
atggtaatccttgatgtccaagattattgccagaggccatggcagttgtccaactgagagatgacaggagtttagacattgatgtgacagtggggatggtccagaggaacttgactctgtgtattttgaaagtagagccaaccagatttcctgatggtctgaatgtgaggcataagagaaagagaggggtcacggataacaccaaagttttctctctgagtcgctgaaatgatgcaattgaagtaagctaagatttagggggctgaagatatgcaggctttgtgagaatcagtttggaacattttatgtttgagatagctcttatatatccaggtaagaggtcatgttagactggtgagtttagtctttgggagacaatctggactaaaaataataatttgccaatygttggcatataatttgaatttaaagccacaagacttgataaactcacttagaaagtgagttgtagattgagaagagaagaggaggtaggactaactaaactatggggcacttaacagaggtcaagaagaagaggaagagtcaacttgactggacaggaactaacagggagatgtgtgatgtcctgcacatcaaggggatgatggagaatattgaggcagaaggaatgg

SEQ ID NO: 734020 - DNA, 606 bp, Homo sapiens
tgaacataatttatgacttaattttaacaagtattagatagatgttctcactaagtccatgacccaaagtggtaaagattcctatcagatagcatcaagattcatttaaatttctcattttgtggttcctattctatttttctagtagcactaagggtcaaatataaatgaaatgagaagtgtcttccacattaatggttctttattgatttccttggagcagaaatgtagatttttctaaaccrattggaatgttggaaaaacaaaccacctaaaggaagacaaagaatattacatgtacctataacagcctcaccttaaaaagatgttttcccaatgtatgcaatgaatatgttatatgttatagtattcattcctaagtttatatctttaaatgaaaaatatgttctagggatttcaaactgaccactcacaagctgaatattgtttggcctatacaaagcttaaaataaaaaaaggtacaaaaggcctgaattttcaacttcttttgaaaagtcaaaagaaccagcaacactgtgcccatgtctccctgtgacaataatgggctgatgtcttttttttttttttttttttttgagatggagt

SEQ ID NO: 734021 - DNA, 637 bp, Homo sapiens
agaaagacacaggatccatataaataataaaatattattgaagtacttaaaacaagatctgaatatatttaaagacacaccatctctcctgtgtgaaaatagttaatataaaaccacaagtatcttaaaattaatagataaatataatgcaatcaaccttgagagaagattgacccaaccagatatcagaacatatcataaagccactttaatcaaatgaggatgacattggcatagcaatagagaataatcccaggatataagaacatttaatatatgacaaacacagtagtttcattcaggaaataatatatcctgtttaataaattaaactagcaaagctggctaagaagatagacaaaaatattgcaagaatatatattcaggaaactacataatcaaattaggagcarggggaagctttaaccaagattggaaagccagaagatatttaagaagtaaaaaaagacaacatttgtcatataaagatgttttaaattcaaatgtgacaaaagataaaatcacagccagttgacaaatgattgtttgaaaaattttgtaattcaaatataatatctattgtatacaaagagctcttataaactgacacagaaaatttagtataaaaacaggcgaa

SEQ ID NO: 734022 - DNA, 635 bp, Homo sapiens
ctataataaaggaaagcaacttccatgtggattggaatgagtgttgaagcaacaaacacacagccctcaatcttgagtagttatcaaataaagagagataaaaatttaggatacctggaataggggcttgactggtttctaagataggtggaagkggatgcaaggaaaagatccccagaaagaggaatgagagagagagattaaagatggtgctattcaagaaaaactaacaaggtcattctcctggttgcagcctgcctgggagaagaggggttgaactgacttgaagaaaagatggagtgacagcagctacttctaggcagtgtatctattctgcttaatttatattcattttacactggagctgcctagcttgcatctccacaaattatttcaaaccgtccatagataagctgaagcaaaatagaaaaattgaataatgcaaagatgtaaactgaaagaagagggaggaagctgtagactggatagaaaatgctttggaaaccagaaacccacccaactatttataatattcatgacattggtggcatgcataacagctaagagtcacaatattcagaaaattgtcattctaaaaacatattgcacattaggtgatcttggagaaacacgaa

SEQ ID NO: 734023 - DNA, 635 bp, Homo sapiens
ctataataaaggaaagcaacttccatgtggattggaatgagtgttgaagcaacaaacacacagccctcaatcttgagtagttatcaaataaagagagataaaaatttaggatacctggaataggggcttgactggtttctaagataggtggaagtggatgcaaggaaaagatccccagaaagaggaatgagagagagagattaaagatggtgctaytcaagaaaaactaacaaggtcattctcctggttgcagcctgcctgggagaagaggggttgaactgacttgaagaaaagatggagtgacagcagctacttctaggcagtgtatctattctgcttaatttatattcattttacactggagctgcctagcttgcatctccacaaattatttcaaaccgtccatagataagctgaagcaaaatagaaaaattgaataatgcaaagatgtaaactgaaagaagagggaggaagctgtagactggatagaaaatgctttggaaaccagaaacccacccaactatttataatattcatgacattggtggcatgcataacagctaagagtcacaatattcagaaaattgtcattctaaaaacatattgcacattaggtgatcttggagaaacacgaa

SEQ ID NO: 734024 - DNA, 628 bp, Homo sapiens
tgtgacaattttgtataaaacatgtgatatggttgtcataaaaactaaagtattattgtaatctccttgtgacacaagatgaactgataattactcccttcatttatggtataaccacaaatttgtgtctgtcttgtctgtttctgtatgcactcttgagagctgcctcacagctctcataatttgcagtctaacaaatgaatccccaaaacaaaagaaaccaaaacactgagagatgaattctccaaaatactattttcccctgatatcatatcctactccaaatccttcattggctttcatacccacctgtgttagatatgagctttacaatgccacattgaagatcctccaaaatacgactgtaaattcaattcctttccatttgtgtcttattacacttcaacttgcactgactttcaactgctcttttctaaacatattgcctacatcctcaacattgmttaacatattgctcacttaaaacatcttttcttaattgcctctgaaatctcattcattagaaatactcataattggaagttaaactagtaaataaaaataataaaatcatggtttatatttaaatttttatgcatatacgtggtataaaccattatgtattatt

SEQ ID NO: 734025 - DNA, 587 bp, Homo sapiens
aaatagataatagcagatgatcttacactataatacgaaagtagtttcattacattttgatcatttggtatcagcaatcatgagaaactcaaattctaatataaaatagaatgctacaaatatatccattgtaaacttgtcatcgttaaaaatggaaaagcaaaagcaaaattcccaacacacaaacccacttttatcactaaattttaatatctccatatttggtaataaccattcaacaagtctccagaaagttccaaacttttccacatcttcccgtcttcttctgagccctccaaactcttccaacctctgcccgttacccagtcactttcacattttcaagtatcttgaaatgtgagcagtacctcacattactggtaccaattttctgtattagtctgttctcacaytgctataaagaactgcccaagactgagtaatttataaagaaaagaggtttaattgactcacagttctgcatgactggggaggcctcaggaaacttagaatcatggcagaaggagaagcaaacgtcttcttcacaaggtgatagtggaaagagagagtgtgaagtggggaactgc

SEQ ID NO: 734026 - DNA, 604 bp, Homo sapiens
ttttgactcaaatattgaagcacagaacacttaagtaattctaaataagaggtagagcaagagctccaactcagatatctttgactcccaaacaccaatgttttgtactacaagtgtactgcaaaaaagtacaattatggatcctttgaggcaccattcaaattgaataatttaattgatcattttatatgtaataatcagcataattaaaaataactagtaagaattaccccttgagcatattatatgccwgacattgctaattttctccaaaaaaatctttctttgacggtttacttccaccctgcttttaacgttgtacacattcatttactctgtgaagtagaatacatgaacaatgaataaatatgagtggaagaaagaaatatgtattatttttattagtgattattgagaactataatatttatatgattagttatttagccatatgtattttcagttagagcatgatagtgtattattgttttgtttatcttcccagcaaagaggacatttcactttgcaatgaggatccagacagctcctcagccttgttttccaagaaagacttcatatgatgtcttttatcaatcttctttct

SEQ ID NO: 734027 - DNA, 487 bp, Homo sapiens
ccaagctccaactattatccattacagaaccttgacatactccttatcactctcaccttcttctgtttatcactcagtaaaataaaaataataaaaccacttcatgggttattgagaggatgaaatgaggcaatatttgtggtgggtttagtagattgttcaaaacatcaaatactcagtaaattgtagttattctattactgggattgagatagtttagaaggataaggaatttgagaagagtggagacagtttkaaatgcccttgtgaataagagaggcagttaagtgggaagatataaaataattcttaaaacgcttttaggtctcaggtgagataggagacaatgaatttcttctgacaccaacatccagtgttctgtgattgttttgtgctggctatatcaaagttcctgatacaggagaggatactgggaagtggatcatgtaagcaagaaggtaacatgggtgttcaggattgaaagtac

SEQ ID NO: 734028 - DNA, 487 bp, Homo sapiens
ccaagctccaactattatccattacagaaccttgacatactccttatcactctcaccttcttctgtttatcactcagtaaaataaaaataataaaaccacttcatgggttattgagaggatgaaatgaggcaatatttgtggtgggtttagtagattgttcaaaacatcaaatactcagtaaattgtagttattctattactgggattgagatagtttagaaggataaggaatttgagaagagtggagacagtttgaaatgcccttgtgaataagagaggcagttaagtgggaagatataaaataattcttaaaaygcttttaggtctcaggtgagataggagacaatgaatttcttctgacaccaacatccagtgttctgtgattgttttgtgctggctatatcaaagttcctgatacaggagaggatactgggaagtggatcatgtaagcaagaaggtaacatgggtgttcaggattgaaagtac

SEQ ID NO: 734029 - DNA, 616 bp, Homo sapiens
attcaggctttgagtcatattcactgtattgaaatgtagcatcaagaagagggaacccattcacacacatatatgggtgtgtgtgtatatatacacacccatgcttttataaagggatgcactttttacatatctaaaaataacaaaacaataaagaaaaccaccacagtgtgcttagccctaagaataaatgastagaaagtaatcaaaaactgataaatcactggagataatgtgatgaaggctctgacactatatatcaaaaccacatgaatttgtacttatatgttcatactttcttcacaatatttctcatatactttcatttcaatcacaatgacagttcttgaggttaggtctttttgtgtcatgcctaaattgttcaaacaaccctctaatgtaatctccaagactttgatctcttcccataaaccgagtcttgaacattaccaccagatttatattattgatacaattttgatattatgtcactattttggatagtgtttttcaataatgcattcattagtttaatcatttgttcagtctgccatttgtgatacagaactaagtcttagtgtttgatactaagaatgagaagtgatttccttcaagg

SEQ ID NO: 734030 - DNA, 610 bp, Homo sapiens
ggggtgaggtgatatctcattgtagctttgatttgattttctctgattatcagtgacgttgagtatcttttcatatgcctgtttgtcattcgtatatcttcctttgagaaatatctgttcaaataatttgccaatcttttgattaaattattaaaattttccccatagagttgtttgcatatattcttgttattagttccttgtcagacaggtcatttgcaaatattttctcccattgtgtgggttgtctctttattttgttgatagtttcctttgctgtgcagaagcttttaaacttgatatataatcccatttgtctatttttgcgatggttgcctgtgcttgtaggatactgctcaagaaatttctgtccagatcaatgycctggagattttcctcaatgttttcttatagtacttccatagtttgaggtcttagatttaaagctttaatccattttgattttgttttcataaaaagtaagagatagggacctagtttcactcttctgcctatggatattcagttttcccagtaccgtttattgaaaagactatcttttcctcaaggtatgttcttggcaacgttgtcaaaaatgagttcactctat

SEQ ID NO: 734031 - DNA, 573 bp, Homo sapiens
cattacatagtttatttgcattttccttctttttgatctaggcacttacagctataaacttcccttttagtattacctgtgctgttttggtatattgtttttccattaccatttggttcaagaaattttttccctctgcttttctgaagtagaatgagttttaccccatagccaccacagctggtaatgctgagtttcacttgaagccagcaagtctcagaggctcacccaaggctctcaatgtagtacctgagtattgctgttggttattcagggccccagggctcttcagttagtaggtgatgaatgctgcsaggactgagtacttcccttcaagcaacagattccattctggtccaaggtttgtctagaaatgtcttctgagagctagggcctggactggtccttatgactctgagcagtgccttatcctgctatggctgagctagtacccaagatgcaaaacaaagtccttcccactcttccatctcccctcttcaagcagaaggaaggggtcttttctggagtcatgatctgtgtaacctgtgcttaagggaggggtgatgccagcac

SEQ ID NO: 734032 - DNA, 589 bp, Homo sapiens
gctcactgcaagctccacctcccaggttcacaccattttcctgcctcagcctcccaagtagctgggactacaggcacccaccaccacgcccgctaatgtttttgtatttatagtagagacaaggtttcaccttgttagccacagtggtctggagctcctgacctcgtgatcctcctgcctcagcctcccaaagtgctggaattacaggcatgagccacggcacccggatgaaaagctgaaaattctaaaaaccagagtgcctcttctcctccaaaggatygcaactccttgccagcagcagagcaaagctggacggataatgactttgacgagttgacaggagtaggcttcagaaagtcagtaataacaaacttctctgagctaaagggggaggttcaaatccatagcaaggaagctaaaaccttgaaaaaagattagacgaatggctaactagaataaatagtgtagagaataccttaaatgacctgatggagcagaaaaccatggcacgagaactaggtgatgcatacacaagcttcagtagtcgattcaatcaagtggaagaaagggtatcagtgattgaagatca

SEQ ID NO: 734033 - DNA, 706 bp, Homo sapiens
gtcaattattcaacagtaatgaatactaaatgctggaaagtatcattttttgttccacattttgaatactcctaaaatatctctcttgtttgtattcactatcttaaccctttgaaataatttaggaattgagtatctcctctttatcttttacatttraatatcttcacactttttaaaacaattttttacacgttttgaaatgttaatcatcagaattcctcttactgtgctccagaaatagttcagacctacctggcatcccatctatacttgagtcctaaactaaaaactgaggtaaacacccttccccagccacaccgaatgataagaaaagaacattctatatagataacttctgtcctttgtccaagaagcttaatttgcatggccagtacaagagaggtgttttgtggataccttggcactttctagggtagatactcatgatctctgtgttgcttattccgtacccacttggactgccatcaacttaaaataacatagaaaaaattggctactgaatccctttatctgggtcattccaaattcagccacatcaatccagacaggatgattgcatccaaagcaaacctacttgttcaacaatctatgatgtgagttttggatctctagtaaaaatacatttacagatgctccttgacttacgatagggttatgtccggataaacccattgtaacctga

SEQ ID NO: 734034 - DNA, 560 bp, Homo sapiens
aggaaccctgtgattatgctgagcttattcctattttaagcttagctggttggcaaccttaattccacttgatcatgtaaaataacacattcacaggttgtagattaggacgtaaacatttttgggctgttatactgcttactacaggctttcaaaaaataaaaaatgcaaaagacttttcaagttccaaatttccctactgcttggcccctgcccaactctcaatctccatcgcagacagccctctccctttgctcactgggctctggtcacactaacctttagtgacattctgatccaaacaagtgtcatctggcagaggacctttgcccttgctgttcttttgtgtgaaragttctgtcaccagacactcacatgcctggcttattcttgtcatttagtccatttccccaagtgaggcttgggagacttttctgcccaccccagataaaacagttccaactactacactcttataaattattatggtttattcccttcatagaacttatcaccagctgaattgccttatttgttttcttgtctaatgtctttttaac

SEQ ID NO: 734035 - DNA, 590 bp, Homo sapiens
gtgctgaaatgttacactgatgatagtgaaaactaatcatacttgaaaaggttaaaatgcagaccccacacacattcatctaaaatgcaggttttattataaaatgagtccttaatagattacactttactaaaatatgtgattttcattatttttaaaaattttgttctggaacatattttgaaaagaatagcaaattgtaatagctacaaaactaattgttgttttattttggggaggggattgatggaattatgtaatgtttgaattgaataactttgattttgttttacaaagtttgcaaatgctgacagaaatatcctgacaaatagaatttataatattatgttttaagtacacaacattgtcatggagcggagagatcggggccacctgcatagagccttatctatgactaagagggagtggttgcagtgaagtyaaataaatgaaaaaaaataagtgagggttgtgaagtggttgggtcaaattggggaaccctttgaaaccagataaaacttaatattatgcttcattctgtgcataatattgttagtaaacagtgagaaaaaatgtcaaaaatgtctgct

SEQ ID NO: 734036 - DNA, 649 bp, Homo sapiens
caatccctcacttcctggcattgttctccgaagatgaagcttagggtgactagatgttatcagtcttgcattattaattaacaaatacataatttgtattaaattttagtcattaggtttttttttgtccccacaaactctagcctgatgttgggcacctcaattcttgcatcaacttttgtttggatttgttgattggctggttttaattagtcttgccaccacgtactatgataaaccagttttttttaatatagtatctgtctcttctcttttccactatagattgtcaccactataacaacttgatgagtcagtggcctcaaagtttttagttccttatctctttttgmcaaaaagtaaaaaaaaaaaaaaaaaaagatataaaactaagaatcctctgtgtgtatgtatttgatttcatccatcagttcatgtctcaatatgatgtcactttgctggagccttccatggctctcagtgtcactttcagttttctctctgaaggggacaacctagagaagcagctaactgtactgtaattgccctcgtataactccttttcccggattcacagacatgttcggaagagtagatttggaactttatttcacaggtatagcatgtacagtctttgaactcctgaatt

SEQ ID NO: 734037 - DNA, 548 bp, Homo sapiens
ttatagaatgaaaaaatcctataatataaaacaataatgtaataaaatatggttaaataagttttaattttggaaaacaataaaagcagactctttatctgcaatatattttactgaatctgacgaaaaagacagttaatttgggtatagatgcctaccctttrctgggaagattaaatgaagtaaagtctgagacaagtgtcatgtcttgttaataaaatagaggttaatcttcttactttttggtttctctacttctccttcctccagtaaacttgatatgtactcttagctctgacttaaagaactgatcactactatgattctctcttttggattcatgttacctctgtactactctgagcagtaagaaaaaggagatagccactctatgtgtggccgctctcattctctcattttccatcttctgctttgctcctccaatccgatgtaaatgtgggtgacaatagccaaagcataaataggtattcccttcattcttcatgccctttggagtaaggtcatactctctttgagagttctctgac

SEQ ID NO: 734038 - DNA, 619 bp, Homo sapiens
tcatagtacctaacttatgcattgatctgcttaagcttaaataaacaatgtgttcacaatataagcatttattagtacatcatatagaaagaagtgttataatgcagattagagtgacgtagatagcaatgtataaagacaaacattattttctctgattctaaaaaggaattgaaaaatatctgagatatcaattggtatgaaaaataaagctcgatgtttgaagtaagcaattattttagaaattcttaaaataatagaaaaaatattttgaattctataaaagtcatgttagtgcttttagtatttcatatgttatgttgaacctacttattttaggtgactatatcattacaaagytgtagttcagttttcagtttctgatttctattagtttgtaaaaggattttacatttgcatttaaataggaagaaaatgtgataaagatttcaattaaaaggctgtctgggttaattcatttttaataggaacagtaaatatttttcagttgatatagttcttactgcaagatcagtacatagttcttttttatctagttatgtcaggtggtgctcaataatgaacacaataatgtcagcctttgctctttaaggaacat

SEQ ID NO: 734039 - DNA, 624 bp, Homo sapiens
ttacatccttattctttatatttaaaacatgattaatatttctataattcttttccataaaaaggaaaacataaattctcactctacatagttaatcaaattcccattccccgcttccgtagcattttatctatcctaaagaaccaatctacaggctgtttcctcacccaaaagcactactaggaattcttatatttatgtatggcttcattcaccatgcaacaatcattgttgcatcgattttctgtagtaatctactaactggttgcagtctatgttttcagctcattttgcataaaaagaaactgaggttcagaaaggttaggtgagccaatggctartaataaaaaatgatgtcagtagatgtttactgaatcatatcagatgttttttccccaaaccttatttgaagcaaatttttttgtttgtttgtttgttttttattgtggcactgagagtgtccccggatttacgtttatcatttcagatatcagattcactgaaacttctaaaagtttcacaatgttattaattattataacataatatagaagagctttatgttcataagatttacaaagtgttttttttgttttccaaaatgtttttatgagcatattagtt

SEQ ID NO: 734040 - DNA, 624 bp, Homo sapiens
ttacatccttattctttatatttaaaacatgattaatatttctataattcttttccataaaaaggaaaacataaattctcactctacatagttaatcaaattcccattccccgcttccgtagcattttatctatcctaaagaaccaatctacaggctgtttcctcacccaaaagcactactaggaattcttatatttatgtatggcttcattcaccatgcaacaatcattgttgcatcgattttctgtagtaatctactaactggttgcagtctatgttttcagctcattttgcataaaaagaaactgaggttcagaaaggttaggtgagccaatggctaataatraaaaatgatgtcagtagatgtttactgaatcatatcagatgttttttccccaaaccttatttgaagcaaatttttttgtttgtttgtttgttttttattgtggcactgagagtgtccccggatttacgtttatcatttcagatatcagattcactgaaacttctaaaagtttcacaatgttattaattattataacataatatagaagagctttatgttcataagatttacaaagtgttttttttgttttccaaaatgtttttatgagcatattagtt

SEQ ID NO: 734041 - DNA, 624 bp, Homo sapiens
ttacatccttattctttatatttaaaacatgattaatatttctataattcttttccataaaaaggaaaacataaattctcactctacatagttaatcaaattcccattccccgcttccgtagcattttatctatcctaaagaaccaatctacaggctgtttcctcacccaaaagcactactaggaattcttatatttatgtatggcttcattcaccatgcaacaatcattgttgcatcgattttctgtagtaatctactaactggttgcagtctatgttttcagctcattttgcataaaaagaaactgaggttcagaaaggttaggtgagccaatggctaataataaaaaatgatgtcagtagatgtttactgaatcatatcagatgttttttccccaaaccttatttgaagcaaatttttttgtytgtttgtttgttttttattgtggcactgagagtgtccccggatttacgtttatcatttcagatatcagattcactgaaacttctaaaagtttcacaatgttattaattattataacataatatagaagagctttatgttcataagatttacaaagtgttttttttgttttccaaaatgtttttatgagcatattagtt

SEQ ID NO: 734042 - DNA, 647 bp, Homo sapiens
taacatctgcaacatccctattcccaaataaggtcacatttcgaggtacttggtgttagaatctcaatgtgtgaatttcgacaggacacgattcaacccttaacaatagaacatgggaatcggtaccttctttgctgaaatgttctttcagttatccagatttgcacctctgcaaaccttttgtgtacctttgtgaccaacattcatgctatgacattacagatttctcttctactataggcatgttttatacttggtagtgttttttgctttatacacttcaattttctctgcagaagtgtgcataactctttaaattactcaatctaataatcgtttcccctacaaaactttaaaatagatggtggtagctctatgtgatgaaagtatatattcccctcactgttcactcagtgtttataatgacscttcgttcaccttttgaactgcccttttttataatcactggagaataggtatgtgtttcatcatcaagagagttcagcaaaaaaaaggaagccagtgggtgggactcttacaggatctggctggtgaagtacaaactaatttccttcactttttctgagcactgtcaattttttattaacttttagtataaatttatttttactataaagttattaaaa

SEQ ID NO: 734043 - DNA, 578 bp, Homo sapiens
catggagagatgaaatgttgatgaatatcaagtagaacagaagttaactgcgtggactgaactaatagaagaatgaagtaaccttttttgactttttgcttaaaatgttgctgatcctttgttttgtttttcagagttaaagagacttttctttagaactgtttacagcttttaacaattgagtaaagaatacctgtgaacacaatttggagcatatttgtttctctctacctgatttatccagaatttaaaaactatttgttgagtattcttaatttatggcaatatagttayctgcataagtgcaataagaattcgttttcttttgtaacaagacacaattggagatactggttattttaccaaggctttgactggaatggtgtactttcctttaaggaatcaaacttgacttataaagccaataaaagccccttgggaaaactggcctcataccttgtctacacagtccctgtacagggtttctgacctgtggtgagtaaagaatatcactttcttacagtcccagggtccccaagttatcttgggacttcaagaggagaggaattcacccaact

SEQ ID NO: 734044 - DNA, 544 bp, Homo sapiens
tctggcaggcaggagtggggggtcacaaggtgctcagtaggggagcttttgagccaggatgagccaggagaaggaatttcacaagataatgccatcagttaaggcagtaacaggccattttcatttcttttgtggtggaatgtcatcagttaaggcaggaaccggccatctggatgtgtacgtgcaggtcataggggatatgatggcttagcttgggctcagaggcttgacattaacggtttgtgttctgaactttcctcagtgtttagaaaaccaatactgaccgtcacacccaggcctccctggtgccttcctgaaagctagctgggcgtttctggcaccctgtctcrggcagtctccccaaaccagcaggactacacatttggacagactcccaaagagagagagagagagattcttgggacttaaactcaaatcaatttaggccaggggatgggtgtgactcatcccactgcctgctgggttaaccagaactggatggtcaacccttttaattcatcctgtgtggatgtttattcaagtg

SEQ ID NO: 734045 - DNA, 541 bp, Homo sapiens
gtgacccagaacttgcactaggaaagctatcaggtttgtaccaaacaccagggtcgttggcaaaagtttgcttcattaaattcggctttgtgggttttatgcttttaatccaggctctcagctctgtctgtcagccttacctgtatcatattaaacttaacagggtcaatatgatgcaaagaggtggcacctggaaagtggtgtatcagtgactccgctttcaatccaatcatcctcccattatgtcttgtcatctttcaactccagtggtcctgaggcttcttccaggcacctccactcgagattattcctggatatgtgctcacccccatgtggcccrtgctccataatgatgggtcccatctcgatctctataaatttccttttctgttgaagcactaatgaaaagataatttcataaatggttatgggaatggcttacttggttctcggttgctttttatcttttcctaattactttgcattttagtaagagccttccagaaacagagcctaaataaaccagggttgtaatggtgga

SEQ ID NO: 734046 - DNA, 621 bp, Homo sapiens
cttctctctaagcactgcattagctgcgtatcatgagttttggtatgttgcatttttgtttacattcatctctaaatattcacttagagaatatgtcttgtaatttcttctttgatcaattggttatttaggaatgtattaattaatttccatatatttgtgaatttcccaggttttattctgtgttttatttctaattttattttattgtggtcagggcacatgttttgtataacttcaatcttttaaaatttattgtttttatargcagacatatggtctaccctggagaggtttcattgtgcacttgagaagaatatgtattctgctgttgttgggtggatcattctatagaggtctgttaaaacaaaaactttagataaattaaatttagcagagttttttgagcaaagaacaattcatgaattaggcagcactcacaacaagaagaggttcagaaagctctacctaacagcctgagcagtgagattttataggctaaatgtggaaccaaagtagaaagatcacttaattggttacatgtagacatacgccttatttgggcacggtgtgatcagttaactgatttgctgaagcttggctgcttgtgatggctgaaac

SEQ ID NO: 734047 - DNA, 633 bp, Homo sapiens
tttatagctgtttttgccagtcagtatgggtgctgaaggagaaagacctgcaggtctgaagttctgaacttgaggaaggagttcagactcttgaaagtaaccactctttttcttcttcttcttctttttttttttttaaagtgccagatcctatgggatatagtacacaggtcctctttgaggaatgcacagttattctggtttaatcgttttattcctttcacatcatcaccaaaacaaaactctcttcctgattatttgttcatgagaatacatagtggcacaatgttacatccaataccatcttacttatgtgttcttaggcacagacattacagcaacaaaaggtcaaatcatagcatctcagatttggaawaatcattaggtaggtacttgtggctcataaaacactttctcctttgttatgtagtacaattcttacatggaatcagtgttttatggattaggaatttgagccatagagagaaggtcatttattctatcagaaaatatccactgagcatcctctttgggaccagtattattctaggtgctggggatctggtgtaaccagaagacaggaactccctgccttcctggaacgtattcataagtaaggcattctggaaactg

SEQ ID NO: 734048 - DNA, 602 bp, Homo sapiens
aaggaatgaagagttctgtaatatctattaggtctgcttggtccagagctgggttcaagtcctgaatatcctggttaattttctgtcttgttgatctaatattgacagtggggtgttaaagtctcccattattattgtgtgggagtctaagtctcttcgtagatctctaagaacttgttttatgaatctgggtgctcctgtattgggtgcatatatatttatgatagttagcttttcttgttgcattgatccctttaccattatgtaacgcccttctttgtcrtttttgatctttgttggtttaaaatctgtttcatcagagactaggattacagcccctgctttttttgctttcctcttgcttggtaaatattcctctatccctttattttgagtctatgtgtgtctttgcatgtaagatgggtctcctgaatacagcacactgatgggtcttgactctttgtcagtttgtgtcttttaactggggcatttagcccatttacacttaaggtttatattgttatgtgtgaatttgatcctgtcatcatgatgctagctggttattttccacgttagttgatgcagtttctttatagtgtcat

SEQ ID NO: 734049 - DNA, 584 bp, Homo sapiens
tcatttgtcccacagggtgctctcttaatgtggtgcttttccctttcccctagagatggggcttcctgagagccagactgcagcaactgctattgctcttttgggtctaatcactcagtggagctacccagctctaggctggtgcttgggagtatctgcaaagagtcttgtgatgtgatgtgtcttcaggtttctcagccgtggctaccagcacgtactctggcggaagtatcaggggcacaaagtggactctgtaagtgtccttggttgtagttttgtttagtgcactggttttcttggatgctggttgtgctagcagtgaagttgtcatgtggacagacccaggatctctggttagccaggatgttataggccatggaattagctattgttttctcctttgttgaagtgggttattgttttatataaattgctstaatggcttaagttggttggccccaagccaggaggtggcacactaaacaaaactatacctcacagcaccacaagtgatggaacccactaaactgtagtttcttcattggtaagatgatatcattactcacatgtagaactgttgcgag

SEQ ID NO: 734050 - DNA, 593 bp, Homo sapiens
taagtctgttttattttctcttttttttgtgtttttgttttgaaaattaacctaccctggacttcagttaggatctctctagttatatgaacttatgtttattaaatctgatcattagaatcctaggaaatactaccctcctgcttggcttacgtactattttgtagcttcagaaaacaggccatgtggtgtaaggtaatatatatcaacttggaggaaaacaaacctggattcagattctgactctgccacttttgactctgtgaccttcagcaagttacttgacctcatttagctggcagttacagatgtaaaaatgaggacaygggattgaccacattctctaagggtggtaatacggcccagtggttaaaaacttatctttgtgatcaggtagacctggatttgatcaacctcttccatttcataactgtgaaatcttgagaattttatttaatctttataggcttgcttattatctcaaacaaattaaattttaaagtgaaagtaactaccttataggattgctgtgctggtaaactcgtaaggttgcttagagggttgcttttaatccttggaggattaaaagtcat

SEQ ID NO: 734051 - DNA, 594 bp, Homo sapiens
agagggttgcttttaatccttggaggattaaaagtcatatgcaagtgcctgataaagaccagttcatattggctgagatctcttaccctaaaaatattatgtaccattctaaggtccttgataaagattcaaatcatagaacattgaatgggtttcagattacctaatctaaatttctgattttatacataaaaaacactccatggagagactaagtgamatgctccaaatcccacgccaatatctcacacttgagtctttactataacagtaagtatacgtggcacattcaacaaatatgctgttcattccaagaaattccatatagagtatttcacctccaaatcagtgaactcaccaaaacattcttcttgtatgggaacaaagaggtccttgtgatcacaatattctccttcctacctaaaatagcaaactttccatgagtaaccaatgaaatagacaaaaagaagagttaagacatttagcaagacagagtgctttgtctagtctgaatccacctctgcctttcagtaagtgaaaaaaaagtatccgcagaccactcatcagaggtgtggtgaaatttttatgttgaat

SEQ ID NO: 734052 - DNA, 607 bp, Homo sapiens
gttgggtaaagaaaatgtgttatgtacatacaatggaatattattcagccttacaagagaaggagaaggccggcacggtggcttttgcctgtaatcccaacactttgggaggctgaggcaggcggaccacctgaggtcaggagtttgagactagcctggccaaaatggtgaaaccctgtctctactaaaagcacaaaaattagctkggcgtggtggcgggcacctgtaatcccagctactcgggatgctgaggcagagaattgcttgaacccaagaggcggaggttgtagtcagccgagatggagccactgcactccagcctgggcaacaacagctagaagagagaaggagatcctgccacttgtgacaacatggatgaatctggaaaatgtaatgctaagtcaaataagccagtcacggagggacaaataccgtgtgattccactcataggaggtatctaaagtagtcagactcatggaaggagagaatagaattgtggttgccaggcactgggaggagggaaatgaggagttattaatgaacaggtataaaatttcagcgatgggggtgggtagggcatgaggaaatacagtcaaaaaatgcaaa

SEQ ID NO: 734053 - DNA, 607 bp, Homo sapiens
gttgggtaaagaaaatgtgttatgtacatacaatggaatattattcagccttacaagagaaggagaaggccggcacggtggcttttgcctgtaatcccaacactttgggaggctgaggcaggcggaccacctgaggtcaggagtttgagactagcctggccaaaatggtgaaaccctgtctctactaaaagcacaaaaattagctgggcgtggtggcgggcacctgtaatcccagctactcgggatgctgaggcagagaattgcttgaacccaagaggcggaggttgtagtcagccgagatggagccactgcactccagcctgggcaacaacagctagaagagagaaggagatcctgccacttgtgacaacatggatgaatctggaaaatgtaatgctaagtcaaataagccagtcacggagggacaaatacygtgtgattccactcataggaggtatctaaagtagtcagactcatggaaggagagaatagaattgtggttgccaggcactgggaggagggaaatgaggagttattaatgaacaggtataaaatttcagcgatgggggtgggtagggcatgaggaaatacagtcaaaaaatgcaaa

SEQ ID NO: 734054 - DNA, 463 bp, Homo sapiens
cttgggatgatgaagacctgacccttgacttgccaatagctaacttacgggggagttgggagaattgctgtgctttggcatggatgcccctgacttctgatccgagctcctccacctgctagctgagggatattggacagttctggactgattctgtatctatgaaatggggatgattcctgtcacgctgttgctgtaaaaaacaaaatatagaaacacggaatgctgttcttggcatggagatttcaaactattgttcagtgaacacctactatgtgctgacatcccaatgctacttgaatcttyttattttcagcatttggtcagagctcatgtcccatttttaagatgatttgttctacaaaatcatagaatgtttgacttttaaagcttcttatagcccctcttgcccagtgatttttggacttttgttttagtaacgtaaaccccttttccaaagggc

SEQ ID NO: 734055 - DNA, 618 bp, Homo sapiens
acaaaaaaaaaacaggtattactggctgccccctttggaaacagtacaccaaatttactgtgcctgattctaagaatagaaaattgaaggatgccttagagaagaaatagagacattttaaaataatgacaactttggaaaatagcacccagaatcccgtggcttaactttgttcastacaaccccaaattattgatttatgattttttgaccctgagaaaagatgcagatgcagagaaaagatgtagaaatccctccccttcccctctcctcctgggagccacatagggtatgaaagtggtagagatcctttctgctgagccaatagtcgtctttaaaactctgggatccccttccttacaccttatacaaaaatcaattcaagatggattaaagacttaaacgttaaacctaaaactataaaaaccctagaagaaaacctaggcattaccattcaggacataggcatgggcaaggacttcatgtctaaaacaccaaaagcaatggcaaccaaagccaaaattgacaaatgggatctaattaaactaaagagcttctgcacagcaaaagaaactaccatcggagtgaacaggcagcctacaaaatgggagaaaattt

SEQ ID NO: 734056 - DNA, 621 bp, Homo sapiens
tgttaggctatttcatgttgcacgaacatcagagagagcacttacagaccttcatggtgtagtgtatttcttctaggctacaaacctgtacagcaacgttaatgtactgaatactgtaggcaactgtaacataatgtaagaatttgtacatttaatgatctatacatacaaaaggtacagtaaaaatactctattataatcctatgggaccacctttatgtatgcagtccatgaccaaaacatccttatgaggtgcatgactacggttttactaaagcttgaagaaaagcctccagggtcataatattctaaaatacttcttcacctggaackgcaggtggccatcttgcaccttgaagggagagaggagcctgatggagaaaagcagactccagaagcaaagagaaaagaaaagaatctggctgtatctatgtcactaaattcagctctgccagaggtcaggccactccccaactcttccaatacatgaaacaataaattctcagtttttgctttcaaaaaaaacaaaagcacttcttcaaaacaacatctgattttcttccctgcaaatctctcactgaaagaacagctgacattagaaatcaactaaccagcatttct

SEQ ID NO: 734057 - DNA, 562 bp, Homo sapiens
ttttcacaaaaagtcaggccctaaaaatggcattagagaaaggaatatgcccactccaagagattcaatggtacatcatttcatttaagtctcaaaataagcaatgcatttagactcagcaccaacagtcccatcacttttwtttacacccagaaaagttgagactcagaaaagttaatttgcccaaagtcacacaacagatagaggaaataaaagaactcagatctgagttcagatttctcatgtaagtgctcttttcactatacctaatgcacttctatactgcaattaattgttctgctgcccatcagtcagaatttcctgcttatccaaaactgtccattttacaaagcaaaaagagtaggccccaaatttccaaaccatctgaatagtttcttcttgatactttcagaagcactaaaaaacatcaaggtttctcatggaaccaagtcagcaaaaaataagcactgtacttaacagacctctagtttgaagattttaaaagggacatctgctattgcttaaccaccacccacctaatccctttagagctctacatcta

SEQ ID NO: 734058 - DNA, 557 bp, Homo sapiens
acttggtatatgacagataatatttattgaataaatgaatgagcatttgatactcatacataccaattagaaaagatcaatgcctagcacagtgcctggcaaactgtaagtactcaagaaatagctgctgaatgaataaatctaataaaattacgcataaaggacaggaattagcaatcactttttaaaaaggcaaataaatggctaataaatgttcttaaaatgctcaaacaagatcgtaatttggaggaaaaaaagaaaagaaaatcaaaaccacactatactattttttacttcttattagactagaaaagaaatgtaaagataatgtatcagttcccccaaacagattgttgcaaatgtatgaataaatgctctttttccttttgtgctcctacaacaaaacayctgacactgggtaatttataaagaacagaaaagtatttctcacatttctgagactaagaagtccaagtcaaggtgccagcaggtctgttgtctggtgagggttccagctctgcctccaagaaggcaccttgaatgctgtgtcctctgga

SEQ ID NO: 734059 - DNA, 612 bp, Homo sapiens
gcattccttaggttgaacttaaagaaggattaaaatgaaagaacattttttaaaggaatttctatagaaaatgcagaaaaatagcagagccaattagatcaatttcccttcccaaactttgttttaaatcctttgtatttcaatttttaattagttttaaaaattgatggccgggtgcggtggctcacgcctgtaatcccagcactttgggaggccgaggcgggctgatcacgaggtcaggagatcgagacsatcctggctaacacggtgaaaccccacctctactaaaaatacaaaaaattagctgggcgtggtggcaggcacctgtagtcccagctactggggaggctgaggcaggagaatggcgtgaacccgggaggcggagcttgcagtgagcccagatggcgccactgcactccagcctgggtgacagcgagactctgtctccaaaaaaaaaaaaaaaaaaaaaaaaattgattacagctgaacaacagaaagtaaaataatacaaataaaaccaaataccaattgtttaaaacattcagtttttttttaagggaagttttttttcttcaaaaaaggtttgcatggaaaattgtaagtaaatgtttg

SEQ ID NO: 734060 - DNA, 591 bp, Homo sapiens
tatgtggagttggaaacaatacactccccactgctggttaatttacatcagatacagccaggcccaggaagcaaagtgcctgtcgttttcaccccttttttcttctcccttgcttgctcatgccccctcaccccttttaatttaaattactcgttttaacttaaaaacttctggatgttttattaccttggcagctttttctctggattgactaaaaaggtaagtttaaacagtttttgtcagttaatatctcttcttttttttatatttgtatctgacaaccagaatccatagtgttaaaactgcaatgatgatgctgctgcattttaccaggctaactcaggttgggcacaatttcattgtttttttgtaacctaaacatacaaaaaacaaaaatgttactttgcatgcagttaaattggttgttctctaatcatctctatctctayaatctttatgtgctcctaagggatataaaaagattttatgttaggttttgttgttttcattctttatttttttaaccataaaatattacacatgcagatacagtaagtcattgtttccttgcctatatatttatagaaaatt

SEQ ID NO: 734061 - DNA, 496 bp, Homo sapiens
gttttatattctcactctttgttccattcacgtttgattatatattcatctgagtgaggtggtggcagttggtagtaggagaaagagaatgcttctttctatatatattcagaaatagtttattaattaattttattgcacaagcatttgctaagtacccactacagacatgacaatgaaacagtaattaaaaattctgatcccacatccccaactattgaacttattccagacattcttaaccagtcctaaactcaacaacatagtgtttctaatttgtaatccaaaacttctgctatttgcaggctcagttaatcttagcgccattcaccaatgtcactcaattaaaaaccaaatgtrtaattattttgatatcttgtcttttatctaatatatgaagtccctaaacttattgatgttacttcttatacatttttcaaacttgcaccctgtctttctctattatcccttgataaccatggaatctcctttatag

SEQ ID NO: 734062 - DNA, 548 bp, Homo sapiens
tggattgatagacagatggacagacagatggatggatggatagatcgatcgattgatcgatcaatagatagacacatacatttctgattaaggggttcaaacttcatggtgcgtatgctcgactaacctatgaatttatcaagcctgaagactggtaggaacttcagagttcatttagtgcagttcttctcaaatttagtatgcgttaaaatcttctggagctggataaataaactgtggtacatccagacagtggaatattattcatggcaaaaaagaaatgasctctcaaaccatgaaaagccttggaggaaacttaaatgcatactaacaagtgaaagaagccagtctgaaaagtctacgctgtatgattctaactacgtgacattctgaaaaggcaaaattatggaaggtagtaaaaagatccatagttttcaggggctaggggagaggaagggagaataggagagggacagagcatctttcgtgcagtaaaactattctgtatgatactacaatggtggatgcacatcattataaatttatcc

SEQ ID NO: 734063 - DNA, 565 bp, Homo sapiens
cctataaataaaggaacaagaaggggctggaattagcttacagcttgtttacaacctcccttggaaggatgtggcataacagacccaagcatcaggagctgggataatgaggaaaacaactgaggtttgaaacagtgtcccacttctcgtattcctgtgtggtgtgtgctacgctgacaaagagtggggattttctgattttgtctgccacgctgacctttaccatgtttatttttcagttggtttggggaaggcgtttgaactctgtggtatgarcaagttcactcctcctccactttccttttttctcccctcttgcccaaaacggtttgctgagtgacaaataaacacaagttgtttttacaggtgtaaaaccaacagatcaaatgctggcctgtgcctgggcttgtgaatggggactgtgttatgtttggagaataccaccgcatcatttacacttgcaaaccctttgtaatcttaatctctttgttgcttttatgttatactggccccccaaggttaaagaaagagatttagaccttaaacacaaatccagccttcaagc

SEQ ID NO: 734064 - DNA, 612 bp, Homo sapiens
tctttatttatttacctgtttactgtctgttttccacaggagaacgtgggcaccatcacagtggaggacttgtcttgtttcttgctgtgttatttgcatctggcatatagttaaaaatcacctggtgtatagtagatgctaaactaatgcctattgaataaatgcgagarggaacaaaattaggaccatctgaatgaccttaggtaaatcacttttattgatgtcagggtaagattattggctccccaacagctaatgcttattccaggttctatttttcctaaatgagaggcatttgtgtagccacagtcattgtctatgatccaggcacaggcttagtgtgtgtttaatgcccatgagttccacgggttccatgtgaatcctgaaggcatccgcttggctgggtttctgcattgtttggctcgagtgttctagtcatggaacttgaacagtagaagataaattgagaatgctgtggacatttgaggatgtgagtgccaagagatcacaagggaatttagttaaggctcctgtccagggtaagatgacttcacagagcagacagagtgaattctcagccagccagtggctctgtggagagtatgtgctgag

SEQ ID NO: 734065 - DNA, 612 bp, Homo sapiens
tctttatttatttacctgtttactgtctgttttccacaggagaacgtgggcaccatcacagtggaggacttgtcttgtttcttgctgtgttatttgcatctggcatatagttaaaaatcacctggtgtatagtagatgctaaactaatgcctattgaataaatgcgagaaggaacaaaattaggaccatctgaatgaccttaggtaaatcacttttattgatgtcagggtaagattattggctccccaacagctaatgcttattccaggttctatttttcctaaatgagaggcatttgtgtagccacagtcattgtctatgatccaggcacaggcttagtgtgtgtttaatgcccatgagttccacgggttccatgtgaatcctgaargcatccgcttggctgggtttctgcattgtttggctcgagtgttctagtcatggaacttgaacagtagaagataaattgagaatgctgtggacatttgaggatgtgagtgccaagagatcacaagggaatttagttaaggctcctgtccagggtaagatgacttcacagagcagacagagtgaattctcagccagccagtggctctgtggagagtatgtgctgag

SEQ ID NO: 734066 - DNA, 509 bp, Homo sapiens
tccgtctcaaaaataaaataaaataataaaaatagaatcttaaaaattgcccgtccttctgaggcctcctgcacagtcatagcgccctgtggccccgcggccaagcgggaggagcaggcaggggaggttgcttccaggacgccaggacactggctgcaggtggagagaaacaggaggggcggctgtggtgagccggggctggcatccacctcctggcgacgcgacctaccagggaccttgccaaggggcctcagtcagmcttctgttgatgacacgctgaggtcaggaccagggccacagcctgtgtctgacaagaagcagtttccagttatttggtgaatcagtgctgggggcctggcctgaggggtccagggagtcacacctgactccatgtccctctttcccacaaagtaggagagcgccatgggtcacctgcccgaaaaggcaggtccatcctctgcctgcagtcagaactcagggggatccctgaggccggcagcagagccacg

SEQ ID NO: 734067 - DNA, 543 bp, Homo sapiens
taataaaaatagaatcttaaaaattgcccgtccttctgaggcctcctgcacagtcatagcgccctgtggccccgcggccaagcgggaggagcaggcaggggaggttgcttccaggacgccaggacactggctgcaggtggagagaaacaggaggggcggctgtggtgagccggggctggcatccacctcctggcgacgcgacctaccagggaccttgccaaggggcctcagtcagccttctgttgatgacaygctgaggtcaggaccagggccacagcctgtgtctgacaagaagcagtttccagttatttggtgaatcagtgctgggggcctggcctgaggggtccagggagtcacacctgactccatgtccctctttcccacaaagtaggagagcgccatgggtcacctgcccgaaaaggcaggtccatcctctgcctgcagtcagaactcagggggatccctgaggccggcagcagagccacgaggacgcagtggcctggcggcgggtggggcagcgcgggagctgctttccaggccaga

SEQ ID NO: 734068 - DNA, 634 bp, Homo sapiens
ctcagctacaagcaacagcatctgagcacaaaccatttgttgagaaatacctcttagcatgccctctagtttcttggaatacatgtgaagagctggtttgagtaaggtaaagaggggtgccctcactaatgggaccccaaaaactaaactgacaagcttttgcaatcttcagaaactcacaataaggtacatttcatcttaactaaggtaagacacactttggcaaaatcattttcctaactgttttcaaatacatcaagtaaaaacacaagtcagcaattatggaccccccaggtaatcacatactttgccacacaattacaacacactacttagaagctgtgaaaacacaggcgactaatctaagcatcaacttccaactgcaggactcagtctctttgtaagttatgttcaattctgtttacagaatcaratctgaatgttcagccaggagcgactttccatcttctgaaggccctctaaggcgccctgcacatgacttgtccttgcctaccttcatccctgacgacctttgaatggggccaccgctctcacccctctcagttattcaaaaacgaagcacggtcatgaaatgtcctagtcctaaaagtctctatgacaacttttattccta

SEQ ID NO: 734069 - DNA, 629 bp, Homo sapiens
agtcctaaaagtctctatgacaacttttattcctacttagccagaactcactgatggggtaacataaccgtttctcattctccctgaggtaaacaggaacacgagcccacacacgtcacgctgaggataacaccagaaccagagggaaaagggggacgccctaacccaggaggaagaatacactcctggctgcccccaccacaggtggttacaaacctcccccttagtgatctcattcatgtgcgggaaggccsctactgaaactcactaagcttggcaggttcctgggtcgattcaagtaaatgcattgtttacagatagagacttagaaaataaatatatagagctacggactttaacaatctagtttggatctggttttgaccctgtatcacctctcaagtccagttcctcacctagaaaatagcagtaacagcatcttcccttcctcacaggacgctgtaaggatcaaactgaggtgacgtggagaaaagcactctgatacataaagtaccagacatacataacagaccatttggttgacaaccatattcgccaccagctttctttaaataagcttccctattgcatttaaaaggattcacgtcataaaatgtaatcacaactgc

SEQ ID NO: 734070 - DNA, 607 bp, Homo sapiens
gtccatagcagcatttttcacaatagccaaaatgtagaagcaaccagactgtccaatgacagataaacagctaaactaaatccaggccaagcatgcaatggaatactattcagccttgaaaaggatggaaattctgacacatgcyacaacatggataaaccttatgctaagtgaaataagccagacacaaaaagacagatactattaatatgttattccacttatataaggtacctagaggagtcaaattcatagagaaagaaagtagaatggcaggctgggcacagtagctcacacttgtaatgtcagtgctttgggaggccgaggcaggaagatcacgtgagtccaggaggtcgagaccagcttgggcatcatagagagacccccgtctctacaaaaaataaaaaaattaggtggctatctatggtgacatgtgcctgtagtcccagctatgtgggagactgagttgagaggatcgcttgagctcaggagatcaaggctacagttagctatgattgtgccactgcactcaagcctgggcaactgagtgagaccctgttttgttttaaaaaacaaaacaacaacaacaaaaaaactcagctgggta

SEQ ID NO: 734071 - DNA, 607 bp, Homo sapiens
gtccatagcagcatttttcacaatagccaaaatgtagaagcaaccagactgtccaatgacagataaacagctaaactaaatccaggccaagcatgcaatggaatactattcagccttgaaaaggatggaaattctgacacatgccacaacatggataaaccttatgctaagtgaaataagccagacacaaaaagacagatactattaatatgttattccacttatataaggtacctagaggagtcaaattcatagagaaagaaagtagaatggcaggctgggcacagtagctcacacttgtaatstcagtgctttgggaggccgaggcaggaagatcacgtgagtccaggaggtcgagaccagcttgggcatcatagagagacccccgtctctacaaaaaataaaaaaattaggtggctatctatggtgacatgtgcctgtagtcccagctatgtgggagactgagttgagaggatcgcttgagctcaggagatcaaggctacagttagctatgattgtgccactgcactcaagcctgggcaactgagtgagaccctgttttgttttaaaaaacaaaacaacaacaacaaaaaaactcagctgggta

SEQ ID NO: 734072 - DNA, 607 bp, Homo sapiens
gtccatagcagcatttttcacaatagccaaaatgtagaagcaaccagactgtccaatgacagataaacagctaaactaaatccaggccaagcatgcaatggaatactattcagccttgaaaaggatggaaattctgacacatgccacaacatggataaaccttatgctaagtgaaataagccagacacaaaaagacagatactattaatatgttattccacttatataaggtacctagaggagtcaaattcatagagaaagaaagtagaatggcaggctgggcacagtagctcacacttgtaatgtcagtgctttgggaggccgaggcaggaagatcacgtgagtccaggaggtcgagaccagcttgggcatcatagaragacccccgtctctacaaaaaataaaaaaattaggtggctatctatggtgacatgtgcctgtagtcccagctatgtgggagactgagttgagaggatcgcttgagctcaggagatcaaggctacagttagctatgattgtgccactgcactcaagcctgggcaactgagtgagaccctgttttgttttaaaaaacaaaacaacaacaacaaaaaaactcagctgggta

SEQ ID NO: 734073 - DNA, 559 bp, Homo sapiens
ctgctaaaaaaaataacagatgacacaaacaaatgaaaaaatatttcatgctcatggattagaagactcagtatcattaaaatggccatactgcccaaagcaatgtatagattcaacactatttctaccaaactaccaatgtcatttttcacagaactagaaaaactattctaaaattaatatgaaaccaaaaattagcccaaatagccagagcaatcctaagcaaaaagaaaaaaaagctggaagtgtcacattacctgacttcaggctgtactataaggctacagtaaccaaaacagcatggcactggtacgaaaacagactgtattagtccattctcacattggtataaaaarctacctgctactgggtagtttataaagaaaagaggtttaattgattcacagttccataggctgtacaggaggcatggctggggaggcctgggaaacttacaatcatggcagaaggcaaagcggaagcaagcacatattcacatggtgacaggagagagagacaacaaaggaggaagtgccatgcacttttaaactgtcagatc

SEQ ID NO: 734074 - DNA, 659 bp, Homo sapiens
atgttgcaattttaaaatagtgtttattttagagacagcgtctcactctttcactcaggctggagtgcagtgttaaccatgatagcttactgcaaccttgcactactgggctcaagtgatcctccggactcagtctccagagtatctagaacaacaggtacccttccccatgctcaactaatttttttatttttattttttagaaacagagtctcactgtcttgtccaggccggtctcaaattcctggcctcaagcagtcttcctgcctcagccttccaaagcactgggattacaggtgtgagccatcacacttggcctaaaatagtatattttttagttatctttttaacctaatrgtaatcctacagagggttcatttgtaagtttcttttcattcagtttttcaggtatgggagaggtctatgttaaacatgttctaattagttagaatataattaaagcttataatttaatcaaaagacctagttgttttttgaaatatatgtagtttgcaagtgctgttgtttctgttacctacatagtatggggctgtaaaatgccatatggcatacaaagctagtggaaacagataggaaggttcaatctgggcccagagaagacccataagttgaggcaaacagcatcacggctgcaacgc

SEQ ID NO: 734075 - DNA, 613 bp, Homo sapiens
agtttctttgatatcttcaaaagcccaatcatcctgttccatctaggacattaagaaaaatacacccaaagaatagtctttcaagtacattgccaccgtagctagatgattattatcctgactattaattactattatgattactrttgccatggtttttatgtttttctgtgtgcccatccaatcccacatccagccaccacagccactgctgggtttttcctgggaaacagatgcccatgtgctggtctgggcaggcccatacactaaaggcagcctatccatgcagagctgagtgtattggaagacaacagaacggatgagccacaggtgagccgcaggtgagcaggtttacagcccccaagaggatttggatgcccaggcctgggagcttgatgaagaagtgtggtttcatgaaagcattcaccccagttatgcctaagaaagctcagccttggaataaagagaagcatgaagagtgcaatgaggaagaaaaaccagcccctaatgaaggacagagacaccaagccatcatcataatcaggagacagtaataagatagccctcaaagaaatccagccagaagccggcaagtgcacctagaccccttcgg

SEQ ID NO: 734076 - DNA, 612 bp, Homo sapiens
gtggttctagtttgtatttccctgataattagtgatgttgaaagtatttatatatctgctgactatttgtatgtcctctttagaaaaatgtctgtttgggtcctttgcccacttttaatcattgttatttgctttcttagtactgagttaagttctttatatatcttagacattacactcctctcagatatgcaaatgtattccctcaaggcatgggttgtctcttcacactgttaattgtttycttttctgttcagaaacattttagttgaatgtaatcccattgatctatttttgcttttcttgtctaggctttgggggttatatccaagaaattattgctcagaccaatgtcacggagcttttcctctatgttttcttctagtaattttaccattttaggtattacatttaagtctttaatccattttgagttgattttttttttttgtatatggtgtaagataggggtccaactccagtcttctgcatgtggaaatccagttttcccagcatcatttgttgataagactgtcctttccccattgtttgtttttggcatctttgtctaaaatcaattgacgataaatgtgtgggtttatttctggtctt

SEQ ID NO: 734077 - DNA, 591 bp, Homo sapiens
tttttttttttttgacaaggtctcattttgttgccaaggttggagtacagtggcacaatcgcagctcattcagccttgacctcccaggctcaaatgatcctcccacctcagcctcccaagtagctgggaatacaggtgtgcaccatcacacctggctagtttttgtatgttttgtagagatggagtctcaccatgttgcccaggctggtcttgaactcctgggctcaagcaatcctcctgcctcagcctcctaaactgctgggattacagatatgaaccaccatgccagccaatttmtttattaaccacaaaactatttaagatacagattataaaactgtcttatcagttttataatataatcagatataatatatttaactgttatagcataaatgataggaagtacatagactttaaaagcttgcaatatttctatattttacatgagttaatacattattaaccataagtggattgtaaaagggtgaagaggtatattggaatccctatagtaaccacttaaaaatgacacaaagtatagctatttaaccatgaaaataaaatggaattctaaaaaaaaaaaaatta

SEQ ID NO: 734078 - DNA, 591 bp, Homo sapiens
tttttttttttttgacaaggtctcattttgttgccaaggttggagtacagtggcacaatcgcagctcattcagccttgacctcccaggctcaaatgatcctcccacctcagcctcccaagtagctgggaatacaggtgtgcaccatcacacctggctagtttttgtatgttttgtagagatggagtctcaccatgttgcccaggctggtcttgaactcctgggctcaagcaatcctcctgcctcagcctcctaaactgctgggattacagatatgaaccaccatgccagccaatttctttattaaccacaaaactatttaagatacagattataaaactgtcttatcagttttataatataatcagatrtaatatatttaactgttatagcataaatgataggaagtacatagactttaaaagcttgcaatatttctatattttacatgagttaatacattattaaccataagtggattgtaaaagggtgaagaggtatattggaatccctatagtaaccacttaaaaatgacacaaagtatagctatttaaccatgaaaataaaatggaattctaaaaaaaaaaaaatta

SEQ ID NO: 734079 - DNA, 477 bp, Homo sapiens
ggggacgctgagtttataaactctgatgaaacttttttgccaaaagaaacagcttccccatctccagtagtggcaacatcccctccccaactcgtgctgccatcagcctttccacctttgtctgaggagatgaaccctgctctgccagaggcaatggtgatggcctcccctgaggcagttgccaggcaaaatwatattgattctcctcaggtgccacccccaacttcccacttctggtaccaatttactgtattagtccattttcaggctgctgataaagacttacacaagaatgagaagaaaaagaggtttaattggacttacagttccacatggctagggaggcctcagaatcatggcaggaggtgaaaggcacttcttacatggtggcagcaagagaaaaatgaggaagaagcaaaagtggaaatccctgataaacccatcagatctcataagacttattcactatcatgagac

SEQ ID NO: 734080 - DNA, 586 bp, Homo sapiens
tacataaaggggtacgatgtcacttaaaagttgcctacaataaattaaagcctactgcacacactgaatcaaccactaaaaataaaataaagaattatggctaacaatccaacaagaagataaaatgaaatcataaagtataccaaatccaaaaaatagaacaaatgtgacaatagacaaaagcaagatgatagatttaaacataaccatatgaaaacacatatatatacactcattaaatgtaagtggtctaaacaactcaattaaaaggcatagattatgagactggataaaaragcaagacacaactatatgctccctacatgaaccatactttaaacatgaagacacaaatagattaaaagtaaaaggataaaaaaacgaaatacccagctaacactaaacaaaacaaagctgaagtatcaatattaaaatctaacagagtagattagtagattttagagcaaaacatattagcagggattttaaaaaaaaaggttatttcataatgatagagtctctttatcaagatgacataacaatcctaaaagtgtatgcatctaattacagatttttgaaacatacg

SEQ ID NO: 734081 - DNA, 637 bp, Homo sapiens
agtttcactcttgttgcccaggctggagtgcaatggcacgatcttggctcactgcaacctccgcctcccaggttcgagcaattctcctgcctcagcctcccaagtagctgggattacaggtatgtgccatttgtatttttagtagagatggggtttctccatgttggtcaggctggtctcaaactcctgacctcaggtgatccgcccacctyggcctcccaaagtgctgggattacaggcgtgagccaccactcctggccaacagaacctttctgaaagactcctcccaggctgtagtcctcagtcagtctatagctctcagtaagacttctggataaaactaacttaaattctttaaaagcttgtttttttttttctttagtcaaaatatcaaaagcaggatctataaagaacaaacagaaaaactgaacttcatttaaatttactttttaaaagacattgttaaataaattaaatggcaagccacaaactgagagaaaatactttcaaagtatatgtccataaggaacttgtatccaaagcatataagaaatttcaaaattcaaaaaggggcaaaagattgggacagtttaccaaagataatatacggatggcagataagcatagaagagcaatt

SEQ ID NO: 734082 - DNA, 642 bp, Homo sapiens
ggtgaattagaggcaaaaagtcaacatttactaccgcctttcaagataagggaaaaggaccagtgcaaccaagaaaagggaaaagccaataatacttagctgttgccgcctttcttaatgacataaaaacccacatcagacaawtttttttggtaccctacccttgaactggaaaccacagattttaatctctaatttatttaggaataaaaattcagatcacaggcaacacacttccatgtgactttaaatgtatattattagctaatgataggaaaacctcacattgcccagttgagttcacataaaatgtcatgacttcccttctccttccagaaacagatctctgaaagcatatccctaaagaagaataccaaatattagccagaaacttaatttattctatcccacattcctctgatctttgaaaaagtgattctgcagtgctttccaaattcacagcagacataatgtatgaacatcaaatcatcaaagacagttcaagagaatgcctcacttttagaaacactacaaactaaaacttaagagcttctacacctgcaaataataaacttcaaaggcaatccaaactatcctggcatttatcatttgtgagcataagtgtatgtagtgggtgtaagt

SEQ ID NO: 734083 - DNA, 636 bp, Homo sapiens
cgaagttcaactgatgcttccaactctgaaaataaatttctcctgggagctttagacttttgtctacaccacttctctcttagggctatccagaatgccttttatggaattctaggccaggcatctacatgctctgtgcctcttcctggctttgtctaccttgaacctaccctaaccccatgaccccagccccttcasacccaacctgtttctagtactagcattgagcacctgtgcctagtacctacttggacctacacattgccaaacattgcctgtgcctgtgtgacctgcccctgccttgtctcagatcaggagcctggagtcctggctggtttccatataataatcagcttaagaagatatttaacaacaaattaaaaaaatcaactgatgaatcagcaccaaaacacactaagtaaaatctccagagttacctggacttcctgagtaaatattttactatgaatgaggaattcagcagagttcagacaaacagaaaaagcatgcatctcatctttcttccctcgatttctaaacaaaaaataagaacgagtgtaataacatattcacgttacaataaatgaacttgaaagactgaatatattgaattacaaaaaaataatgttgaaatgt

SEQ ID NO: 734084 - DNA, 580 bp, Homo sapiens
gttagagttcttaaaggcggcgtgtccggagtttgttccttctgatgttcagatgtgtttggagtttcttccttctggtaggttcgtggtctcactggctcaggagtgaagctgcagaccttcgcggtgagtgttacagcttttaaggcggggcgtctggagttgttcgttccttcccgtggtctctctggcttcaggagtgaagctacagaccttcacagagagtgttacagctcataaaggcagcgtggacccaaaaagtgagcagcagcaagatttatygcaaagagccaaagaacaaagccttcacaatgcagaagggcaccccaaccggttgctactgctagctcaggcagcccgattttgttcttagctggccccacccacatcctgctgattggtccattttacagagagccgattggtctgttttacagagagctgattggcccactttgacagggtgctgattggtgcatttccaatccctgagctagacacaaaagttctccacctccccactagattagctagatacagagtgctgattggtgcattcacaaacccttagctagacaca

SEQ ID NO: 734085 - DNA, 642 bp, Homo sapiens
aatatattgtataacttctctacttgaccaaattattgcattccctggagcctctacaaatcctttttaatagcctcatctattcatctatcaatttctattttattggtatggctctctagctctcctttgatatttccttgtgtataaaattcttcagggtttttttaggtgttcagcatctttcctttcctttgcctattccctgacacttcctcttcaaagactaacactcataatattttgtgtttctgtataggaattatttcaacaacaacaacaaatcttcccctatgtatatgctatcttttggttgtttgtttgagaattcaagggtttcacaactgtcgaaataagtttgaattkacaaaaactgggtcatgttttccttccacttatagctttctttggaatgaattaaaaattatatattaaatgttcacagtttaaaaagcaaggaagatggtgaaagatgataagaagcatattctgaaccctgcaaaagctgtattaacactgtaaaaaaatagaaaaggtactttgttaatttgattttttaaggcagccatcattattaatttttactcacctatcttcagcttttatacacctacacattcaacctatatttattgatatcct

SEQ ID NO: 734086 - DNA, 642 bp, Homo sapiens
aatatattgtataacttctctacttgaccaaattattgcattccctggagcctctacaaatcctttttaatagcctcatctattcatctatcaatttctattttattggtatggctctctagctctcctttgatatttccttgtgtataaaattcttcagggtttttttaggtgttcagcatctttcctttcctttgcctattccctgacacttcctcttcaaagactaacactcataatattttgtgtttctgtataggaattatttcaacaacaacaacaaatcttcccctatgtatatgctatcttttggttgtttgtttgagaattcaagggtttcacaactgtcgaaataagtttgaatttacaaaawctgggtcatgttttccttccacttatagctttctttggaatgaattaaaaattatatattaaatgttcacagtttaaaaagcaaggaagatggtgaaagatgataagaagcatattctgaaccctgcaaaagctgtattaacactgtaaaaaaatagaaaaggtactttgttaatttgattttttaaggcagccatcattattaatttttactcacctatcttcagcttttatacacctacacattcaacctatatttattgatatcct

SEQ ID NO: 734087 - DNA, 622 bp, Homo sapiens
tattcctaagtatttaatgttttctttgcaactattataaaaggggttgagttcttgatttcattctcatcttggtcgctattggcgtagaggagtgctactgatttgtgtacattgattttgtatcctgaaactttactgaattcatctattagttctgggggatttttggtggagtctttagggttttctaggagtctttagggttttctaggtatacaatcatatcctcgaagaacagtgacagtttgacttctttactgatttgtatgccctttatttctttctcttgtctgattgctctggctaggacttccagtactatgttgaatagaggtggagaaagtgggcatccttgtcttattccagttctcacagggaatgctttcaaattttccccattcagtataatgttggctgtggatttgtcatagatggcttttattaccttaagktgtgtcccttctatgatgattttactgagggttttaattataaagcaatgctggattttgtcaaatgcattttctgcatctattgagatgatcatgtgatttttgtttttaattctgtttatgtggtgtatcacatttattgacttgtgcatgttaaaccatccttg

SEQ ID NO: 734088 - DNA, 599 bp, Homo sapiens
tggggctgcctgtcccccaggaccccaaaacacaagcaacacctccatgtgcaagatgctaataggcacatttattgagcctctcctgtgttgagaaactccaggtgatatctcatttcagtttattctcaagcaatactttgaaattgaaattctttaccccattgagaagatgaagaacccaaggctcagaaagtgctaagatcatacagctagcaaaacctggagtcaggatttgaacacaggtctgytctcaaagcctctctccactgcctcatgtctctctctgctgatgctcattctgtggtagctattgaagcacaatggtggttccaggagacaagtggccactgtcctctacagctgcagcagcagattcctttccttatggcatctgccttcaacaccctcccacctgggcctctccattccatcacatgatgctcagatcatgacctgcacagactcagcatgctcggtgactcacctatggcttgtttctctccagaagtgtaccccacatgttggaagctactaaagagggcctgaccacctgcttcattaggcccattagctttcttcttttgcaggagccagat

SEQ ID NO: 734089 - DNA, 629 bp, Homo sapiens
aaagaggcaccagaatccaggcctgtttattatcccaacctctgcaaagtaacttttgtggtttttgagtgttttgaaagtcactagaaaacagaaatgtagccaaatgttgcaaacctctggccaaaaaaatcccacaaccactgaaatattttttgcccagctacgacccaacaggggaatttgtaagcatggccctaattttaaatagtctttaaatatgaaggtagttaacaaggaaagatggagagtggccttgggtagggggaggatggaggagtgggtaaaaccactgtgtggtatggaactctgcaaagattgttgttgaactgcaagagagactgatattgtgatccattgcaaattccaaagttttctagttgtttgagtgactggggagagatgaggtgttgtagtgtttttgtaatttgtttttcttattggtccggttactggtgtttcacrgtctgtcaaaccatatggatgaatggagctagcatcgtaaaactgtcactgagggaaggtttttgaagcctgtgatttgcattagagttttaaaagcagtggttaggaggtgttggtggggcagagggaagaggagcagactggagaatttctaggctgtgtgt

SEQ ID NO: 734090 - DNA, 622 bp, Homo sapiens
acaacaacaaaaaactacagaggaattacagttgccataggcagcaatgaaactagaactaaccaactgcagttttttgttgtaggcaaatccacaaatcttagaacttaaaaaaaatacttttttttagtgttttacgagatgaactctgaattatagaatatctcaccattaatatgcaccttcagcatagaaacagttaaagaaaataaacttacctgaaactattgtattccctgtgcattgtcttcacatcctttttctgagtacctgagacaaagtgaactacaagtaggataagaactgaaaagttttcaccagatttatgaatacagtttcatcaatgatcttggtgaatagtagtagcagaagagttgaccatagaccttatagctagctgttagaatagctaatttaatgaattttttcccaaatctgaaactcaaagctactgataaccaaagctagttccctgataagtaasttagggaagtgcactcttatttcaataattaatgcttccatgaaattatataaacattcatgcattccgacaatatctgaatatttctgtgtgctaggtgctgtgctgggtgttgggtatgccattatgaacaataca

SEQ ID NO: 734091 - DNA, 600 bp, Homo sapiens
atttccagaaaaaaatgacctaaaagtcatagttttaccattgaatgtaatatccttcctgtaatccatgaatcagagtatgtaaagagatgtaaaagatgtaagaaagagttttgagttttaatttgggaaaagaagtataagacagtagtagcagtcatataaaatagaatagcatcaaacatttaaaaaatagtatcgtgatagcatagagcaaaatttacattttaaccatttactaaactttggtgaaaactatcacttaaaaaatccttaattacaaggagatagtataaaacrtagtttgttgctgttgtatatttgtttttaagtatctcagacaaatcgaataattttttaaattagaaactaatatatgtcaggcatatggctacagttaaaattttttttgaaaatgaaattatggatgcagaaagcaaacaagctgtggcagaaaaggatggatctaaatatgaagaggaggaggagataagagcaatccagctgcaaaaattactcatgccataggtagttttagatgccctagaaatagttctatgttgtattgaataacagcttgaatcaggattcgatattatt

SEQ ID NO: 734092 - DNA, 696 bp, Homo sapiens
gtcaggtaattaatggagttttagctcaagtctgacttacagtgtgtccagtgggtccccagactcatcctgtggtcatttccccagggccagaatgcataattggcatagacacacttagtagctggcagaacccccacattggctccctgacagtagggtgagggctattatggtgggaaatggaagctattagagatgcctctacctagaaaaatagtaaatcaaaaacagtatcacatccctggaaggattgcagggagtagtgccaccattaaggacttgaaagatgcaggggtggtgattcccaccacatccccactcagctctcctgtttggcctatgcagaaggcagatggatcttggagaatgacagtggattattgtaagcttaaccaagtggtgactgyaattgcagctgctataccagatgtggtttcattgcttgagcaaattaatacatctcctgatacctggtatgcagccattgacttggcaaatgcccttttctccattcctgtccataaggtccaccagaagcaatttgctttcagcttcctgttctacctcaggggtatatcaactctctggctttgtgtcataatgttatttggagagaacttgattgcttttcacttccacgagataccacactggtccattacattgatgacattatgctgattggatccagtg

SEQ ID NO: 734093 - DNA, 637 bp, Homo sapiens
ggacaaagtgagtctattggagaaagaatctattcattattaaagcaggggaaagtaagctaatatacatatatgtgtatatgtatatgtataatatatattatacatatacatatatattttccattctgcacttttaaaaaaatattgttttaaaatatatataacaaaattttccattgtaaccatttacaagtgtacaatttagtagcgttaattatatttatgatgttgtgaaaccatcaccactgtctatttctaaagcttttccatcaccccagagaaactatttttaaaataaaatctttattgagatataattaatataccataacattaacgtaaartgtacgattcaatggcttttaacatatccacacaattgtataaccattaccatagttaattttagaacattttcatcaccccaaaagaaacctctgtatccattagcagttactcactatttcccccaaatcctctttcccctaaccctagtcactcaggaatctactttctatctctatagatttgcctgttctgggtgtttcatataaatgaaattttaaaataggtaggtttttgtgactggcttcttttttgttttcaagacctctctatgttggagcagatatca

SEQ ID NO: 734094 - DNA, 553 bp, Homo sapiens
caatatgcatttataaaataaagatttctagacatatggtagactaacagtgatattttgaaatctacttctgccacagaactagataaccatttccagattggaatataaattaatcaatgtctcattgttagagctgctgtaattttttgaggggatcaagtgaggaaggacttatttttggcttakatttacatttacagcaaggttatcaacattttcctgtggtggcacattaatattaataatataatcataatgccgatttacacatttaccaaattcccatctattaccttcattcctgttaaaatacaacctatcatgttgttctttggggatgagtagtacatttatagacatataagtatatgtgtatatttatatatttgtatatataaaaatttaaaaaattcttttatttttaggagcaaaaatttggggaaaataatgtaatatttatcagaaggatactttaggatttagctctatcagccaggcagggtcatcagtaaatctaagaactgccaaacttctcacactcctaattccc

SEQ ID NO: 734095 - DNA, 578 bp, Homo sapiens
tgcgtacgtagagtttgagaatccagatgaagccgagaaggcgctgaagcacatggatggaggtgggtgaccctgccacataaccctgacctctcagagacccgccgccgcgaggggctttcaaactgatttccaactgggctgcacttctttttgtttgtttgagacagagtttcacacttgttgcccaggctggggtgcagttcctggaccaaactgaggtttgggctgctmtttctcatggcccaataacaagatgcacattaactgagtaggtggagtttttatttctgcaaccagttgcagggaaaaggcctggaaattattgccagaccaacttaaaattacaaagtttttcagagcttatatattttttaagctatatgtctatacatatgtgtacatttatgtaaagacataagttactgacttttaatctattaactaaggattgagtcttgaagaccttcctctggagcctcagtaaattgacttaatttaaatggctgtgagtgctggggtaattacccttgctttgccttctgctaaatcacagcagtttggggagttttcttccc

SEQ ID NO: 734096 - DNA, 578 bp, Homo sapiens
tgcgtacgtagagtttgagaatccagatgaagccgagaaggcgctgaagcacatggatggaggtgggtgaccctgccacataaccctgacctctcagagacccgccgccgcgaggggctttcaaactgatttccaactgggctgcacttctttttgtttgtttgagacagagtttcacacttgttgcccaggctggggtgcagttcctggaccaaactgaggtttgggctgctatttctcatggcccaataacaagatgcacattmactgagtaggtggagtttttatttctgcaaccagttgcagggaaaaggcctggaaattattgccagaccaacttaaaattacaaagtttttcagagcttatatattttttaagctatatgtctatacatatgtgtacatttatgtaaagacataagttactgacttttaatctattaactaaggattgagtcttgaagaccttcctctggagcctcagtaaattgacttaatttaaatggctgtgagtgctggggtaattacccttgctttgccttctgctaaatcacagcagtttggggagttttcttccc

SEQ ID NO: 734097 - DNA, 587 bp, Homo sapiens
gtgtgaatttttgttcagtggcaattccatttagagtactttttatgtaccagcaaaaaatatataaactatgtttgattttagaaattaaaatatgataggctatttaattttatctgaaaaattacaacttgcatggaaacagacattataaagaggaccctggagactaagttacaggacacatactaattaattttaaaaytcagttaaatgatgacagcacttcacataaacacataacaatataaagtgagaactgtaactgttctttctttcaatatttaaataaatcaaagtttgcatttatagaaataaagtaacagaaaacagaagttacagatctgtgatactggccagagaggagagatgaaaaacagactaggtaccattttaaagtcttggactgtgtagtaggcatcttcctactcccatccattcttcctgcttcctattactaaataaataagttaagatactctcaccatacattttcttgccaagcaaactttgtgttttactacttatactaaaatgaataaatcctgaaattttttcactattaaaagttctagatgtgtcctgat

SEQ ID NO: 734098 - DNA, 613 bp, Homo sapiens
ttgttcaacaggctgcatcaacagaagatcagagggagagagagaagtgatgtaggagtatgtttttccttttgctgtctccatgccagattgaggtcaggtgattttgtccctctagaaaaggctgtaacttctgtcaggaggccctgttcctgcagctattctcttcaggttccagtaataatttgcatcccttcacctgaggcccagataaaatactgatttctcttgctattattagtctcagtatattgcattatctatggatgaggtctttaaaccttggcctactttgaaaataattcctttaataaaatttcctcaaattacacctacttgagtgctctgttccctgactgaatctsttaaagagtggggaatggattcctcagagtactgagttttaaagcagtcactttcaatggcagcatcgtctcttacttgccttgttgcaataatctcttattggtctcccttcttctaaccttgactcatcaaagtggatcttcaacactgctgccagaataatcttgttaaaatgtaaggaagatcagttcatttctctgctcaaaggtcttagaggattttaaatctaaatatccaagatatttcc

SEQ ID NO: 734099 - DNA, 593 bp, Homo sapiens
gcaaatagaattcaacaataaataaaaataattataaaccaaggccaataaggtttatattatgcaagcctcagagctttaaaattaatcctgtgatccatcatatgaagaagccaaagaagaaaaatcataaaattaatcaatgcacaaaaaaatttaacaaaatttaatatgtatcaatgattaaaaatcccagaaagctcaraatagagaaacttcctcaacttgaaaatagcatcccaaaaaccttgagggcaacatactgaatggtaaacaactgaatgcttttcttctaagatcagggacaaggcaaggatgtccaccctcaccactcttttctaacagtattgtaaatatagccagtgaaataagtccagcagtactgtaaattctaaccagtgaaataagtctaatagtactgtaaattatagccagtgaaataagtcaagaaaaagagaaaaagggtattcccattggaaaagtagaaataaaatgttcccaattttcagatgacatctttgcctatgtaggtaatctcaaggactacaaaaaagaaaaaattctagaactaataagttagtctagcaaggtta

SEQ ID NO: 734100 - DNA, 593 bp, Homo sapiens
gcaaatagaattcaacaataaataaaaataattataaaccaaggccaataaggtttatattatgcaagcctcagagctttaaaattaatcctgtgatccatcatatgaagaagccaaagaagaaaaatcataaaattaatcaatgcacaaaaaaatttaacaaaatttaatatgtatcaatgattaaaaatcccagaaagctcagaatagagaaacttcctcaacttgaaaatagcatcccaaaaaccttgagggcaacatactgaatggtaaacaactgaatgcttttcttctaagatcagggacaaggcaaggatgtccaccctcaccactcttttctaacagtattgtaaatatagccagtgaaataagtccagcagtactgtaaattctaaccastgaaataagtctaatagtactgtaaattatagccagtgaaataagtcaagaaaaagagaaaaagggtattcccattggaaaagtagaaataaaatgttcccaattttcagatgacatctttgcctatgtaggtaatctcaaggactacaaaaaagaaaaaattctagaactaataagttagtctagcaaggtta

SEQ ID NO: 734101 - DNA, 493 bp, Homo sapiens
ttttttttgcagtgatagaaagtaaggcatttatttgcagagcaccaagcaaggaggcccaggcagctactgctcaaatcttggcctctctgatggcttgcatccttgcctactctgactcaccacgtggttctagatcacaaggtcttaaacaatcatgagaacagggcagtctcttgcctcatgactatcaacgctaaagagtattatggcaactgctggtgattctcactcaattagaatcccaatcttacagttgacaaagagtattaaaggtcagccaggtaaaccttcccatcatgcaaagaaagtttgacatacactgggatttccactgccccctcaatctcagctytttttttcctacaaaaattgatcataaaagcaaactttaagacaaacagaactcagctcacatctccctgatttttgcacagtctcactttcagtagtcatgaggattgccttttgggaaggagagggaatttttatg

SEQ ID NO: 734102 - DNA, 536 bp, Homo sapiens
gaggaacagaagaagcagctgaagagagaggccaaaacactagttcccaatcaagccaaaggttgtcttagttcagaagaacaaagccaaggaagtttttattggaggaacagatgaagcagctgaagagagaggccaaaacactagttcccaatcaagctgagggttgtcctagttcagaagaacgaagccaagaaactttttaagatcaccaacactaggcctaaaacttcatccatcaagaaggagtaggacatgtcaagaccattcaatggggaaaggacagtcttttcagcaaatagtactggagaaamtggatatccacatgcaaaagaatgaagcaggacccttacctaacaccatatacaaaaattaactcaaaatggatcaaaaagcaaaagagctaaaactataaaattcttagaagaaaacaaaggggaaaaccttcatgacattggattgggcaatgatttcttaacactaaaagcacaggcaacaaaagaaaaaaatagataaactggacttgatcaaaatta

SEQ ID NO: 734103 - DNA, 611 bp, Homo sapiens
tagaaagtggtggtcatgttccagtcctcccttcctgagtaactagcccagaacttagaagtttaacattaaaaatatgttattttacctcagaattttttaggtcaggaatttggacagggcacagctgagtggttcgtctgttccatgtggcatcaacagagttgacttggtggcactggactaaaagatggtctggtctggaggggctctcatacatctggcaccttggcaaggacagctggaagactggggtcagctgagaccctcaamtggagcacttacctgggatctctccagcatgggagcctcagagtagttggataccttcaatggcccctcaggactccaagagcaagtgttccattcaagagttccagttgcaagctgcagggattcccagaagtcccagaaagtcacttctgtctcattctattggtcaatcaagtcactaagaccaccccgcatttaggaaaagaggatttaaactccatttttaaatgaaagaagtagcaaagaattcatgggcatctttaatccaccacagactctatttttatccctttcacaatgttatgcttggattaagtactcacagggccagttggttt

SEQ ID NO: 734104 - DNA, 533 bp, Homo sapiens
atgaattaatgaaaggaccacatgaccaggtctccttttgcagtgcattggaatcatcctatctcagagttgattcataaattgccccaactagaaggtccctttgcgatttttgaaagagatagtgatcatctcttccagctcattctttttgcaaaggatactagaaagggaaaattttatattcaagctaaggcccaataattaggccttttactataccttattgtctcacagaggaacttagcaaattcttgttattcaagtaactactgagcaaattagtaagyagcagaccaaggaaaaacagaggtcgtcaatggggcatagtgaaagggacatgggctttggtgtctgccaggcccgatttcatatactaactccagacgttcttagcagctctataccatggaacaattaatctctagaagtttccgtttttcctccttaaaatgggaggtccaacctgttataagaattagaattttctctgtcaaacatctaagagctcctggtgttgagtgtgtaccttt

SEQ ID NO: 734105 - DNA, 611 bp, Homo sapiens
tggtggttgtgtgtgtgtgtgcactcacgcatgtgtatgtttagctcccgtgcaagacttcatctaaaataatgtcttgattaagtattttttccctgaaacccagtgtgaagatgcctggcagggcatttgaaggggtggtggcttttaagaaggcgtagggtctaatggagtaggaagaaagagaagaggacactcgcagggtaaaagaggatctattgaagtggattctacttttttatgtgctaagtgtcatggactatgttctgtgtcctccttttgaagcacacttctttgacacyctttcttagtacccactacccttccattgctaagcacctgctcagagatcatactacagtgcttcctctgagacatccctccccaatgactactgcatgttcctgacttgtccttctctgtcatcattaacctactcgaatgatttttacttcttccaaaacatacctctaatttcttcctctcacccacaaatttcctctgtttatttatcatgctaactctctcttctctgatttaattcatctcttagactttactttttataataaaactaactattttctggtcatagtagaagtggaaagaag

SEQ ID NO: 734106 - DNA, 591 bp, Homo sapiens
ccatgagatcagctggtggaggatcctcccccatgatccaaatgcctcccactaagcctcacctcccaacaccaccccattggggataaaatttcaacataagtttaagaggggacaaactcagatcatatccgaaccatagcacttgtcctcaaggccccagcctgcttagacaatctctgaaatgtcttcagggtttttctctcattgtcttgatgaataggcctggttgccttctgtctactaatttttttagcaaatgatttcttggccacrcccttggtttttctcctacggacactttttcagtctacatggccagccttcagatttcccaaatctttctgctctgctttctttttcattactaattccaccttttagtcatttctctcctctcatgttttactatatgtgcttcaaagtagcaatacagctccttcaatattttgcttagaaatttctttcaccagatatcctagttcatcactcttaagttctgtcttccacaaattcctaagacactgacagaattctgccaagttctttgcaagtagataacaagaatggcttttactccagtttccaata

SEQ ID NO: 734107 - DNA, 614 bp, Homo sapiens
gcttcatgcccacattttacaggtgttaaagatgaagaagcaagcaagccacaaaaaaatccttcctgctaaaaaaggtaccctatcagcaccgtttctcacaagtgggtactgtcaccaagtcaaagaacaagaacaataagcatccacatgccatttctagaaaacggggaataaactaggtatgctgttctttgctttcttcactagaaagcagttggcagcttgtcccaagtytaaagactgcctcactcctaagattgggagccttacagactgtgcattcagagtgtggatctttttatgtttttttttttttttttttttttttattgagacggagtcttgctctgttgccaggctggagtgtagtggcacgatcttggttcactgcaacctccgcctcccaggttcaactgattcttctgcctcagcctcccgagtagctgggactacaggtgcgggccaccacacccagctaatttttgtatttttagtagagacggggtttcaccatgttggccaggatggtctcgatctcttgacctcgtgatctgtctgcctcggcctcccaaagtgctgggattacaggcgtgagccaccgtgtccggccc

SEQ ID NO: 734108 - DNA, 606 bp, Homo sapiens
tttcctctgcctagaatctccctctcatcttctcaggtggggaccatgactcttcattttttttttttttttttttttgagatggagtcttgctcttgtcacccaggctggagtgccgtgacgcaatcttggctctcggctcactgcaacctacacttcacaggttcaagtaattctcctgcctcagtctcctgagtagttgggactacaggtgtctgccaccacacccagctttgctttgtgttgggaacattcaaaatcctctcttctagctatttgaaaacatacaataagttattgttaactgtagtcacccatcagtgctaagacactaggacttattcctctcatttagctgtaatttggtattctttaaccatcctctcattatktcgtcctcatctctgccctgcctttccagcctctagtaaccactattccacactttacttctatgagttcaacttctttagcttctgcatgtgagtgagaacatgtggtgtttatctttctgtgtctggcttatttcacttaacataatgtcctccaggctcatctatgttgctgcaaatgacaggatttcattcttttttatggctaaataat

SEQ ID NO: 734109 - DNA, 606 bp, Homo sapiens
tttcctctgcctagaatctccctctcatcttctcaggtggggaccatgactcttcattttttttttttttttttttttgagatggagtcttgctcttgtcacccaggctggagtgccgtgacgcaatcttggctctcggctcactgcaacctacacttcacaggttcaagtaattctcctgcctcagtctcctgagtagttgggactacaggtgtctgccaccacacccagctttgctttgtgttgggaacattcaaaatcctctcttctagctatttgaaaacatacaataagttattgttaactgtagtcacccatcagtgctaagacactaggacttattcctctcatttagctgtaatttggtattctttaaccatcctctcattatgtcgycctcatctctgccctgcctttccagcctctagtaaccactattccacactttacttctatgagttcaacttctttagcttctgcatgtgagtgagaacatgtggtgtttatctttctgtgtctggcttatttcacttaacataatgtcctccaggctcatctatgttgctgcaaatgacaggatttcattcttttttatggctaaataat

SEQ ID NO: 734110 - DNA, 622 bp, Homo sapiens
ctgagaaagaaactggtatgaacattgttttccctatatccacctatattcattgttggaataagggagccaacaatgttttctttccaagatccaagttgatttttacaaacacatacatgtgtgcacacacacacacacacaaacacacacacacccagagattcaggaaggaagggatttatgtttcaggcccattaaaaaagactgaggtcaggtggttgcaggagaagcatggacatgagtgctgtaaggasaaagggagaagccaacagacatgaggggagttgaagtttcttttgagagagaggttagggcaagatgctagtgccctcactcagaggcaatgccctggatgggtcaggataggagatcgggggcttttggatggcagtctgcagtcactgggggagacataagaggggcatctctgtgacttcccacagagcatcaggactgggagacagaggaacgggatcactctctacattgccactgtctagacaaaagggcaaatgtgaaaatgaaaacaccacggaccaaggacctggctcctccccagtttggggaaccaggtaagccccatactctgctgtgatctcatagattcagggaggaaacc

SEQ ID NO: 734111 - DNA, 622 bp, Homo sapiens
ctgagaaagaaactggtatgaacattgttttccctatatccacctatattcattgttggaataagggagccaacaatgttttctttccaagatccaagttgatttttacaaacacatacatgtgtgcacacacacacacacacaaacacacacacacccagagattcaggaaggaagggatttatgtttcaggcccattaaaaaagactgaggtcaggtggttgcaggagaagcatggacatgagtgctgtaaggagaaagggagaagccaacagacrtgaggggagttgaagtttcttttgagagagaggttagggcaagatgctagtgccctcactcagaggcaatgccctggatgggtcaggataggagatcgggggcttttggatggcagtctgcagtcactgggggagacataagaggggcatctctgtgacttcccacagagcatcaggactgggagacagaggaacgggatcactctctacattgccactgtctagacaaaagggcaaatgtgaaaatgaaaacaccacggaccaaggacctggctcctccccagtttggggaaccaggtaagccccatactctgctgtgatctcatagattcagggaggaaacc

SEQ ID NO: 734112 - DNA, 622 bp, Homo sapiens
ctgagaaagaaactggtatgaacattgttttccctatatccacctatattcattgttggaataagggagccaacaatgttttctttccaagatccaagttgatttttacaaacacatacatgtgtgcacacacacacacacacaaacacacacacacccagagattcaggaaggaagggatttatgtttcaggcccattaaaaaagactgaggtcaggtggttgcaggagaagcatggacatgagtgctgtaaggagaaagggagaagccaacagacatgaggggagttgaagtttcttttgagagagaggttagggcaagatgctagtgccctcactcagaggcaatgccctggatgggtcaggataggagatygggggcttttggatggcagtctgcagtcactgggggagacataagaggggcatctctgtgacttcccacagagcatcaggactgggagacagaggaacgggatcactctctacattgccactgtctagacaaaagggcaaatgtgaaaatgaaaacaccacggaccaaggacctggctcctccccagtttggggaaccaggtaagccccatactctgctgtgatctcatagattcagggaggaaacc

SEQ ID NO: 734113 - DNA, 557 bp, Homo sapiens
taaaagactacatatcacatgattttaactatatgacattctggaaaaggcaaatctatggagacagtaaaaagatcaacagttgccaggggttagggatggagagatggagggaagagcacagaggattctagggacggcgaaactactccacatgataccataatggtggacacgtccatttgtccagacccatagaatgtacgtcaagagggaaccctaatgtaaactatgggcttgggtgataatgacatgtcaatgtagctccactgactgtgacacatgtgccactctggtgggggaagctgtgggtgcagtggggaggctgtgggtgtgtggggcagagagtatatgatactgccctaagttttctgcttaattttgctgtgaatctaaaagggctctaaaaattaaagtttttyaaaaaaaattatattacattctacatggaataactacaaaattagaggaacatcttctcactgagctgtgatcctcaaggtcccttttctatatagtaaaaacagtatttggattttgttttgttttttcagtta

SEQ ID NO: 734114 - DNA, 431 bp, Homo sapiens
ccttcccacccgcttccaattaggaacagcctgagaaagccaaatacactcctcaaaccaatcataaaacacagcacttccccatttcttctttttatcaggtttgtcaaagatcagatgggtgtagatatgcagcattatttctgagggctctgttccattggtctatatctgttttggtaccagtaccatgctgttttggttactgtagccttgtagtatagtttgaagtcaggtagtgtgatgcctccagctttgytcttttggcttaggattgacttggcaatgcgggctcttttatggttccacatgaacttcaaagtagtttttttctaattctgtgaagaaagtcattgggagcttgatggggatggcattgcatctataaatggtgatgggaaaactggctagccatatgtagaaagctgaaa

SEQ ID NO: 734115 - DNA, 623 bp, Homo sapiens
tgcagatggggaaactgaggctcagagaggttatacacattgcacaaatcctacagataataagtagtagaccttagccgggtgcagtggctcatgcctgtaatcccagcactttgggaagccaaggtggaagaatcacctgagaagtttgagactagcctagtcaacctagtgagacccaatgtttagaaaatcatagacctagagttgaacccaaacaggttggctccgagctggtgctgtaatgtatctgttgtcttccagaaagcatgaagagtcatttaaaggccaggcgcagtggttcacacctctaatcccagcactttgggaggccgagacaggcagatccctygagatcaggagtttgagaccagcctggccaacatggtgaaacctcatctctactaaaaatacaaaattagccaggcgtggtggtgggtacccgtagtcccagctacttgggaggctgaggcacgagaatcacttgaacccaggaggcggagactgcagtgagctgagattgcgccactgcaccccagcatgggtgacagagcgagactccatctcaaaaaaaaaaagtcacttaaatactgcctgagtcccaatgctacctcatccactta

SEQ ID NO: 734116 - DNA, 632 bp, Homo sapiens
ccaggttggagtacagtggcgcaatcacggcacattgcagcctcgacctcctgggcgccctgggctatgttaataaaataaataagcggcggggcgcggtggctcacgcctgtaatcccagcactttggaaggccaaggcgggcggatctcctgaggtcgggagttccaaaccaccctgaccaacatggagaaaccccgtctctactaaaaatacaaaattagccgggcgtggtggcgcatgcctgtaatcccagctgctcgggaggctgaggcaggagaatcgcttgaactcgggaggtggaggttgcggcgagccgagatagcgccattgcactccagcctgggcaacaagagcgaaactccgtctcaaaaaataataayaaaataagcaatcgtcgcgtcctttctatcctggtcttagcttgcgctctgccataaaactccctctagccgaacccggcccagccctagagcaatccgttacttccggggcgctcagccggcatgcaaacactcttggctacagccccatctccgagtgcgttcggctatttccggaaaccgtcggcatctaggctcaagtccgctaaattctagtgcccgtaggggtcgagatcgttggctgtttccg

SEQ ID NO: 734117 - DNA, 558 bp, Homo sapiens
gaatgtaaggcctggcagggttggaatgtctcagttattcccccaacactccagcctccatctgggccttttttccaggctattctctctgccttcactgttggggccactgtcctgtgtaggcaccaaggcctgaccatgccatccagaagccccagcctgggacaactctcccccacctgcctctgagccctccatggtgactcttgttccccaaaccttatccttctccccattacacagaagggaaagctgaggctctgtcactcaaatccaaagccaggtggactccaagccaccccacccctatcccagacagcacaggctgcctctctcccccatgggcgtyccttgaaggccaggttgccccccaccccccacaagccttgaacgatgaaaagaaggaaggccagttctcttcaccccaagccagaagtggggctgggtgggtaccctagagaaatgacacgccactccctgcgccagcttctgctttccggcgtggctgtggtcaagcctgagtcagtcccacgggaccacggtgaggggtctggagcg

SEQ ID NO: 734118 - DNA, 569 bp, Homo sapiens
ctgtgattggctgggcttggccgtgcagggcgcacctgagggctgaggcatttgtggtcgggggcatttggggctggaggcatctgaagactcgcccggctggactccgtgggggctcactcccgtgacggcagttgctgtgggctgttagctgggctggcactggaacgcctgcgtgtggcttccatgtggcctgagcttctctcamcgtggcagcagggtccctcaagggagcattaaatgtttatatttaagtcaaccaactgcattccagctgtagctcttgcctcagcaatgtcctgccacacattcaattgtctctttcatttccttcaatctggaacatttcctcagccccgctttgtctttgacatggacgtttgtgatgatcacgttcctcccgctccccgtgtctgaagagtgctccctgactggctgccgtctcctccctgtcgggtctggctgggttctccagagggagtgctgcggaggggacacagcagaggccccatgctcgtgatgtatgttgcagatcattttcccccattctgtccttttttgttaaattg

SEQ ID NO: 734119 - DNA, 569 bp, Homo sapiens
ctgtgattggctgggcttggccgtgcagggcgcacctgagggctgaggcatttgtggtcgggggcatttggggctggaggcatctgaagactcgcccggctggactccgtgggggctcactcccgtgacggcagttgctgtgggctgttagctgggctggcactggaacgcctgcgtgtggcttccatgtggcctgagcttctctcaacgtggcagcwgggtccctcaagggagcattaaatgtttatatttaagtcaaccaactgcattccagctgtagctcttgcctcagcaatgtcctgccacacattcaattgtctctttcatttccttcaatctggaacatttcctcagccccgctttgtctttgacatggacgtttgtgatgatcacgttcctcccgctccccgtgtctgaagagtgctccctgactggctgccgtctcctccctgtcgggtctggctgggttctccagagggagtgctgcggaggggacacagcagaggccccatgctcgtgatgtatgttgcagatcattttcccccattctgtccttttttgttaaattg

SEQ ID NO: 734120 - DNA, 488 bp, Homo sapiens
gcagtggctcatacctgtaatcccagcactttgggaggccaaggtgggtggatcacctgacgtcaggagttcaagaccagcctggccaacatggtgaaaccccaactctactaaaaatacaaaaattagctgggcatggtggcgcatgcctaaaatcccagctactcgagaggctgagactggagaattgcttgagcccrggaggcggaggttgcagtgagccgagattgcaccattgcactccagcctaggcaacagaacaagactccgtctcgaaaaagaaaaaaaagaaaaaatttgtcaggcgggtggcatattcctttagtcccagctacgcaggaggctgaagtgggaggaataattgagcccaggaggttgaggctgcagttagccatgattgcaccattgcactccagcctgggcaacagaatgagacactgtctctcaaaaaataataataataaataaaataaactgttattatttgt

SEQ ID NO: 734121 - DNA, 479 bp, Homo sapiens
taccactatctaacccaacgttgtccaataaaagcatgatgccagccacatatgtcatttggaattttttttttttttctttgagacagagccttgctctgccacccaggctggaaccacattaaaaaggtaaacggaatgctgggcatggtaactcacacctgtaatcccaacgctttgggaggccaaggccaggagtttgagaatagtcttggcaacatagggagaccccatctttacaaataatttaaaaattaacccagcrtggtggcatatggctgtaatcccagctactcaggaggctgaagcaggaggatcactgagcctgggagattgaggctgcagtgagccgagatcgcaccactgcactccagcctgagcgagagagtgagatcctgtctcaaaaaaaaaaaaaaaaaaaaaagtaaacagaagcaggtgaaattaattttattttttaaatttcattttatttattt

SEQ ID NO: 734122 - DNA, 556 bp, Homo sapiens
ctaaggctggagaatggtgtgaacctgggaggcggagcttgcagtgagcggagatcgcaccgctgcactccagcctgggcgacagagcgagactccatctcaaaaaaaaaaaaaaaaagaaggcccacttgtcacctgctgtgtgaccttgagcaccggcctttcttccctgagcttcagtccccagatttggagacgggggttaatgtagtttccctgggcttgtgagagttcagtgaagggggacctgtgtactaaagccctgcatggctctggtacatcacggcccccagtggggacaagcctctaaggctgtttaagccttggctctcctgcctgtcaaatgggcacgagggagggatcaagcctggctctgcaggtgcaracagggcatttgaccttgagcaagacctccatggcttgtctgtaaaatgagcaccagatggtccttactcccgtggagacatgaggattccacaggtcacgaggtaaagtgcagggtacagctatagctcatctcaaataaaatccgacctctcctccttggccagatgtc

SEQ ID NO: 734123 - DNA, 609 bp, Homo sapiens
cagttttcttctagccactgtgaaatggcagctcattgcttttagttgcatttctctgattattactgaggttgagcaagttttcatgagttaatggccattgatgctttctctccatcgaatattcatattctttgcccatttttctattgcattctttgtctttatcttacaggtttgtgggcattatttatatattgtgaatgccagacttgtgccagcaatatacattgctaatatattcttccagtctttgagttgtgttttcacttatttacaatgaaatagaaataaaggaaaactgaagatttttaatgtcatcaagccttttattaattctcccctttaaagttcatggtttttgcatcttgtttgagaaattctytgctaccttggagtctgggagtagcaagagtttcaggatatgtatgtaccaaacggcctgggtcacatcccgaggagagatatgaaagtttagagcaccaacctgatgacaaggtgggggcatggaaggaaaggaagacagagagctggaggactgccagcctccacagcccagctagtcctgaccagcacaaccttctagggttccactaggctcggaccctg

SEQ ID NO: 734124 - DNA, 634 bp, Homo sapiens
ctcaaggaaacattctggagagagggagggatttcttaaggatttaggctggtggaggaaaaaggattctgggggagaggcaccaacagcaccaacagcaggaaagagggatgagcctggagtttgtaatgcaatgaccatcttaccctgactggagtggaagggcctaggtgtagtggaaataaaatggatgagaaacagggctggaatcccacgggccttcacagtcagatggaggtaatctgcgcaatccaatgccagttactggctgccacttttatagaactggattgagaagcccartcagaggcagacatgaaaaagtctacttcaacatagataggaccctcatccctttccccgctgcctgactttgattccaaaacacagaatctgtatggaccagaaaaccaggcagtcagaccacagagcatcttcttacagaaggaaaaaaaaggctgtgccttctccaccctccctccttcccttgcccctcactgacacctctctttatacatccgtttggagagttctatttccaaaaccagtgaggcagacagtgagaggatagagaaagagggggcacctccaggaagggccctggagccagtaaatttagaagactgacttcggt

SEQ ID NO: 734125 - DNA, 563 bp, Homo sapiens
ttagtccattttcacactgctgataaagacatacccggactgggcagtttacaaaagaaggtttattggactcacagttccatgtggttggggaggcctcacaatcacggcaggtgaaagtcacatcttagatggtggcagacaagagaaaagagcttttcagggaaactctcccttataataccatcagatcttgtgagactcatttgctatcacragaacagcatgggaaagacctgcctccatgattcaattacctttcactgggtgcctcccacaacacatgggaattcaagatgagatttgggtggggacacagccaaaccatatcacctgtgaaagaaaccaccaagctgttttctaaaataatggtaacattttatacttctcccagctatgtatgaggttccagttgctccacatccttgtcaacacttgatatggtcagtcttttgcattttagccatcctattgggtgtgaagtggtagctcatagtagtttcatttgcatttccctaatgactaatatgctgagtacctcttaacatgcttattagccattc

SEQ ID NO: 734126 - DNA, 589 bp, Homo sapiens
catccaccagcccaggcatcgacattgcagatggtaagtgcttgccccagggcccaagccacacctgcaaacacctccgcaccagcatcttcaagccagctccttgctacgcacgctccaccccccagcacagagtcgaatcaatctgtttacctctcactcagcttaaattgcttcatgctctctctccatgtagaggccttgggcaaggccaattattgtagggaatgatcatcatcttgcaagtaatgagcccattaatggaaatttcaagaggcaccaaaaggcaycgagccatccagagtagaaaggcagcagtggccggtgcttcatttttgtggtgtctgtatgatctggaatgtatttcttctttattccttaattagataggactcctggaagtggggcttagggacaggatggcacatacatgccaggaagaaggatccagaggcacgcactagggcccagcagtgtgttctagccccagagttctgtgtacatagaagttatttttaccagatgtgaagtaaaagatgcatgtgtacctgtcacaaggaagggtagattcatggtaaaataaggaaaa

SEQ ID NO: 734127 - DNA, 558 bp, Homo sapiens
aaggtgtatctggctcacagctctgcaggctgtacaggaagcatggcaccagcatctgcttctgacgagggctttagggtgtttccactcattgcagaaagggaaaagagagccggcatgtacagagatcacatggcaggaggaggcaagagaaaggggagggggccaggctttttttaacagccagctcttgtgggaactaatagagcaagaattcactcattactgaaggctggcaccaagccattcatgagggatccttcccatgacccaaacacctcccattaggcctcaccttcaacactggggatcacatttcaacatgagatttggagggatcaaataaaccaaactgtagcattctactccctaggcttccaaatctcatgtgattttctcaatgcaaaatacagtcattcatcccccaagtcttaacttgttccagcwtcaactcaaaagtccatcatctcatctgagactcaggggaacttccttatagctgtgagcctgtaaaatcaaaatcaggttatttacttctaaggtacaatagtggaacag

SEQ ID NO: 734128 - DNA, 634 bp, Homo sapiens
caccaagccattcatgagggatccttcccatgacccaaacacctcccattaggcctcaccttcaacactggggatcacatttcaacatgagatttggagggatcaaataaaccaaactgtagcattctactccctaggcttccaaatctcatgtgattttctcaatgcaaaatacagtcattcatcccccaagtcttaacttgttccagcttcaactcaaaagtccatcatctcatctgagactcaggggaacttccttatagctgtgagcctgtaaaatcaaaatcaggttatttacttctaaggtacaatagtggaacagacattgggtaaacatcgccattccaaaagggagaaatcagccaaaacaaaggagtaagaggactcacagaagttcaaaacccagcaaggcagacactaaatcttaaaggtccaaaataatctcccttgactccatgtccagcatcstaggtgaggggtgagctttcaaggcttcaggtagcactgcccccatggctttgctgggtgcagtccatgtggccattcttgcagactggagtctagtgcctgcagcttttccaggctgaggttgcatgctgctggtggctctataattctgaggtatccatggcag

SEQ ID NO: 734129 - DNA, 475 bp, Homo sapiens
caggcccagtcaccgcccgccgcgggcaggcccaaaccgcagcggtgaggccagccggcacgcaatccggtagccacgaccctttccagttcagtgggcggctactcacggtgttcggtgttaaggagacggccggcgggaggctgacgagagccgggaggcgttagcgaaggaagagaaaaacmgaagacgaagccactacagcgtcgcagcgcggcgcggcgtctgctttataggagagggcgcaggcgccgaggaccccggggcgcgcggcgtcacatcgcggctgggctggccgccgagatcgcctgacggcaggccgagaacggctgggcgggcccaggccgggaggcggcaaggagctgccgggggcggctggccgggggatcggggggccggaagagttttcgcctctccccagctctgaaagcgccgcgctgtctcgtcaactgggtgccggaccccgactggccta

SEQ ID NO: 734130 - DNA, 642 bp, Homo sapiens
ccatcatacaggttgtgttcccttatgtgtgtgatgtgagctttcccatacctatattagccaactcgcagcttctcactgttgatctgcatactgctggtggtggtacttctcactgtatacctacatactgctggatgcttttaagtggtacctgtaggtgtctttaaatagcactgaattaggtgataagtaaatcatcttatttaaaatttcttttagttttcctgatgaggccaaagtccttgtttggtgggaatctgtctttaacacctccctcacatttgcttcatcttggttttcaatgagtaccctgtggtaggcaacagtatctagccaaaatttagtaaatttttaaaattttgtttacattcacttttaattatgttgctttcttttatctcagataagtagtatgggttttcattcatagtaggaatggaaagtgtcattcaaaaataagtttattasggataaaaggaaatgagtcagtatacataaaatattaagtgaatattattataggtaaaaatggcaaaaactctgaaggtgctgttatgagtgattgaagttcagggaacactgtggcaatgccaaaatgtggcgaatcactctagagagctgtgtattctatagagtcaa

SEQ ID NO: 734131 - DNA, 582 bp, Homo sapiens
gacaatcagaggactaggacccctaggactcagctttcgcagctgtgaaatgggctgactccccagcatcctcattgaggtggtctgctgagcgcaatccaggcctaaagtgtcaactcaattaatgtgcattaatttgtatatttcttgatgatgtgccggtaagcgatcaacaaacgcctgttaaaccaaacaggaagggcaattggcacagcggtgtggtggttactgtgggaagggaagtcttgtgggggaaagaaccttaccaaagggacactttgatgtcaccgatgcccagaccaagaatgagcacattcctagtcccgggaaccttggaggagccccatctctcccacagagagattgatgyctagttttgccctttatagaaataaaatcacacaccatagcctctctatcgtcccctcaacatcagccaatcaagttttttggtttgtttgtttgtttttttgagacggagtctcgcactgtcacccaggctggagtgcagtcgcacgatcttggctcactgtagcctctgcctcctgggttcaagcgattctcatgcctcagcttcccaag

SEQ ID NO: 734132 - DNA, 630 bp, Homo sapiens
agtaaactagtctgaatttaaccataaacaacagtttatgcaaacttcaaaatacaggtaactcctatgttctgtaatttttagtaggaattttaattaggcttcatttagcaccctagagagcaagtatctcctaataatttttttcagaactttctgggtaataaatgccattccatttaaatcagcattttcttaatcctcttctgcatagagctaatggaacacacagctggagcctcaacattacatgttctccatctttactaaggrccacagttttccccaatagaaaccttgagtatccacatctttccatgttcaacagccacaaagggaacatttttaatattgcaggtcataaattcttgcggagcattctgcatggcatataagaagctatgacgtacagaatgtagagaagtctgtgggacataggacagaaacgttttccagagacccttgactatcataagaattttaagaagtagttaaaccaaactccttagggaggaaaaacacaagtagagaagtaaaggtttgtgagtactaaacgcatggcagtccaggaggcagagtggacacagctcttcatctgacacatgtttacctgaagaaaagccatttttt

SEQ ID NO: 734133 - DNA, 502 bp, Homo sapiens
gcccttcattaaaacaacatggatccttccacccagaacaataaacagaagctgtggggagggcacaagtataaatcacttggtaattttggtcccacattatgtaaggtgattctgcaggtttgaaaagggtttatgaaagagtgttttaaacaagtctcctgtcaatgctgatgttgctcccccttggctcattattagcattagagaaagcaggyagagcacagggtcccttacacttaacacccttctcacaaccaaatacttgtcgtgcaaataaggacaacccatctccatcctaaagttttatattctttgctggctctttaagtttatagaggaaacagaaggcagcaatgtttgaataagtctgggtttaaaaaacaacatgtacacatgtactactgcaatgtttattaagcaagtactatgtgctcaagagtatgatacagagcactgtgctgggcataacacattatgtgatttaattctcataataccc

SEQ ID NO: 734134 - DNA, 574 bp, Homo sapiens
caagaccccacagcctagggtaataaatcctgctgagctctctctctgctatttcttaaagtccaacaccctgtgggtcaggccccaagagccatccagcctccatctcctagcgtcaattttacctcgtgtctctcacgacaaggggaaaacttggcatttcttggagacttaatgggatacagtgagcttaagcctttccaagatcttaccagtcagtcttcccttgttcatctttgagcaaatatatggtggtattgtggtggacccttactggacactctgccaagtaactggaacrgcacttgcactgttgtccagttggctatccctttcactctggcatttcatcgactagaaaaagaaaaaccacaacactgtaaaataagagaagccccttatgtgtcttttgactttcaagtttatttagacacaactggagtcccacgggtggtacctgatgaattcaaagcccaagatcaaatagctgcaggatttaaatcaatatttccacgggtaactattaataaaaatgtagattagatagataaatcacatctattataatcaatat

SEQ ID NO: 734135 - DNA, 589 bp, Homo sapiens
agcctgggagaggaggcatgagtgtgcctgtgatgcccacctgggaccagggcctggacccatcggtgggacactcctggatgggactgtggtttggtggcttcagctagtgccctgccctgccgcagcaagagtgctcactgcgcaggtccctgttgccctgcccagcttcccgagtgcacatacgtgtggattacaggtgggctggggacccaggggacggctgggatttctgggaagatcggatcctcaggctggcaggggatgtcagatggcacggagccgaggccatcatccctttgcagctggcagacytggcaaggagcacacgtgggtcttctgatggtccatgcagccagaccaccctcaccacgtgccaggtgatgggcagacttgacggtctgggtaaatcacaccaaacacagtcataaaactttaagtaatgcttacgttactttccctgagcaaagtgcctctgacacaggctgtttgtgttgatttgttactattcatttattccttccctgtacttctcacggcagcctaattgtgattcggtaccaagaaagcaatatcaaagtaattttcc

SEQ ID NO: 734136 - DNA, 620 bp, Homo sapiens
cacatgaaaaaatgctcatcatcactagtcatcagagaaatgcagatcaaacccacaatgagataccatctcacaccagttagaatggtgatcattaaaaagtcaggaaacaacagatgctggagaggaattggagaaataggaacrcttttacactgttggtgggagtataaactagttcaaccattgtggaagacagtgtgacgattcctcaaggatctagaactagaaataccatttgacccagccatcccattaccgggtatatacccaaaggattataaatcatgctaatataaagacacatgcacacatatgtttattgtggcactatgcacaatagcaaagactggaaaccaacccaaatgtccaccaatgatagactggattaagaaaatatggcacatatacaccatggaatactatgtagccataaaaaaggatgagttcatgtcctttgcagggacatagatgaatctggaaaccatcattctgagcaaactatcacaaggacagaaaaccaaacactgcatgttctcactcataggtgggaactgaacaatgagaacacttggacacagagcggggaacatcacacactagggcctgtcctagggtag

SEQ ID NO: 734137 - DNA, 597 bp, Homo sapiens
ttgaaagagttggttccctctgagcgctgtgctctgttccatgcctctctcccagttctgctgatggctggggtctttggcattccttggcttgtgaatccatcactccaatattcactttatcttcacatggtattctccctgtgtctgcgtcarcctcttctcctcttcttacaaggacatcagttataagggattagagctcaccttattgacctcatcttagcttgatgacagctgcaaagaccctgttttttgttttgttttgttttgtttttttgtttttttagatggagtctcgctctgttgcccaggctggagtgcagtgacgtgatctcagctcactgcagcctctgcttcccaggttcaagtgattctcctgcctcagcctcctgagtagctgggactacaggtgtatgccgccacacttggctaaatttttttgtatttttagtagagatggggttttaccatattgtccaggctggtctcgaactctggacttcaagtgatctgtccgcctcggcctcccaaagtgctgggattacaggcgtgagcctccgcgccctgtttttttaataagatgacattcacagg

SEQ ID NO: 734138 - DNA, 656 bp, Homo sapiens
aggtcataatgtgttatatggttaaactatgaatgcataatatataatgatgttaattttgaatattgatctaaggaaaattgtaattgtattggaagggtagtgaagccaaaagtgtatttgtgtgatgtggtagagttggagtaaaaagaaagctaatttctcactttccattataagaatttaataagtaattcytaagtagaaattcaagatggaagtataaactattatttaaatatgtgaaagtaaataccaaaagaaatggctttaccaaaagaatcaaaagttgttgcttctagagactaggagatgagataagaagtggaccaggggagttctccttcttataataaatcttgtagttaattgcttctttaaattgttggtacctgtatctttgacttttagaaagaaaagccttcaaattatatttgtggatgaagtaaacctgacaacctttaaataaaaataagcaaacgattttcacttatgaatacccaaagaaagtgttgatcccagaatttgtaagggtaattcaatatttttaaatctttgatataattcttcattttaatagattaaaagataaaattctacatagatgctgaaaaataaaattaaacatcttttcttctgtaaaacgcttaagaaaa

SEQ ID NO: 734139 - DNA, 467 bp, Homo sapiens
ccattacttgaatcaagcccaaatttctttttcatctgttacctatctcggcataattctcataaaagcacacgtgctctccctgccaatcgtgtccgactgatctctcaaacccaagcaccttctacaaaacaactcctttccttcctaggcatggttagctcrgtcagaattctcacacaagagccaggaccacaccctgtagcctttctgtccaaacaacttgaccttactgttttagcctagccctcatgtctgcgtgcagtggctgccgctgctttaatacttttagaggccctcaaaataggtagaggcctttcctgcagggtctgagaaggccaccgcagtcatttcttccattctgtcagacataattcctcagtttagccttcccacctcaatacagtctgataacagacgagcctttattagtcaaatcagccaagcagtttttcaggctcttagta

SEQ ID NO: 734140 - DNA, 571 bp, Homo sapiens
gggtttgatagacattctttatcaagttgggcacattcccttctatgccttgtttgccaagagttttattctttttaatcatgaacgagtgttggattttgtcaaatgctctttctatgtctattgataagatcatgtaatttttcttatttagcctggtgatattatggattatataaattgatattcaaatgttgagccagcctggcatacctggaataaatcttacttggccgtgatacagaattctttttatacattgtcggattcaatttactaatattttggttgtgtatgtgcgtgtatgtgtatgtctgtgtgtgtttgagacagggtctcactctgtcrctcaggctggagtgccgtggtacagtcttagctcactgcagcctcaaccttctggactcaagcgatcctccctctttagcctcccaagtagctgggactacaggcatgcaccactacgctttgctaatttttgtatttttttgtagagaggggttttcaccatgttgcctgggctagtcttgaactcctgagcttgagcaatccacctgcctcggcttcccaa

SEQ ID NO: 734141 - DNA, 610 bp, Homo sapiens
gcaaaggatgagaaaaactgtttttgaagtgggcaggtccccaaagcccttcttttcccatcactgtgacatctgcctgggcttgagtgctacggacttttcagtcttcctagtggaaaaatgtgacccaaaaactcyttttcctttatcaaaaactttctgtctaaacacagctgggcaggcactcctgttttaaagttatttcggggtccctgaccctgccctggtggcttggcctgagactggagagagtgccatcctctgggtcctctccaagtcctactagtctttgaagtcctcaaaatgtgcgtgaggaaggcgtttgcctctattccagaatttctgatacaaagaactccagaatccagagcaaatcagcccttctctgaacgttgtaggatggttcagaacccagagaggaccctggtgctgatatctcctcctcttccctttcccctcagcttacttactcccagatgcggcctgggtatgaagtaggcctttcctgagtggctcccaatccagtcctccaagtactcagaggggaagcccgtgaagccgtcatctaagtcctgctccctcacatgaagctgagggccagatagatgga

SEQ ID NO: 734142 - DNA, 610 bp, Homo sapiens
gcaaaggatgagaaaaactgtttttgaagtgggcaggtccccaaagcccttcttttcccatcactgtgacatctgcctgggcttgagtgctacggacttttcagtcttcctagtggaaaaatgtgacccaaaaactctttttcctttatcaaaaactttctgtctaaacacagctgggcaggcactcctgttttaaagttatttcggggtccctgaccctgccctggtggcttggcctgagactggagagagtgccatcctctgggtcctctccaagtcctactagtctttgaagtcctcaaaatgtgcgtgaggaaggcrtttgcctctattccagaatttctgatacaaagaactccagaatccagagcaaatcagcccttctctgaacgttgtaggatggttcagaacccagagaggaccctggtgctgatatctcctcctcttccctttcccctcagcttacttactcccagatgcggcctgggtatgaagtaggcctttcctgagtggctcccaatccagtcctccaagtactcagaggggaagcccgtgaagccgtcatctaagtcctgctccctcacatgaagctgagggccagatagatgga

SEQ ID NO: 734143 - DNA, 541 bp, Homo sapiens
ttctccctaattgtgctccttccttttttcttacatttcaattttttagccaatgaaccaaatgttgcaagaagggcccaataaaaagcacccctcctcctttttaaattttacagccaactaagaaataagataaaggaatggagggagaggatcaaattattagtttattcctgataggactgggttgcaggatgcagtttaaatctgagagtcagaagagcytcccaataccaagctgcggaatgagatctagcagttctggtccaaagtagacttgcctccctggcgaccagagtgtcagcctgcccctacagcaggcctcatgctggctggattccaaaggggaaagtggacaggataagctgagcatgctcactttattttccccaaatttgccaattaaatcacagctcaggagcagagttaggaaaaggcagagaaaagccaggtgttacactaaagcaactcccttcacctggaatgacaggttttgttttttgtttttttaactagtaagagacgtgggctagacacggta

SEQ ID NO: 734144 - DNA, 639 bp, Homo sapiens
ttaataaaattttcctctggaaggcctttataatttttattcccaatcatttttcaaatttagaaagtttaatctgtcacaggagaaaaaaaattaaaaattttcaaaaatttagaaaatttttacccgtaagtattacagtttcctaattatcctatttatttcccacttgcctttgacctagattatttagagtagggtttctcagcctctgcactaatgacattttgggccgaataattctgttgtaggaggctgtcctgtgtgttttagattgtttggaattatccctggcctctcacaytagatgccagcagtatcctcctcccccagtgtgacaacctaaaatgtctccagacattgccaaatgttccctgtggggcgggggcaacattgcccactgttaagaactactgctctagaccaaagaacacagcacagaggaaaggaaaaaaaaatccagttaagagaatgttaggtggagatgactatagtcatcaaacttttttccccatcaagtatttccaagctaacatagtgacaaaataattcctgtactctactggtaacgttaatctagtgctcttcctttaattcttccgttttgttttcttttgcagaattaagaatatgtttcct

SEQ ID NO: 734145 - DNA, 639 bp, Homo sapiens
ttaataaaattttcctctggaaggcctttataatttttattcccaatcatttttcaaatttagaaagtttaatctgtcacaggagaaaaaaaattaaaaattttcaaaaatttagaaaatttttacccgtaagtattacagtttcctaattatcctatttatttcccacttgcctttgacctagattatttagagtagggtttctcagcctctgcactaatgacattttgggccgaataattctgttgtaggaggctgtcctgtgtgttttagattgtttggaattatccctggcctctcacattagatgccagcagtatcctcctcccccagtgtgacaacctaaaatgtctccagacattgccaaatgttccctgtggggcgggggcaacattgccyactgttaagaactactgctctagaccaaagaacacagcacagaggaaaggaaaaaaaaatccagttaagagaatgttaggtggagatgactatagtcatcaaacttttttccccatcaagtatttccaagctaacatagtgacaaaataattcctgtactctactggtaacgttaatctagtgctcttcctttaattcttccgttttgttttcttttgcagaattaagaatatgtttcct

SEQ ID NO: 734146 - DNA, 587 bp, Homo sapiens
aaaagccttactcaagtggattcaagagacaggaattggaggcagcctacatagacaactcatacaaagagttggctgtcaaggaaacagagaagtgggcaatagctctagggagatgtggcgtcatcagaattttttttttttttttttttttttttttgagaagaagtctccctctgtcgccaggctggagtgcaatggcgtgatctcggctcactgcaacctctgcctcccaggtcaagcaattcccctgcctcagcctcctgagtagctggkactacaggctcacgacaccatgcccagctaatttttgtatttttagtagagacggcgtttcaccatgttgtccaggatggtctcgatctcttgaccttgtgatccgcccgcctcggcctcccaaagtgctgggattaccggcatgagccaccatgcccggccccatcagaaatattttttaagataggaagaaataatagcatgtatagatgccgtgggaatcatccagtggagagagaaacattcatgggtcaggagagaacatagagactttagaggaatgtccttgataaagtaagaaggggtgagat

SEQ ID NO: 734147 - DNA, 587 bp, Homo sapiens
aaaagccttactcaagtggattcaagagacaggaattggaggcagcctacatagacaactcatacaaagagttggctgtcaaggaaacagagaagtgggcaatagctctagggagatgtggcgtcatcagaattttttttttttttttttttttttttttgagaagaagtctccctctgtcgccaggctggagtgcaatggcgtgatctcggctcactgcaacctctgcctcccaggtcaagcaattcccctgcctcagcctcctgagtagctggtactacaggctcacgacaccatgcccagctaatttttgtatttttagtagagacggsgtttcaccatgttgtccaggatggtctcgatctcttgaccttgtgatccgcccgcctcggcctcccaaagtgctgggattaccggcatgagccaccatgcccggccccatcagaaatattttttaagataggaagaaataatagcatgtatagatgccgtgggaatcatccagtggagagagaaacattcatgggtcaggagagaacatagagactttagaggaatgtccttgataaagtaagaaggggtgagat

SEQ ID NO: 734148 - DNA, 606 bp, Homo sapiens
ctatcgcccaggctggagtgcagtgcagtggtgtgatcttggctcactgcaacctccgcctcctgggttcaaatgattctcctgcctcagcctcccaagtagctgggattacaggcatgcaccaccacgtctggctaatttttttgtatttttagtagagatgaggtttcaccatgttggtcaggctggtcttgaactcctgaccttgtgatccgcctgctttggcctcgcaaagtgctgggattataggcctgagccaccgtgcccggccattttttattttttkttttttttgttttttttgtttttttgagaaagggtctccctgttgtttaggctggagggcagttgtgtaatcatggctcactgcagcctcaacctcatggactcaggcagtcctcccaactcagcttcccaaagtgctgagattacaggcatgagccatcacacctggcctgattttttgttttttttagagacagggtcttgctcttaaacacaggctagagtgcagtggtggaatcatagcttactgtaacctcacactcctgggctcaggtgatcctctcacttcagcctcccaagtagctaggaatacaggcatgc

SEQ ID NO: 734149 - DNA, 577 bp, Homo sapiens
atcgcccaggctggagtgcagtgcagtggtgtgatcttggctcactgcaacctccgcctcctgggttcaaatgattctcctgcctcagcctcccaagtagctgggattacaggcatgcaccaccacgtctggctaatttttttgtatttttagtagagatgaggtttcaccatgttggtcaggctggtcttgaactcctgaccttgtgatccgcctgctttggcctcgcaaagtgctgggattataggcctgagccaccgtgcccggccattttttattttttgttttttttgttttttttktttttttgagaaagggtctccctgttgtttaggctggagggcagttgtgtaatcatggctcactgcagcctcaacctcatggactcaggcagtcctcccaactcagcttcccaaagtgctgagattacaggcatgagccatcacacctggcctgattttttgttttttttagagacagggtcttgctcttaaacacaggctagagtgcagtggtggaatcatagcttactgtaacctcacactcctgggctcaggtgatcctctcacttcagcct

SEQ ID NO: 734150 - DNA, 619 bp, Homo sapiens
tttctaactttgtcatgttcctagatggagaagaaatataaaatcttttaaagtaaaaaaacaaacaaaaagtctagagacagaaatacaagctcttgtcaccaataatagcagcagatgcttaagcaggaattaagcaatgaaactaataagaaactgagcatagaccttcayaccatgtttctatcgattccctctgcctcactgtaggacaagcagctaaaacctctcaggctggaagaacctgagacatcatctggttcacgacctgcttccagacaaggaataattcaatcatccagtgacaatggcttgcccctccctttctgaagatcagacagtctgtgcttagctttcctgctattcagaaggtctcaggagaaaagcaagttgagttttagggcaggaggatggtggcaggatcacaattggtggattcattcattccacctgtatggtcagagtttttactgcttaattatgtttgactttatctgcaaattgcctgcttggccttggcccctgataccggagaggttacgtgtattagatgagacggcattaagctcaacctcaactaaggaaatagacggattaacaaggaagtttggaagtttgg

SEQ ID NO: 734151 - DNA, 670 bp, Homo sapiens
ctccagaaggaatcaaccttggtgacatcttgattttggatttctggtttccaggactattagaaaataaatttccattgttttaggtcattatatttgctgtaatttattacagcagcctcaggaaactaacacrgatgtcatgactcaaagagtcctccatggttctgctccaaactggtgttacatgtcagcaccgcatcccacacctgaggaaccagggcaggctcttacaaacttgtttcctccgagaacatctgcttctccattctgaatgttctaggaaatgtacaagggaccatcattttgttgtaagtcaattcatttgaatttgtaccacttgaaaaatttacatctgtatgtttgaaaattcagttcaattgttgagcaagccttggcagccatcattgcaccaagtttaattatctttctggtattatcaagactcaacattagcactaattgtgctgggtccaactctaatgtcttcaaataattattagcaattgcttattatctcttttgaaaaccctaaatacatacctattttttaagacgttggctcattgagactggaaagaacgcagacttccattcttggggctgatgtgagtcagaacattgttcaggaaaataaaagtgtgtgggtttttgggtgccagtttgaaat

SEQ ID NO: 734152 - DNA, 569 bp, Homo sapiens
tttcctctctctcaggtcactttccctgggggtagtcagctgtcgtgtcacgaggacattcaaacagccctgtgggaagacccatgtgacaaggagctgaggcctccagcaaacagccaggtgagtgagccatctcagaagcagagcctccagccccggccaaaccttcagatgatgcagcccctgcccatatcctaactgcagcctcatgggagaggctgagccagaaccagctggagaaaccactccctgacttctgaccctcagaaacagtgccaaatcatgaatgtttattattttaagctgttaaactttggggataatttgttatgtggcagtagataagcaacacaagtaaaaggsattgctttactaagtgccttatgtgtattaatgtattcaattctcccaacaatgttatgtctttccagatgaagaccatgaggcacagagaggtttgttaacttgcccaaggccaaacagctggtaagtgggacaatcctggaggaacattgagtccagaaaggagatcagacttgcagattttttttttttttcgagatggagtc

SEQ ID NO: 734153 - DNA, 669 bp, Homo sapiens
cagtctgactacctggaagcagcactccaccctccagcccagcggccctcggctcagctgccaggtcaccggcaaccccgggagcgttggggcaggggctgctccgccagcctctgtgatgttcaggccgggctgcaccagcccgggacccctaggtgcccagaaacccacttcctcttgtttctgcccctgaacmagcttctcagggcagctgacaatcagacttagcacagatgtgcctcagtgttgctctcagagaaatgaacacaaggctagacgcagtagctcacacctgtaatcctagcactttgggaggccgaggtgggcggatcatttgaggtcaggagttcgagaccagcctggccaacatggtgaaatcccgtctctactaaaaacacaaaaattagccaggtgtggtggtgggcgcctgtaatcacagctactcaggaggttgaggcacaagaatcacttgaacccaggaggcagaggttgcagtgagctgagagtgaaccactgcactccagcctggacaatagagcgagattccatctaaaaaaaaaaaagaaaagaaaagaaagaaaagaaatggaaacaaatctcccaccccattcatcctgcccaccagacaggggcctctctggatccaggcggatagtttctgtttctggc

SEQ ID NO: 734154 - DNA, 669 bp, Homo sapiens
cagtctgactacctggaagcagcactccaccctccagcccagcggccctcggctcagctgccaggtcaccggcaaccccgggagcgttggggcaggggctgctccgccagcctctgtgatgttcaggccgggctgcaccagcccgggacccctaggtgcccagaaacccacttcctcttgtttctgcccctgaaccagcttctcagggcagctgacaatcagacttagcacagatgtgcctcagtgttgctctcagagaaatgaacacaaggctagacgcagtagctcacacctgtaatcctagcactttgggaggccgaggtgggcggatcatttgaggtcaggagttcgagaccagcctggccaacatggtgaaatcccgtctctactaaaaacacaaaaattagccaggygtggtggtgggcgcctgtaatcacagctactcaggaggttgaggcacaagaatcacttgaacccaggaggcagaggttgcagtgagctgagagtgaaccactgcactccagcctggacaatagagcgagattccatctaaaaaaaaaaaagaaaagaaaagaaagaaaagaaatggaaacaaatctcccaccccattcatcctgcccaccagacaggggcctctctggatccaggcggatagtttctgtttctggc

SEQ ID NO: 734155 - DNA, 606 bp, Homo sapiens
ggagaacatagccccatgagtgcttgaaaatgcacagtggacaggcaacaagagcccgtgcagtggttgcctctgcagaggggcacaggagacacttattatccactgtaaaaaggttttatacctgttaaaatgggaacctaggaatgtgttatctagtgaaagtggttgataagtttaatattttcaaataaaatagaatgggtcaggtgtggtggctcacacctataatcccagcactttgggaggccaaggcaggaggaccacttgatccaggagtttgagaccaggctggacaacatagcaagatcctatctctacaaaaaaaaaaaaaaaaaaaagattacccaggaatgatggcacacctgtagtcctagctacttagaaggctgaggcaggaggatcgcttgggtgcaagagtttgaggctgcrgtaagcaatgattgcaccattgcagtccagcctgggtgacagacctatctcagtcaatacatacatacatacatacacacacacatacatatgacatgcagcaaattttctcccctccccaaagaaaaataaaaggtagtgcctgggagtaggagggctatgtcacctttcctt

SEQ ID NO: 734156 - DNA, 638 bp, Homo sapiens
cgggccgtgggcaggggggaggacacttttgaggaacattccccatgcccatcagggccgcggcctatagcccagcggtagcttcaggcccagtacaggtgagggcctctcagctggaagggggaaggggacagccccgaggggtcactgactccctggtcacccrgaggctccctccgtgtgcagcacctgcctctgagcctccttcgcacgccagaggcagagctatgggtgccctggagtggctctttcagtgctggccccagaccaaagggagagtcaacaccgaactccctgatgacccgagcaactgtgccccagggcactttaatggccagtccttttgagaagtgtggtgagatcctccagtgctctgtggggagagcccgacaccctccccacgaagtgtccaggagccaggcatcttgtcgcccacacatccagcagagctatcctggcaggcctcagccagcccctagtgagaaaattgcagggttggaatcagcattttttccccttaaacattttatggttttgagaagctgaacttgcaaagaatatacagcgggaaagtgaaaaaagacccaattttagaaccacatgtggggccacaggaaaacgttagaaatatcttctgg

SEQ ID NO: 734157 - DNA, 610 bp, Homo sapiens
cagaaggcttgattttgaatacatgctctgtggattttgagcaaaggtctcaggaaatactagcagcatctttgggtgcaggcagaacatcataggcagagggtcagaaagtagtacccgcatccctctctacttggcatcccatgcagaggtggacatgtgctaggagcttctggattaactgtggggctgagaagtgcccctgctccctgttgctctctgttttgttttgatggggtaggcatgacagatatgggctttagtcttttccctagtttatttgattaacagaaataggttataacagtgagagtttgtggaagagaacatcaaacttttttttagtgaaatctttttttaacttttaaattcatgggcmcatgtgcagatttcttacatagttaaacttgtgtcactggggtttgttgtaaagattatttcatcacccaggttttaagcctagtacctattagttatttttcctgatcctctccctcctcccactctctgccctctaataggccccattgtgtattgttcccctctctgtgtccatgtattctcttcatttagctcctacttagaagtgagaagatgtgttatttgattt

SEQ ID NO: 734158 - DNA, 609 bp, Homo sapiens
gcctctgtcttcatatagccttctactctgtgtgtcctcatcatttttatctcttataaagacacccatcattggatttggggcccaccctaatccagggaaatctcatatcaagagccttaacttaattatacctgcaaaggtcctcattccaaataacctcatattctgaagttcggacagggtgtgtcttttttttttttaggggggttgcactatttaacccactatagaagtaaatatgtaagtacagaagtcaatttaaaaaataataaaagaggctgggcatggtggctcatgcctgtaatctcagcactctgggaggccaaggtgggtgaatcacctgaggtcaggagttcgagaccagcctggccaacatggcaaaaccctttctctactaaaaatgcaaaaattrgctgggtgtggtggtggatgcctgtaatcccagctactctggaggctgaggcaggagaatcgcttgaaccctggaggcggaggtggcagtgagccaagatcgcgccactgcactccagcctcggcgacagagtaagactttgtctccaaaaataaagtaaaaaataaaaataaaaataatgaaagtgatgtgta

SEQ ID NO: 734159 - DNA, 556 bp, Homo sapiens
ttataactttctctcagactccatcttccctaggggattagcagctgacttaaggcagaagcatttaactgcccaagtatctcagtacaccttctttttgttcctcccattcatggagctaattgcttcaggacatcttcatatgggtccttcttgtctctaacctcttatttctctgcaggaatctagaatcccctcaggttgaaaaagctagaaaatgtaagatctttaaagtcagcgatgcaggtgttggaccaggaaagaagaaaaattgagtgacccatggagattctgagcaccaaacaaatgtatcctaaaacagtgtttcttaagctatctttggaaaaggagcattttcctytaatacttcacagaccaatacttgcaaaaaaatttacaaaacagtgaattactagaaaaatgaaatcaagacaagtcctttttttagatttattagactcaaaattattttgcgaaattgccataaaagcttttaagcactggctctcaatttctgcggtcacctcattgtggtgcaatattttatgtttaatgt

SEQ ID NO: 734160 - DNA, 632 bp, Homo sapiens
tcttatcctctctgatgactccactctgttcctaccataaagtttacttcctaatatctcctcactcaggctacttgtcctttctgctttaagacttctccaagtgctcatcaaatctgcttactcatctttgataaagaattgaagccagctgaactctagacagtatataccgttatatcttctcaaatcctctattctgcccttgcgcgtttttcctctcatttaattttgaggacttccaaaactctgctttatwtgatgacatctgccaccatggggttaattatcacttacatacagaatgattgctatggactaaatttttgtgtcagctccaaattcatatgttgaaaactaatctccaatgtgatatttggaagtggggcctttgggaggtgatcaggtcatgggagaagagccctcaagaatgagatcagtgctcttataaagggctgggactggagttccccttccacatgacacagtgagaaggtatcttctatgaactaggaaattggccctcacaagacatggaatctgctggcacattgatattggacttccagcctctagaaccttgagaaataaatgtctgttgtttataagccactcagtctatggcattttgt

SEQ ID NO: 734161 - DNA, 585 bp, Homo sapiens
caaaagaaataaaaacatgcttaggaaaagacttgtacaggaatattcacagcagttttatttataattttcataaatcagaacctattcccagcacagtgtctatccatacaataatgtataagtaaactgtggtacatccgtacaatggaatgctacttagcaatgaaaagaataaactgttgcttsatggaaaagcatgaatgtatttcaaaaacattcagcaaaataagccttgcgtaaaagagtgtatagcacataattctatttttatgaagttcaagaatggacaaaacaaacctagagtataaaaattcagagtagtgtcttggttggaaattgcttgagcaagaacatgagagaacattctggagggtactaatgttttgtatattgacagatgtttgagtcacacaggtgaatgcatttgtcaaaacccagtgtattagtttgctatggctgccataacaaaatgctacagactgggtggcttaaacaagatggatttattttcataaaattctgggggctaaaagtcaacaatcaatcaagatatggacagggttggttccttcttagggctgt

SEQ ID NO: 734162 - DNA, 628 bp, Homo sapiens
acttgatctttgccgttaagaaatttgagtgacagaaaatcaatgcttagtgccaacaacttttgtctgttcattaaagtaggttctatgaggcagtggctctatgaggcagtggctcctgagcttggctctgggtcaaagtacctgagtaacggagttaaaaaaattttttttaatacaaagcttccaggtaccatcccagatcaactggaaaaagatctctagggtggggatcttgraaacccctctcccttcctctctcctgttctttctctctctttctttgcacttcctaggtcattccatagtctctgtgaaagtgatattatccctgttggtcctcctcagactctccaagatatgcagagctttgggccaggatcctacagccacgggtcatgcagagccagttggccacatcctttggggtgagtgatgcctagaagctaattataattccaaaaggtctccactgaattctaagaactgcccatctgtaccctctttcctggactttatttctttgaagacatccacttgccttaggccactgtaaaatttacgttgtaaccttcagtgtaatactcttcccagactcatttgtggcatcttcagccatttcgagtca

SEQ ID NO: 734163 - DNA, 620 bp, Homo sapiens
agtttgctggagccttgaactgccaggctcaagcaatcttcccacctcagcctcccgagtagctgggactacaggcgcatgccaccatgccaggctaattatttaaattctttgtagaggtagggtctgactatgttgaacaggctggccttgaacttctggcctgaagtggtccactatttaaggtctttgacagtgcagctttacgggtaatgacatgtattagttatctaataccatgtaacaaattactcccaaagttagcctctcaaaacaacaaaagtttctttttcatctcatagagtttctgaggtccaggaatctgggagtggctctagctctagtttccttgtgaggtggtggttcagtmcatcagctggggcagccgtcagtgacagttggaagtactgcttctagactcactcatatggatattggcaggcctcagttcttcaccacatgggcctctttacaggctgctggagtgtcctggagacatggcggatggctctctaccaaattgagttatgagacagagaaagcggggagagaaaagggagaaagaagggagagatgctaagatggaagccatagtcttttataacccaacctcagagtga

SEQ ID NO: 734164 - DNA, 630 bp, Homo sapiens
tctttgtttctcttccttgatcccacctaagttcattttggactcggggacttcgctttactcctggctttgggatgttgtccaggttctttaaagaaccagctccttcttatcttttaggcatcaaagaaccattgtccatcctacataagaaaactccttcctgggagtcactagcatttaatacgtttattcatatttactgctctttaaaataatcttatgtgtttgtttgaattgttcaattgcctttttctgccaactggaacgtaggtagcatggggtgactgtctttgtcctgcttactcatctctctcttctcagcatgcagaggaatatctgataaagagcaagtacttgggaaatacctgaggagggaaggaagaraagaaggaagagacagagggagggggggttagtactggcaataagttgataaagctactagccatttggacgacagaggtgtttagatggtttggtgtggggctgaggggcatcggaagctgtgattttgattgtgtctatgaacttggcaatgttaacggtcattgaacatgggtgcacattttgtccaatgcagtgaagaactctgaaggcagctccagtctttcagtggggtgtgcccat

SEQ ID NO: 734165 - DNA, 622 bp, Homo sapiens
aggaaagcatttagcgtagcatctggcacacagcagcactccacatcaacgctggctgttattgtattattatcatggttacttctgtcctagtttttactctattacatagtttgggtctatttgcacaatatacttctttaaaacacmcacgtacagtcaggtgcagtggctcacacctataatcccagcacattgggaggctgaggcaggcagatcacctaaggtcgggagttcaagaccagcctgccctacatggtggaaccccatctctactaaaaatacaaaaattagccatgcctggtggccagcacctgtagtcccagctccacgggaggctgaggcaggagaattgcttgaacctgggaaatggaggttgcagtgagctgagatcgtgccactgcactccagcctaggcggcagactgaggctgcatctcaaaacacagacacacacacacacacacacacacacacacagactttagaattatctcattgtcttcctacaagctgtctttttgcttctgcatgaacttttaaaccttctccaccaaggcaaggtaactttaaatggttttccccacagatagccagccaatgaaaaaattaccaatgtctta

SEQ ID NO: 734166 - DNA, 571 bp, Homo sapiens
atgctgttcacttgtgcctccagctgaaacatttttctcttcgctctgtttggagtccctctccctcccctctctctatctctcactgttcttcatggtacacttcttttttgggggttggcggggggacagagtcttactctgtcgcccagactggagtgtagtggcgtgatctcagctcactgcaacctccgcctcccaggttcaacaattctcttgcctcarccttccaaacagctgggtctacaggtgtgtgccaccaggcccagctaatttttatattttcattacagacaagccttcaccatgttgaccaggctggtctccagttcatggcctccaattcgtggcctcaagtgatctgttcacctaggcctcccaaagtgctgggattataggcgtctgccaccatgcccacctaattttcgtgttttcagtagagacggggtttcatgatgttgaccaagctggtgttggactcctgacctcaagtgatgcacctgcctcagcctcccaaagtgctgggattacaggcatgtgccactgtgcccagccttcatggcacacttct

SEQ ID NO: 734167 - DNA, 571 bp, Homo sapiens
atgctgttcacttgtgcctccagctgaaacatttttctcttcgctctgtttggagtccctctccctcccctctctctatctctcactgttcttcatggtacacttcttttttgggggttggcggggggacagagtcttactctgtcgcccagactggagtgtagtggcgtgatctcagctcactgcaacctccgcctcccaggttcaacaattctcttgcctcaaccttccaaacagctgggtctacaggtgtgtgccaccaggcccrgctaatttttatattttcattacagacaagccttcaccatgttgaccaggctggtctccagttcatggcctccaattcgtggcctcaagtgatctgttcacctaggcctcccaaagtgctgggattataggcgtctgccaccatgcccacctaattttcgtgttttcagtagagacggggtttcatgatgttgaccaagctggtgttggactcctgacctcaagtgatgcacctgcctcagcctcccaaagtgctgggattacaggcatgtgccactgtgcccagccttcatggcacacttct

SEQ ID NO: 734168 - DNA, 544 bp, Homo sapiens
gcagaaaaggcacctcttccaccatgactctgcacccgggcagcagtgggcctgaagcagggagtctggtctgcctggtggtgcccactgcaccgagctacccccagccctgtttcttctcttgaagtgccttttggtcagtcccagtgagagttggtggccaggagagaaggcaatgggcacaaagtgtgcttttgttctttcttagatcccaaggtccccttcagttggtcacaagaggaaatttctgacytgtacgatcacaccaccatcctgtttgcagccgaaggtaagaaaatttctccttcgccgtacacgtcctttgttgtagcatgaagtcaagtgcagtctctcctcacttcccccgggagttcagttttagaagtgactttctggtacatgccaccacatctgcagttttaattctggaagctgctgctgttccgtggtgataagcattctctctgtgcggattgctctgaaaagtcgatttctgtaatatttgcgtgttttcctctaatgctggcctttttgcttcccacag

SEQ ID NO: 734169 - DNA, 544 bp, Homo sapiens
gcagaaaaggcacctcttccaccatgactctgcacccgggcagcagtgggcctgaagcagggagtctggtctgcctggtggtgcccactgcaccgagctacccccagccctgtttcttctcttgaagtgccttttggtcagtcccagtgagagttggtggccaggagagaaggcaatgggcacaaagtgtgcttttgttctttcttagatcccaaggtccccttcagttggtcacaagaggaaatttctgacttgtacgatcacaccaccatcctgtttgcagccgaaggtaagaaaatttctccttcgccgtacacgtcctttgttgtagcatgaagtcaagtgcagtctctcctcacttcccccgggagttcmgttttagaagtgactttctggtacatgccaccacatctgcagttttaattctggaagctgctgctgttccgtggtgataagcattctctctgtgcggattgctctgaaaagtcgatttctgtaatatttgcgtgttttcctctaatgctggcctttttgcttcccacag

SEQ ID NO: 734170 - DNA, 532 bp, Homo sapiens
gacagttttgttttttttgtttttttgaggcagagtcttgccctgtcagcccaggctggagtgtgatggtgcgatctcggctcagcacaagcgccacctcccgggttcacaccattctcctgtctcagcctcccaagtagctgggattacaggcatgcgtcaccacacctggctaatttttgtatttttagtagaaacggggtttcaccatgtygtccaggctggtctcaaactcctgacctcaggtgatctgccctcctcggcctcccacagtactgagattacaggtgggagccaccacgcccagcatagactgttcttactcctgttgcatgtctggaatttttcttgataaaaaaatttggaaagaaaagggaaaaaggcaaagagctttaatttcaagtgaaaccatcttgtagactaaggttttgaaaggcaagtggcagggttgggagacctgtttctgaaggtgctcactctctgaaatctctcagaccccagcttcccagcagttttctctctgttctctgtg

SEQ ID NO: 734171 - DNA, 462 bp, Homo sapiens
tgggcaacagagcaagactctgtctcaaaaaaaaaaaaaaaaacatactaaatgatccatgaaagatgcctagagtcatacttggccctggtgaagttttcattaaattgcagacttagtcctaaggtagagtttttggcttggcggaattttcaacttgcaccttgcagcctgtgtgatttgtaaggttggattgtctcacatcrtcacctgctagagacatcactgggagcaatctctccctctctctataaataaaagggatcctgtttgccaccctatcctgaagcaatagctggacaaaaagcaaatctgaaaagtcaaatggaaaaagcctgacttcaatttcaggttccgtgttgtacacgagcatgattttggaggacctgggcaaccctcagagagagagaaaagtcatgcttttgttcttactcataagtgggagttgaacaatgagaacac

SEQ ID NO: 734172 - DNA, 520 bp, Homo sapiens
tgtgtgcccttgcccttgcttgctgtgaaaccctcatgtgtggccaggtgcagtggctcacacctgtaatcccagcactttgggaggccgaggtaggaggatcacttgagccaggagtttgagaccagcctgggcaacatagtgagacccattctcatgttatttaaaacaaataattatttwaaaaaaaaaatttttttaattttagactcatctaaactaagggagctgggagtaggtggccataccttggccctatgtgagtgactgtgatggaaatatcagtaggtaaccaagcttatgggtctgtgcatcagtgatccacacacaacacacatcttggctgtcggctgcagcagccatgtgtcccctgaatggggaagggcaaaaggagctatggctatgtgcctgggaggtggtcttcccaacgggatgatgatgctgtgtttcctgtctgagccttctagatgctaagtaaatgtgctcttagattaaagcctgttgcatctcaggtgactgc

SEQ ID NO: 734173 - DNA, 520 bp, Homo sapiens
tgtgtgcccttgcccttgcttgctgtgaaaccctcatgtgtggccaggtgcagtggctcacacctgtaatcccagcactttgggaggccgaggtaggaggatcacttgagccaggagtttgagaccagcctgggcaacatagtgagacccattctcatgttatttaaaacaaataattattttaaaaaaaaaatttttttaattttagactcatctaaactaagggagctgggagtaggtggccataccttggccctatgtgagtgaytgtgatggaaatatcagtaggtaaccaagcttatgggtctgtgcatcagtgatccacacacaacacacatcttggctgtcggctgcagcagccatgtgtcccctgaatggggaagggcaaaaggagctatggctatgtgcctgggaggtggtcttcccaacgggatgatgatgctgtgtttcctgtctgagccttctagatgctaagtaaatgtgctcttagattaaagcctgttgcatctcaggtgactgc

SEQ ID NO: 734174 - DNA, 550 bp, Homo sapiens
gcccaaatctatctgctctccaagtgatctttggagttttggtattctttctgatgtttcatatctaacatatctagaaagtactccatagaaaattgcttcatgtttccatgataattgcccatatgtgacagatttttctttgcaatagatgaagcagatggtgatttcaagttgcttcccatgtatccgagctgtttccagagtctgccctttctgtttctatgcagctatagagtggctgaccaggaggcgggagtggaggcccacacctgtaatcccagaactktgggaggccgagacgagtggatcacttgaagtcaggaattcaactgaccagcctggccaacatggtaaaaccctgtctttactagaaatacaaaaattagccaggtggtagtggcacacgcctgtaatcccagatatgtgggaggctgaggcaggagaatttcttgaacccaggaggcagagattgcagtgagccaagagtgcaccctccagcttgagcgacagagcaagactgtctccataaaaaaaaaaaaaaaaaaaa

SEQ ID NO: 734175 - DNA, 612 bp, Homo sapiens
tattaacccaggacttgcctggttgctggttctccagagatctccacagcagtggcaataataaagtctctcctccagagaccagggtctgcctctcttgtctggtgggaattttattccacaaaaattatgggcaccagctggggagaggcacaggggctgggtgtgttagacttctgagacttctctaagcagccatttcccaaaggttggcccagggagccccgatctgcagggaagtgctaagtgtgaagtgtcaggagagccccctgccctggtcgggtgggggagtcttctgtggcagatgaggtcctcctgaggtgcayggtgaatccccagagggactggaacacagggttacccctcaaatttccttttccagggagactttgtttatttgtgtgtttgttttcagtggcggtgaatataacagaccctgctctttctagcatgttctgggtcattccaccaatgacacccagggctgtgctctcaggaatgggtttggatttctctgtgggctgcccaggggcaactatcgggatagaagggtaggtagagaaggttgtggtcaagctgcatttgcatagcaagctcactgcattgataggt

SEQ ID NO: 734176 - DNA, 608 bp, Homo sapiens
gcatgggcccactgtcagtgggggtgatatattacacctcttgtggagggaactacaaagtcacatgacacgaggtgtggctgtggggcacgaagaggcactgggaacagtaatgcaactggggagagtggctttgggggcttctccttgaggggaaggctcttcccttagttggagttcggctcctgatccttgagtcctgggtcagctgctgggcaggggagggacaggtgccagaggagcgcttgccccccsaggcccagtccttcaacccccgtcaccttgctgctctttcactggatgggctcagctgtgttggcgctgagtctttgtctgcctggctctcagcaaatttggaggagaggagactgctctctgaaagctgatttaaaggaagcagggcatattggcagaatgttcattttatttattttattattgttattctcaattgcctcatctataaaatggggacaataatcctacctatttcatagggctattgggaggagggaaagagatgctatacatgtataaaacttttagcatagtatctggcaaataaagtgcccatgaaattttagctagagactctttttcttcaagag

SEQ ID NO: 734177 - DNA, 608 bp, Homo sapiens
gcatgggcccactgtcagtgggggtgatatattacacctcttgtggagggaactacaaagtcacatgacacgaggtgtggctgtggggcacgaagaggcactgggaacagtaatgcaactggggagagtggctttgggggcttctccttgaggggaaggctcttcccttagttggagttcggctcctgatccttgagtcctgggtcagctgctgggcaggggagggacaggtgccagaggagcgcttgccccccgargcccagtccttcaacccccgtcaccttgctgctctttcactggatgggctcagctgtgttggcgctgagtctttgtctgcctggctctcagcaaatttggaggagaggagactgctctctgaaagctgatttaaaggaagcagggcatattggcagaatgttcattttatttattttattattgttattctcaattgcctcatctataaaatggggacaataatcctacctatttcatagggctattgggaggagggaaagagatgctatacatgtataaaacttttagcatagtatctggcaaataaagtgcccatgaaattttagctagagactctttttcttcaagag

SEQ ID NO: 734178 - DNA, 580 bp, Homo sapiens
aagaaaagtccggctaaaattcatccttcgcttgaacactttcttaaaggactaaaacttaagatgtctgcccagtagttagtaatgactccaacaagtttcaaagttttgtttaggttggcttatttttatttttagtccttaatcataattaaaagatatggccatttctgatgaactgcactacttggaggtctacctgacagatgagtttgctaaaggaaggaaagtggcagatctctacgaacttgtacagtatgctggaaacattatcccaaggctgtaagtaattacaaatcagagaacttttgtgtctgtatttctcactatatgttacgtcttttatgattatcagcttaagaaaaagttttaagggtaayttcttaacaaattgagatgaacattttggtagatattctcttacttgttttagagtaactagatttacgttttatgtagatatttgaggaattttggaaatagaaaaaatggacatgcttgctattttttttaatgtcttgactattagaaaaattaatataattgttctcttcctaatatgtttaaaggtaatatctat

SEQ ID NO: 734179 - DNA, 638 bp, Homo sapiens
agcgagactccgtctccacaaaaaaaaaaaaaagtaaattcggtgacgtaccttgtctgacagtaggtgacaatactcccatttcagaaggggtctaccccataccctggaagaaggaatgtcgtctaacctactttgattgyaggtcacaataccccctacttcagaggagatcctgccatataccctggaagaaggggccacagaaagcatgaagaattggagccttgctctgtttctccacttcgtctgttagatcatggcctttgtgtccagtcatgtttctgtctggttgttcgtcacaactatccagtgcctaagagcacagggttcagggaacttccagagagctgaacacggggaggttcctggagggtggctgacccaagaaggtcagggaagctctgagcccctttccccacacctcaccctatgcatctcttcatctgtatccttggtaacatcttttttattttttttaattttttttagacagtcttgctctgtcgcccaggctggagtgcagtggtgtaatctcggctcactgcaacctctgcttcctaggttcaagtgattgtcctgactcaacctcccaagtagctgggattactgtgctatcacgcccggctgtatttttt

SEQ ID NO: 734180 - DNA, 531 bp, Homo sapiens
tgcactccagcctgggcaacaagagcaaaactctgtctcaaaaagcaaaaacaaaacaaaacaaaaaaagcagagtctctgctctcctgtagggttggaggccgaccacaaacaagcgcccaaatgcctgagacaggaacagcactgggtggtcacaggaggatggaaaaacccaaacagctgaaacaggaactaggcaaataaaccataggataacagaaaacccaagggagagaagatggccaaaactctggccagggtgacatgtccatgcttcttccagcaaacccagataaggaagaaaggrgacagtaattgaggtggaggtccctgaaatcccctccctttccagaatgcctaacgataattccatcctgtaactaaaagaaacacccataaaattaggaacccaaactccattgtgcaagactcattctcacgggcatgcctgcacttctctcttaaatgtgtatgttcactttgcaataaaagcttcttgcagctcggtgcagtgtcttacaactgtaatgc

SEQ ID NO: 734181 - DNA, 531 bp, Homo sapiens
tgcactccagcctgggcaacaagagcaaaactctgtctcaaaaagcaaaaacaaaacaaaacaaaaaaagcagagtctctgctctcctgtagggttggaggccgaccacaaacaagcgcccaaatgcctgagacaggaacagcactgggtggtcacaggaggatggaaaaacccaaacagctgaaacaggaactaggcaaataaaccataggataacagaaaacccaagggagagaagatggccaaaactctggccagggtgacatgtccatgcttcttccagcaaacccagataaggaagaaaggagrcagtaattgaggtggaggtccctgaaatcccctccctttccagaatgcctaacgataattccatcctgtaactaaaagaaacacccataaaattaggaacccaaactccattgtgcaagactcattctcacgggcatgcctgcacttctctcttaaatgtgtatgttcactttgcaataaaagcttcttgcagctcggtgcagtgtcttacaactgtaatgc

SEQ ID NO: 734182 - DNA, 634 bp, Homo sapiens
cttttgtctattgtgaatagtgctgttaggaacatgggtgtgcaaatacagagtgcacctgtaaaattctaaattagattctgtccctctcctgctcagaccttccaaagaatgaataagaaggagccagcttaggccagacctgaaggaagagcattttgggcagaagaaacrgctagtgcaagttccctgggggatattcgaggagagaaggcaggctggcagggctggagcagagcacaaggggcagagcagttgtggggacagtgtgggggtcagaggtcagagtcaggactacatgtatgggcaccacaagttttcattacctgccgctctgggtggttcgtgagaggcagcagcctgcaaggatgaggactcgggctctggagacagcccatgaggttcaaagcctggctgtcccacgcagtagctgtgtgctttggtccaggaacctaccctgtctgtgccttggtttcttttatctctaccttccagcctccctccagtgccccctattgacagagcttcacagggagtagctgctaaggcagaaacatcacgggatcgcagagtcaaagcccgcagatctctgtgcagagtgtggaaggggggcttttggggatgaaagacaatc

SEQ ID NO: 734183 - DNA, 634 bp, Homo sapiens
cttttgtctattgtgaatagtgctgttaggaacatgggtgtgcaaatacagagtgcacctgtaaaattctaaattagattctgtccctctcctgctcagaccttccaaagaatgaataagaaggagccagcttaggccagacctgaaggaagagcattttgggcagaagaaacggctagtgcaagttccctgggggatattcgaggagagaaggcaggctggcagggctggagcagagcacaaggggcagagcagttgtggggacagtgtgggggtcagaggtcagagtcaggactacatgtatgggcaccacaagttttcattacctgccrctctgggtggttcgtgagaggcagcagcctgcaaggatgaggactcgggctctggagacagcccatgaggttcaaagcctggctgtcccacgcagtagctgtgtgctttggtccaggaacctaccctgtctgtgccttggtttcttttatctctaccttccagcctccctccagtgccccctattgacagagcttcacagggagtagctgctaaggcagaaacatcacgggatcgcagagtcaaagcccgcagatctctgtgcagagtgtggaaggggggcttttggggatgaaagacaatc

SEQ ID NO: 734184 - DNA, 576 bp, Homo sapiens
ccaaattacatgagatgagctagggatcctctccaagatcacagacttttctatgacccctgacaggccaggcgtagggccatgaacatgagtgatttgagtcaagcaggtgcactatccaacacacaccttacagccctaataatattttattatacatactattatttattaatagaaagtttatatttgtaatagagtcttaaatatttatataaaagagctacatacattaacagggcttacatcattaatatagggtaatactattctcactttcaattgaggaaacaggctcagaacactaataattagttcgagatgatggagctgaaaagccagactttatatgsaatgtttctgatttctaaatggcaaaaatttacatatttgttaagaaacgctattttgggtcaggcgtggtgatgtgtgcctgtcctcccagccactctggaggccaaggtgggaggattacttgaggccagaagttggaggctgcagtgagccatgattgtaccactgcactccagtcggggcaggagagtgaaaggctgtctcaaaacaaacaaaaaatat

SEQ ID NO: 734185 - DNA, 604 bp, Homo sapiens
ttatgagttcttccttgaggaaagattccaaggtgctttgcaaacataatcttagcaggtttatcagattagaaagataaatactgaaaggtaaaattaatttggtcatacttaatcttcttgagaaattaggatcactaattatcaaaacaaatttaatgagaaaggccaaagctcctatttaagggaagataaacaatgtaatttagaaacagaatctgaaayatgaacacaaaagtatgaatcttttaatctgtgtgtcagttttataaaactcatttaagaaatgaattgaaactaattagcgttttctactatttcagaaaggcaacttccttctcctgaaaaacatcctgtttaatatgtattgtaaagcatggcgtatgctgtctttgttcatgcacattttggacacttttttaaaaagatagattaattaattagttcaaagcattagttaattctaattgaaatgcactactcatgcaggtgaatgggttaagattatgtaattttttttcctgtagtaacataagaaaactcacttaaaattcatacatattgaatacagaaacaaagccacccagttcatgcagatataact

SEQ ID NO: 734186 - DNA, 604 bp, Homo sapiens
ttatgagttcttccttgaggaaagattccaaggtgctttgcaaacataatcttagcaggtttatcagattagaaagataaatactgaaaggtaaaattaatttggtcatacttaatcttcttgagaaattaggatcactaattatcaaaacaaatttaatgagaaaggccaaagctcctatttaagggaagataaacaatgtaatttagaaacagaatctgaaatatgaacacaaaagtatgaatcttttaatctgtgtgtcagttttataaaactcatttaagaaatgaattgaaactaattagcgttttctactatttcagaaaggcaacttccttctcctgaaaaacatcctgtttaatatgtattgtaaagcatggcgtatgctgtctttgttcatgcacattttggacacttttttaaaaagatagattaattaattagttcaaagcattagttaattcyaattgaaatgcactactcatgcaggtgaatgggttaagattatgtaattttttttcctgtagtaacataagaaaactcacttaaaattcatacatattgaatacagaaacaaagccacccagttcatgcagatataact

SEQ ID NO: 734187 - DNA, 603 bp, Homo sapiens
caggctggaataagctagatggataattttagcctatatggatttgttcatttccattttgcaaggacattctatagtaattcaaagttgttaaggtaggataactattctgaattttttcccagtcatcttctatagggctcatttactgtctcagagttttacctgaaggaaagaaaatgagcagttatttagaatttatggtgctagtcattgtgcttccaacatgtgaaggtaaatctgcatgaaagaggtacaactcccatttacaggtaagaaaatctgggctcccaragattaagtaccttgcccaagaacccacagattagggtttggaacagcttttcctgactccaaatcttaaacaatttctatttcttctcctgtacattatagtgtgatcctactgggtttaataacatttcaacgttaagaaaagaatggtcctacaaggcttaattcacttttgatatggattctaacccagcaatgctcatgggatgtcagcacagaaatggttgtgattgaaaatatctcaggaggatcccatattaccgactctgagaggagaaatatgatggggctttatacacactttaacca

SEQ ID NO: 734188 - DNA, 603 bp, Homo sapiens
caggctggaataagctagatggataattttagcctatatggatttgttcatttccattttgcaaggacattctatagtaattcaaagttgttaaggtaggataactattctgaattttttcccagtcatcttctatagggctcatttactgtctcagagttttacctgaaggaaagaaaatgagcagttatttagaatttatggtgctagtcattgtgcttccaacatgtgaaggtaaatctgcatgaaagaggtacaactcccatttacaggtaagaaaatctgggctcccaawgattaagtaccttgcccaagaacccacagattagggtttggaacagcttttcctgactccaaatcttaaacaatttctatttcttctcctgtacattatagtgtgatcctactgggtttaataacatttcaacgttaagaaaagaatggtcctacaaggcttaattcacttttgatatggattctaacccagcaatgctcatgggatgtcagcacagaaatggttgtgattgaaaatatctcaggaggatcccatattaccgactctgagaggagaaatatgatggggctttatacacactttaacca

SEQ ID NO: 734189 - DNA, 603 bp, Homo sapiens
caggctggaataagctagatggataattttagcctatatggatttgttcatttccattttgcaaggacattctatagtaattcaaagttgttaaggtaggataactattctgaattttttcccagtcatcttctatagggctcatttactgtctcagagttttacctgaaggaaagaaaatgagcagttatttagaatttatggtgctagtcattgtgcttccaacatgtgaaggtaaatctgcatgaaagaggtacaactcccatttacaggtaagaaaatctgggctcccaaagattaagtaccttgcccaagaacccacagattagggtttggaacagcttttcctgactccaaatcttaaacaatttctatttcttctcctgtacattatagtgtgatcctactgggtttaataacatttcaackttaagaaaagaatggtcctacaaggcttaattcacttttgatatggattctaacccagcaatgctcatgggatgtcagcacagaaatggttgtgattgaaaatatctcaggaggatcccatattaccgactctgagaggagaaatatgatggggctttatacacactttaacca

SEQ ID NO: 734190 - DNA, 584 bp, Homo sapiens
ttagggtttggaacagcttttcctgactccaaatcttaaacaatttctatttcttctcctgtacattatagtgtgatcctactgggtttaataacatttcaacgttaagaaaagaatggtcctacaaggcttaattcacttttgatatggattctaacccagcaatgctcatgggatgtcagcacagaaatggttgtgattgaaaatatctcaggaggatcccatattaccgactctgagaggagaaatatgatggggctttatacacactttaaccaatcttgcatccaaggtatttagtggttaactgctgtttctgtggcattttaaaaaagactatattggcttgctaaacmgcactcccccaaatactaatattagaatccagtagtaggtggagacatttttttctgccatgtagactgctgctaaaactccaaaagtgtacagagctatgacaaatgcacagaacataatgacttcagtatttccaaccctattgtgagagaaggaagtatgtttttatgtttagtagcagtattatcctttaagtaaaaaggcaaaatgattgctttactgtcagt

SEQ ID NO: 734191 - DNA, 622 bp, Homo sapiens
aagccaagcaaagggtgttgaagacaagacacttaactgtggccaaagcttctgcacagtccagcaagacaaggacataaaatctgtagaaccgaatgatgtgcagatcactggtgacactggctgccagttacggcagtatttacggtggagtggttggtgaagccagattggaataggtttaaaaatgaatgaaaggaaaatacagaattatcctaatagagaagtcattcaagaagcttggctttggacaaatgaactttccttcyactgtataataccattaaattctcaagagaaatgtaggacatctcttaaaaaaggatctagtctttggagaaatctataatcatatttgttgatgtatcagagattactggacaaagttctcccagtttatctgtttattcattcatttctttattcttaattaatcaagcattaaagtagcaaacatgaatttaatatctatagtgtgtaagatacttgacaagaccttaatgggggagattatagacctttttatcaggctgctgtgaactaagctgagagggaagcaataagtagcacctacctctcccatcttaacaaaataagacaaaaaaaatgaataaggcaaata

SEQ ID NO: 734192 - DNA, 703 bp, Homo sapiens
acaacttttaagaaatccaataattttttctccttgtcttcatattatttctttggaagtaggcatggctggaaaacatttaagctgagagaaaaaaaggatcagggaacatatttgtagttcataaagagaataggaataatttgaaatgtaaactttttttacgtttcctttaaaaattccccrataacaacagtctccataagaagcagtagaacgtaatagttaaggcttgtgtcaggccacctaggtttgaatctgtcctttaaagtgggaggttgaacaagttatttaataactctgtggatgcttcaattttcttaactgtacaatggggataatgaagttacctacctataaggattagatgagacttatctataaagtgcttagagtagtaaactgctagaatatagtaggtgttcagtaaatgttgtatattattaccactgaattctattatttataatactaaatagagtagttaaattggtcaagcaatttaaatgatttctgcctacagaaacaaaaggtatggtcaattttctataatttttagattaggggttttcaaaaagtaatgcaaatgtcagaaaaggatatacataaaggtggtatttcttctttaaaaggtgtttgcatcaattgagcttttcttcctcaatagagacatgtaatggggttaagtaatttaaaggaggaa

SEQ ID NO: 734193 - DNA, 650 bp, Homo sapiens
ggtcacagagaggaacttgaacagacaggctttgctaagttctgccaagttattatcattaaatcataccccctttgtccaattacatttttccacgactctcccatttccatcaaacttagcataaaaatacatagtttggccgggcatggtggctcatgtgggtaatcccagcactttgggaagctgcggtgtgaggggtgtgagaatggcttgagcccaggagttagagaccagcctgggcaagatggtgaaacctcatgtctacaaattaaaacaaaaaaattaaaatcagccaggtaaggcagcgcagcctcagaaggctgaggtgagagggttacttgagtccaggaggttgaggctgcagtgaactatgatcactgcactccagtctaggtgacagagtgaggcactgtcagaaataaataaataaataaataaataaataaataaataaatraatgatagaggacggttggatggatggatagatagatagatagatagacagatagatagatagatagatagataggtttaactacttcttgggactttgtttccttatgaaggcttccatgtcacataaaactcaaccagggaccctaagagggtggaggaatatctttcattccttttagtacaaacag

SEQ ID NO: 734194 - DNA, 650 bp, Homo sapiens
ggtcacagagaggaacttgaacagacaggctttgctaagttctgccaagttattatcattaaatcataccccctttgtccaattacatttttccacgactctcccatttccatcaaacttagcataaaaatacatagtttggccgggcatggtggctcatgtgggtaatcccagcactttgggaagctgcggtgtgaggggtgtgagaatggcttgagcccaggagttagagaccagcctgggcaagatggtgaaacctcatgtctacaaattaaaacaaaaaaattaaaatcagccaggtaaggcagcgcagcctcagaaggctgaggtgagagggttacttgagtccaggaggttgaggctgcagtgaactatgatcactgcactccagtctaggtgacagagtgaggcactgtcagaaataaataaataaataaataaataaataaataaataaatgaatgatagaggacggttggatggatggatagatagatagatagatagayagatagatagatagatagatagataggtttaactacttcttgggactttgtttccttatgaaggcttccatgtcacataaaactcaaccagggaccctaagagggtggaggaatatctttcattccttttagtacaaacag

SEQ ID NO: 734195 - DNA, 624 bp, Homo sapiens
cagctctaactgtccagattaaaaatttactgttcaacactacagttaaatagcaaattcttaaagaatgtccgttaaaggaaaaaaaaaattagagaaacactttttaaagaatttaaaattttgaatataatgatgactgggacggatctaaatagacatcaatattcagtagggtagaatacttattaaatagatagtcaaataaggtacatttcaagccacagaagactattatttgattaaagatttaaatcagatttgaggtcatttctacctcaaatcagcatgcctcacacaaatgtctttgtttcatttaaaattttcccaactgccctacttcctaaacaccaagggaatcaccagctgctatcctggtatttaagcccaaatctttggcattatctttactttcaaatctttctccttccacatatacacatttatcaactttagccacttcctttgstctgtcagtcctgttttgggacctcgtcgcttcctgattagaatattatcagtttcattctggctttctagtgggcagcatctacctatgtttctaatcttatatgaaacacatatatacaaactacacatatagtacacatacaattagttcat

SEQ ID NO: 734196 - DNA, 618 bp, Homo sapiens
acagggtatccagaagtaacctatgtttcagaattcattgaactgtggaaacgaaattaatataagaaagcttaacactaacaaaaatacacaataagagaaggaatctaaaggaataaaaaatactgaagatgctttaaaagggaagtaagttggctgggcaagatggcttacacctgtaatcccagcactttgggagggcaaggtgggtggatcacttgaggtcaagaatttgagaccagcmtagccaacatggtgaaaccctgcctctactaaaaatacaaaaatgagccgggtgtggtggtgggcacctgtaatcccacctactcggaaggctgaggcaggagaatcacttgaacctgggaggcaaaggttgcagtaagctgagatcatgccagcctgggtgacagagcaagactcttgtctcaaaaaaaaaaaaaggaagtaagttttggaaattgctgtgtagttacaggatataccaagccttgaatcacagtttagtttagtgcatgagccaacatgaaaaaaaaaatgtaaatgagaaaaataaaaatgaaaattattaaccatctcataagataattttcttctttttttccattaatataaaggtat

SEQ ID NO: 734197 - DNA, 526 bp, Homo sapiens
ttaactgaaagttttccctttgatatttatgaaataaaatccttctcttttcttaatctttgatgtgtcaaaacacgtggcttctactattaaacaaacaccaggcagttcgaccttcaaagccgttttttttttttttttctttcaaagttytaacatagaaaatcagtgagatgtcagcagagggtacaagaaaaaaaaatcctccacctgcatagaagaaaataaggaacagtcctctttgggtcttcaaagtaatggagggacaagtccaggctaaaaagagagaagaattctgggagatgttacagagcactacttcatttgatatttcacaaagcatcagtttttcaaaagcgctacagaattgaaactaaagatattatcttgagaagaatcattgggcatccaaaactcagcctccccttctcctttcactggaaacgtttattaaaggtatgtgcctaacatacccctgtgaaaaggcagcaaataagagatttttaaattttttgagtatctgtct

SEQ ID NO: 734198 - DNA, 526 bp, Homo sapiens
ttaactgaaagttttccctttgatatttatgaaataaaatccttctcttttcttaatctttgatgtgtcaaaacacgtggcttctactattaaacaaacaccaggcagttcgaccttcaaagccgttttttttttttttttctttcaaagttctaacatagaaaatcagtgagatgtcagcagagggtacaagaaaaaaaaatcctccacctgcatagaagaaaataaggaacagtcctctttgggycttcaaagtaatggagggacaagtccaggctaaaaagagagaagaattctgggagatgttacagagcactacttcatttgatatttcacaaagcatcagtttttcaaaagcgctacagaattgaaactaaagatattatcttgagaagaatcattgggcatccaaaactcagcctccccttctcctttcactggaaacgtttattaaaggtatgtgcctaacatacccctgtgaaaaggcagcaaataagagatttttaaattttttgagtatctgtct

SEQ ID NO: 734199 - DNA, 752 bp, Homo sapiens
caggacatctgtgcacttccctggagccacaatgttcccaagttccctcctcttacagggacctcccggtgacacctgtcatgcgggccaggctccagcccagcggcctgcacagcttatctgggcaccaggcgcggcctgaacacggcctcctctgagktgagttatgcccttggctttgccgagcgacagctgccatccgtgggatgcccctccccagccctgccctccacctgctcctcagggaacgggcctctggaaacttctttcttcactgacagggaagggcctgccggccttctttacctggcatctgagggttggctcagggccagtcctgggctgtatggacagataggacgctctctttccctcagatgcctacagccaggtggggaggcaaacccatgacaaacagtgcgacagcttgtccctgagagctcacgtgtactaggagggtgcacgggggcccacaggaggggcgaggggcggggagggggacgggggcaggatgggctgcacagaggaggtgtgctgactcgctcctcctgcccggtggcacattggcctggtcagggctacccccaatccagggccccgcaccccagcctaggttccattaggttccagctacctgccgctcaggccctcggaagctgtgtggagaagcggtcccagagtctccctctggaggcaagatggcatccagaggttcgccactgtgaggattatgtgacgcccctggctgtaag

SEQ ID NO: 734200 - DNA, 554 bp, Homo sapiens
aaatgtccaattaattaggcagctttgcacagaaggggcccatgatgaacccttttgttaccggaaaggggtccagatccagaccccaatagagggttcttggatctctcaaaagacagcataaagtgaaagcaagtttattaagagaccaaaggaataacagaattggctactccacaggcagagcggccccgaggggtccacttttatggccatttcctgatgatatgctaaccaaggggtggattattcatgaatgttccaagaaagggataggcaattcccagaactgarggttcctcaccacttgaaaccatataggataacttcctgacgttgccatggcatttgtaaactgtcatggtgctgatgggagtgtctcttagcatgctaatgcattatcattattgtataatgagcagtgaggacgacgaccagaggtcactttcctcgccatcttggttttggtgggttttggccggtttctttaccacgtgctattttatcagcaaggtctttatgacctgtatcttgtgccggcttcctatctcatc

SEQ ID NO: 734201 - DNA, 554 bp, Homo sapiens
aaatgtccaattaattaggcagctttgcacagaaggggcccatgatgaacccttttgttaccggaaaggggtccagatccagaccccaatagagggttcttggatctctcaaaagacagcataaagtgaaagcaagtttattaagagaccaaaggaataacagaattggctactccacaggcagagcggccccgaggggtccacttttatggccatttcctgatgatatgctaaccaaggggtggattattcatgaatgttccaagaaagggataggcaattcccagaactgaaggttcctcaccacttsaaaccatataggataacttcctgacgttgccatggcatttgtaaactgtcatggtgctgatgggagtgtctcttagcatgctaatgcattatcattattgtataatgagcagtgaggacgacgaccagaggtcactttcctcgccatcttggttttggtgggttttggccggtttctttaccacgtgctattttatcagcaaggtctttatgacctgtatcttgtgccggcttcctatctcatc

SEQ ID NO: 734202 - DNA, 616 bp, Homo sapiens
cctggcctagcatagttattttgaagtccatcagttgtatataacaatggttcattccttcttattgctgtgttgcatttcattgtatggctatgccatatttattcatccattcacctggtgatggacattggggctgtttccagcttttggctatgatgaatcaagttgctgccagtctscatgtagatttttttttttttttttttgtagacagagtcttgctctgttgcccagactggagtgcagtggtgcgatcttggctcactacagcctctgcctccttggttcaagcgattctcctgcttcagcctcccaagtagctgggactacaggtgcccaccaacagcccagctaattttttttgtatttgtagtagagatggggtttcactatgttggccaggctggtcttgaactcctgacctcgtgatctgcttgccttggcctccgaaagtgctgggatcacaggcgtgagccaccacacctggccacattgctgttgaggaggtgcataggagcagaatgactgggtcatatagtaggtttcactttttaagaagtgacccaactgctcttcaaagtgaccataccgctttacatgcctctgagcacat

SEQ ID NO: 734203 - DNA, 616 bp, Homo sapiens
cctggcctagcatagttattttgaagtccatcagttgtatataacaatggttcattccttcttattgctgtgttgcatttcattgtatggctatgccatatttattcatccattcacctggtgatggacattggggctgtttccagcttttggctatgatgaatcaagttgctgccagtctgcatgtagatttttttttttttttttttgtagacagagtcttgctctgtygcccagactggagtgcagtggtgcgatcttggctcactacagcctctgcctccttggttcaagcgattctcctgcttcagcctcccaagtagctgggactacaggtgcccaccaacagcccagctaattttttttgtatttgtagtagagatggggtttcactatgttggccaggctggtcttgaactcctgacctcgtgatctgcttgccttggcctccgaaagtgctgggatcacaggcgtgagccaccacacctggccacattgctgttgaggaggtgcataggagcagaatgactgggtcatatagtaggtttcactttttaagaagtgacccaactgctcttcaaagtgaccataccgctttacatgcctctgagcacat

SEQ ID NO: 734204 - DNA, 616 bp, Homo sapiens
cctggcctagcatagttattttgaagtccatcagttgtatataacaatggttcattccttcttattgctgtgttgcatttcattgtatggctatgccatatttattcatccattcacctggtgatggacattggggctgtttccagcttttggctatgatgaatcaagttgctgccagtctgcatgtagatttttttttttttttttttgtagacagagtcttgctctgttgcccagactggagtgcagtggtgcgatcttggctcactacagcctctgcctccttggttcaagcgattctcctgcttcagcctcccaagtagctgggactacaggtgcccaccaacagcccagctaattttttttgtatttgtagtagagatggggtttcactatgttggccaggctggtcttgaactcctgacctcgtgatctgcttgcctyggcctccgaaagtgctgggatcacaggcgtgagccaccacacctggccacattgctgttgaggaggtgcataggagcagaatgactgggtcatatagtaggtttcactttttaagaagtgacccaactgctcttcaaagtgaccataccgctttacatgcctctgagcacat

SEQ ID NO: 734205 - DNA, 630 bp, Homo sapiens
aagtgggtgatttatggttagccccggatccataactttcatttcctgactgatatatcagaagcttcatgtataaaggcgcattagatttagtaagtgtaaaagacttaagttgaggtcatttctgtccacaagctgttcatggtgtagctgttcatgtagctcagctgtgggaatggcctggccctatgtgatgcggaaagacagccaagggggacagtggcacatgcctgtggcacttggttctgtgtgtggtctcctttgtatccccaggaactctctgcaataggaaggtgatggccaggatctcattttacagaggaggacactgaggcccagagaggttaagtgacttgtctgagggttaacagctcctgggtggcaggatttacattggcgctcagatgcatctgaacyccaacctggagtggtgccagcacagagcaggtgttcagtaatgtttgctgacctatgtgatggttaatatcatgcgtcagcctgactgagccaagggatgcccaggtagctggtaaagcataatttcaagttgtgtctgggagggagtttctggaagagactggcacactgagtaaggatctgccctcaccagtgtgggtggatatcatccaa

SEQ ID NO: 734206 - DNA, 562 bp, Homo sapiens
cgcattggctcacgcctgtaatcccagcactttgggagtccaaggtgggcaggtcacaaggtcaggatttcaagaccagtctgggcaacatagtgaaaccctgtctctactaaaaatacaaaaattagccaggtgtggtggtgtgcacctgtaatcccagctactcgggaggctgaggcaggagaatcatgtgaacccaggaggtggaggttgcagtgagctgagatcatgccattgcactctagcccaggygacagtgcaagactccatctcaaaaatgaaaaaaaaaaaaaaaaaaaaaatcatgaaagcatccatagactgtcccactggaagcaatgcaactccccagtgtactctccaaaatgaagtaaatgttcaaagtacataaaagaaaccaagttaagtataaaatagttaaaagttttgagacttctactaaaaaacgatagttgtttttgaatatagattcctggtcctttattcaaaacccttggggcaaggtgcattttggaattcagatttatgttttgttctttagagtaagatgcataaactatat

SEQ ID NO: 734207 - DNA, 635 bp, Homo sapiens
atatctggcaggcaggatcctttcccataacaccagagagattgccaggctggggaggaaagactgttttgcaggcagccctcggagtgaaacatggagttcttctgactgaaggtaatgaaaagaatggcgtaacaaatacgaactgcaatgctaacaaatgcctgagtgtggaaggtcaggtatgggagtcattggatactaggggttctttttctttttctttcttttttttttaaattttattattattatgctttaagttttagggtacatgtgcacaacgtgtaggtttgttacttatgtatacatgtgccatgttggtatgctgcacccattaactcatcatttagcattaggtatatctcctaatgctatccctccccgctccctccaccccacaacaggccccagtgtgtgatgttccccttactgtgtccatgtgttctcrtttttcaattcccacctatgagtgagaacatgcggtgtttgtttttttctccttgcgatagtttgctgagaacgatggtttccagtttcatccatgtccctacaaaggacatgaactcatcattttttatggctgcatagtattccatggtgtatatgtgccacattttcttaatccagtctat

SEQ ID NO: 734208 - DNA, 610 bp, Homo sapiens
gaagatgaataggctgggagacttggcctacaaggtatcaagtattattgcaaagctatagacattaaaaaaaatgaaatattcactaacagaaaataaagtatagctaaacagatcaacatggatgaatcttagaaacatgtaacatattgaatgaaacaaagccaagtcacagaagactagaagcaatataacatcatggctgaggcaggagaatggcgtgaacctgggaggcggagcttgcagtgagctgagatcgcaccactgcactccagcctgggcgacgagcgagactccgtctcaaaaaaaaacaacccttaaaatcaagtaaaacaaaaaaatatttttaagaatacctctaaaatgtaaaaggattatttttaaaaagataygagaatactgatgaaaaaaggaaaaaaaattttggtagaaggccttctagtggaggggcaggttgatgggaaagggacacagttgataggacagtacggattatgttctagttgttacactgggtagcaggttatgaagttcacgttattaagcttcttaattggttgggcacggtggcttatacctgtaatcccagcagttgggaaggccaaggcag

SEQ ID NO: 734209 - DNA, 569 bp, Homo sapiens
atacctatctatttgttgataactaaaattaaaatcctgagtcccccacccaactgaatggaccctcttttggccaaggggacccctgagaaaccttaaaaactgagttcctggcaatggcagagtcagacatgcctcattataacccctcccttctgtggcttagacacgtgacgagccgttaaaatagagatcacaagactgatggaacagactctttgtggcaataagataccaaattacaaacaggatctaaggycacaccaggaaaaggttgtcacacacccctacacttaaagaataacctatgttctgggccaggtgcagtggctcgcacctgtttgggaggccaaggtgggagaactgtttgggcccaggggtttgagaccagtctaggcaacagagtgagaccctgtctctacagaaaaaaaaaaaaattaattaactgagtgtggtggcatgcacctatagtctcatctactcgggaggctgaggtgggaggatcgcctgagcccagaaggttgaggctacagtgagccatgttcacgccactgcactccagcctgggt

SEQ ID NO: 734210 - DNA, 569 bp, Homo sapiens
atacctatctatttgttgataactaaaattaaaatcctgagtcccccacccaactgaatggaccctcttttggccaaggggacccctgagaaaccttaaaaactgagttcctggcaatggcagagtcagacatgcctcattataacccctcccttctgtggcttagacacgtgacgagccgttaaaatagagatcacaagactgatggaacagactctttgtggcaataagataccaaattacaaacaggatctaaggtcacaccaggaaaaggttgtcacacacccctacacttaaagaataacctatgttctgggccaggtgcagtggctcgcacctgtttgggaggccaaggtgggagaactgtttgggcccaggggtttgagaccagtctrggcaacagagtgagaccctgtctctacagaaaaaaaaaaaaattaattaactgagtgtggtggcatgcacctatagtctcatctactcgggaggctgaggtgggaggatcgcctgagcccagaaggttgaggctacagtgagccatgttcacgccactgcactccagcctgggt

SEQ ID NO: 734211 - DNA, 632 bp, Homo sapiens
agttctttcacattccaatttattagatccccttgtgaatatttattaatgtctaggttaatatgttaataaagagtctactgagaagagtccattaagaaaatagaggacagggattttgtgtttctggtataagtgtgaggatatataattctggatatttacagaaagataaatccttgacaatagttttaccagaaaaaaaagataaaattattaggagtagtacaaagaaatatgtttcagtaattgtggtattaggtaatatttaaaataaatgttgaccatatactccatakcactagatttggggaacactgcaattaagtttatggttacattttataaagtagcaaatgaataccaagttatcttcaaataatatgcatgcattattacaggccagtatgttatacttggatctctctgatgaaagtaagataaaacaaagattctttgttacagttttggggaagttggcaagaaattacgcatctgtttctgtcaacattacagtattggggatatgtagtttctacatttctatggatgttcaatgtttatcctgttatcgatgcttattctttagaattatcctaaatttcttattttcttttctgttgatattgtaa

SEQ ID NO: 734212 - DNA, 642 bp, Homo sapiens
agattacagccagtactatctgctcattttcttgtgtgttatttgagattaccctgtaaggatgcagcatgaaaatggaacttgacttgcccaatcttactggtgctgagaaagcaacttattggtattgtgatcaggaagtgattgtagacaccttaatcactaaagcactacttatgtgattctctgtgatgttttcacagccattcaaatgaagtttcattgaaagttattgagaatgtgaaaagtattctgcaaaaagaaatattttaaaatcstatttcttaagtggcatatcaagatcaatgtattagatagctcttttagactagatttttgtctagagcaacttacatagattaactctcaaaactagaaattattcatcctcttactgatgacattactatattaggccagtctcacattgctataaagaagtacctgagtctgggtaattcataaagaaaagaagtttaattggctcatgggtctgcaggctgtacaggaagcatagtgacatctgcttctggggaggcctcaggaagcttccagtcatggcagaaggcaaagcgggagcaggcacatcacatgatgaaagaggagcaagagagagcgagtgggaaggtggtaaactttctt

SEQ ID NO: 734213 - DNA, 600 bp, Homo sapiens
atgagggaatagagggaaaagagtgaatagagggaaaatctgataccctaacatcacaattaaaagaactagagaagcaagagcaaataaattcaaaatgtagcagaaggaaagaaataactaagatcagagtaaaactgaaagagatagagacacacacacacaaaaaccattcaaaaaattaatgaatttagaagctggttttctgaaaagatcatcaaaattgccagaccactgagaagactaataaagaataaaagagataagagtcaaacagatgcaataaaaaatgataaagtggtatcaccactgatcccacagaaacaaactacaatcagaatactataaacatctccacacacaaaaaaaattagaaaatctagaagaaayggataaattcctggaaacatacactctcccaagactcaaccaggaagaagtttaatctcttaatagaccaataacaggctctgaaattgaggcaataaattaatagcctaccaactaaaaagttcataaccagacagattcacagctgaattctaccaaaggtacaaagacgagctggtaccatgtcttctgaaactattccaatcaata

SEQ ID NO: 734214 - DNA, 661 bp, Homo sapiens
ttaactctggcatgcaataattattttttcttttgtattgctctataggtgtttgctaatctaaaaatgtatttacttgcttagttttctcaaatcaggagaaatctctataggcttgatgtttacagtagacgtggaaacattttctttgttccattttactcgctatctggggactcttagatatccttttcagaacaggagctggagagggatttatcaagtcttgacatagaatcacctgytctgaatcccctaaatatatgtgtcaaaggatatacttctgtgagagtagcagcaggccccaaatggcctggatgcttcagaaaggaatcccatactcatggcggggtagatgcgagttgtctctgatcgagggtggagatggatgacactctcagatattttcccttgcctggctcaggtattatgcgtcaaggatccatttatactttgttttatggaaaattatcttgggtttagctaacatttctagaatatacttttgaaatgttgactttctttttctatatgctgggttttttctttaagagtaaaatcattaaaatgaaaacaaaaaaaactagtaatagtgaatctgattttttgagtgatttttaagtgttttcagctttctcgtgaatcttcttttacacatccc

SEQ ID NO: 734215 - DNA, 654 bp, Homo sapiens
gaaactctaaaaaccacacaaatacttgggaattaaacaacttgctcctgaataacttttgggtaaataagaaattaaggtaaaaataaaaaaatagaaacaaatgaaaatagagacacaacatatcaaaacttctgggatrcagcaacagcaatgctaagaggaaagtttatactgttaaaatacttacatcaaaaagatataaagatctcaaattaacaatctaacgtcacacctcaaggaactagaaaaataagaacaaaccaaacctaaagctagcagaagaaaagacataacaaagatcagagcggaactaaatgaaattgaaaattaaaaaaaatcttacgaaggatcaacaaaacagaaagctggttatttaaaaggataaataaaatttatagactgctataataattaatattaggtgtcaacttgactggattgagggatgcctagatggttggtgaagtattgtttctaggtgtgtctgtgaggttggtgccagaggagactgacatttgagtcagtggactgggagaggaagacccctcctcaatgtgaatgggcaccatccaatcagctgccagcatggctggaacaccaagtagaagagggggataagcttgcttgctctgagttctctctcctctcctc

SEQ ID NO: 734216 - DNA, 561 bp, Homo sapiens
cagtgctctgctgctatttaaaataataaaataaatactaaattgacatggaaatacttttgttatatttgtactaaaaatcataaattaaaaacctgacatagaatgatcacatttccaaaaatatacattttggttactatttttttttkttgtttgtttgagacggagtttcactcttgttgcccaggttggagtgcaatggcacaatcttggctcactgcaacctccgcctcctgggttcaagcgattctcctgcctccgcctctcaagtagctgggattacaggcatgtgccaccatgcccagtcaattttgtatttttagtagagacagaatttctccatgttagccaggttggtcttgaactcccaatctcaggtgatccgctcaccttggcctcccaaagtgctgggagtacaggcatgagctaccacgcccggccacatttcagttactatttaaatggaaaaaagtggcattttacacacaaaattagtaaaagtgagttttgctggggaatagacttttacttttgaagttttactttttgcttctctgt

SEQ ID NO: 734217 - DNA, 582 bp, Homo sapiens
aggtttgttacacaggtatatgtatgccatggtggtttgctgcacctatcaacctgtcaccgaggttttcagccccacatgtattagctatttgtcctgatgctctccctctcctcgccaccccctgagaggccccgatgagtgttttcccctccctgtgtccatgtgttctcattgttcaactcccacttatgagtgagaacatgtggtgttttgttttctattcctgtgttagtttgctgaggatgatggcttccagcttcatccacgtcccggcaaaggacatgatctcattccttttaatggatgcatagtattctgtggtgtatatgtaccacattctctttatccagtctatcactgatggccatttaggttggttccatgtctttgctattgtgaatagtgctgcaatgaacatatgtgtrcatgtatctttgtaagagaatgatttatattcctttggctatatgccaagtaatggaattgctgggtcaaatggtatttctggttatggatccttgaggaatcgccatactgtcttccacaatggctgaactaatttacattcccaccaaaagt

SEQ ID NO: 734218 - DNA, 627 bp, Homo sapiens
ggataaagaaaatatagtacatatataccgtaaaatactgtgtaaacataaaaaggaacaagataatgtcctttgcagggacatggatggtgcttgaagctgttatcctcagcaaactaacgcaggaacagaaaaccaaacactgcatgttttcacttataagtgggagctaaacgatgagaacacgtggttgggggacaacacacacaggggtctgtcagggggaggtgggaggggagggagagcattaggaagaatagctaatggatgctggtcttattaccaaggtggtgggttgatctgtagcaaaccaccacggyacacacattatgtagcaaacccatacatcctgcacatataccctggaacttaaaagttgaaggaaaaaaaataaaaacttagtaattctaagaatgctaggcccaaagccaacaatttatcacatgcaactgaagaaaatgcatttaaaatatcactctgtgaagtatgactttccctttagatcaaatggctattctaaatttattttgctcatattcaattgtgagttttgttatgcacctaagcaaaatgaagctggtactgttaatgtgctggcttcattagcagaagacctttgcagatagt

SEQ ID NO: 734219 - DNA, 459 bp, Homo sapiens
aggtaaggaaactggggctcagaggtgtgaagtaccttgcccaatactactcctaacaatccaaaacgctttcctctgtatctattcacttcctctttaacaaaaacagcactattctaacttcggtaaacctcagtcagcctcataagtgaatgctaaaaagattttctttccaraaattacttactcttgtttcataagctcgatcaattcttttgtaatccaaaaatatgcaccatgaattaaattccatgggttacttgtctaagcactccttttttttttttttaactttccttgccttcaaaattgccactcagggcatactgcctgaaacagactcctttccagggactgggactaatggagaaaaaggaggaaagcagacaaaattccaatctatttttacaatcaggtctaccattcaccagatgattgccaagtaatgtgacaacagtt

SEQ ID NO: 734220 - DNA, 400 bp, Homo sapiens
cactctccacctcctcacaccaacctcacacacccatgttttactgcataaattaacatgggtccattattctcttctcctagaggcttctgaatttcatgaaaagtatctactctgtcttaaaatttaaaaaaacttataaaatgttctcctctcattttaaataatcttggccagttgtttggataaatgcaatctgattaaactaatttttttaaaggcatgagcgaatgttagtcctttaacactgccagccrtttaaaaaaatcttcatagatgcaaataaatctctaattggtggaatctgagtgcatataaaggtgaaattttaaaaagattatatagtgaagggaagagattaatatttgagcataatttgcatcatgagccccagtccctc

SEQ ID NO: 734221 - DNA, 626 bp, Homo sapiens
aaatggggaaaatatttacaagctatatatctgataaggagttaatgtgaagaatatataaggaactcaaacactgcattagcaagaaaacaaatagcccattttaaaaataggcaagagacctgaaaagatatttctcaaaagaaaggatgcaaatggccaacaactatatgaaaaaatgctgagtatcactaatcatcatagaaatacaaattgaaaccacaatgacatatcacctcacacttgttagagyggcttttatcaaaaaaattaatctgttgtacattgttggtagaaatgtaaattagtacagccattaagagaaactctatgaagtctcatcagaaaaactaaaaatagagctaccatatgattcagcaatcccacttttgggtacatatccaaagagattgaaatcagtatggcaaagggttaactacgctcctatgcttactgcagcactattcacaatagccaagatatggaatcaaccttagtgtccatcaacagaggaatggacaaagaaaatgtggtacatgtatgcaacgaaatactattcagcctttacaaaaggaaattcaatcatgtgggagaacacgaataaacttggaagctatgctaagtga

SEQ ID NO: 734222 - DNA, 594 bp, Homo sapiens
ataatatttaaataaatagaaaatgtttgtgatatactttgtttagaggcaagttttgtgatttctacttccagccaagatagagtaataggaataagatttaccctcctgacttaaataactaaacactgaacaaaacgtatgaatcaacagctttcaagatataagcatcaggcagtggacgacggtgaaccttgagagatgggaagcaaaaaaagaggctggcaattgccctggttactgcctggagagtttctgaactctggcaaagagaagaggaagagagatgaagtccagtggtctctccgagatgaggaatcagagctgggastctggaaaggctaaggtgacttgagttcacagagtactgaggagatcactacagagatatctgcagcgccctcttcagttactcagctcagtactgacgagttcatgcttctgaggaagtgatctgtggtcaaagaaagaaccacccaaaacgatcagagggaacaattaccacaactcttacagggtcagaaatagtacctgtgcccactattcaaaatggaaaatgacataactcatgagttttgtctcaatagtagtata

SEQ ID NO: 734223 - DNA, 580 bp, Homo sapiens
ggcacatgccaccagaggttctgattcctaagaaagtagggaaatggagccccagcgcacctgcagacctgaaggtagactgtggtgggaaactgagctagaagctccaggcacaaagcagcacaggccccacaggtgtgcatgtgaggccacccactgcatggccgcctgaaagcacagctgggtccctccaaaacccacctttgccagggtctctcctcagatatgagccycttgtaggacatgaaggtgtcaccatccatccacttgatgcccttgggcaatgagcagggatggcagttgtggtaccccaggcagagccatcatatgtagtcaaagatgtagacatggttttttcccttatctctcactgctccaaatgaggtgggagagatggaggaagaggacaggtgtgtgacagcagcccatcaccacctttattccacccactagtctcagctcccatctcccatgagcagagtagaggaaaagaaaagcttggaatcaaatgattaaagttttaacatgaaccagagctgaatctgataaaccccaaatgactcttcgaagcaccagaagt

SEQ ID NO: 734224 - DNA, 621 bp, Homo sapiens
ttaataatgtacacatgtatcaaaacatacagtgtaccccacaaatatgtacaatcattatgtgtcaatttaaaacacattgaccaatggaacagaatagatggtccagaactaggtctaataggatatggaaattgaatagacattaaatgggcatcttatgttagtgggtaaaaaaatgaactttttaagaagwggtgttgtgataaatacacagacatatgaaaacaatgcaatggatccatttctcagactaaacaccatagtaaattccaaatggattgaagatttaaagtgaaaaatgagtccatatctgtattgaaagaatggattaattcttttaaaatctaaaagcaaagaaaaaaaactggaaaacaattgcaatttacatcacaaagtcttaatatgtctaccatgtaaaaaccttcccacaatgataatgaaagagatcaaaatctctgtagagaaatgggccaaagctaaggcacaagcactccaagacattgatgataagaatacaaaatgttacaacccctatgaagatgaattaggcaatatggagcaaaattacatatgtattaccctctgacccagcaatcctatgtctaatatcccaaaaat

SEQ ID NO: 734225 - DNA, 507 bp, Homo sapiens
tggtaggcactcagcaggtgctggctcccttacggcccgaaggaatcgattgacaaactctcaaattaatgacataattcaagagagtagctgcggagacaataaataattatagtagctgatgtggtttggatgcgtgtcccctccaagtccatgttgaaatgtgatccccagcattgcaggaggggtctggtgggagttgattggatcaggggggcagattcctcatgaatggcttgggccatccccctggtgatgagtgagcaatttggtcgattaaaagagtgtgtcacctccctattcttttgttcccactcttgccatgtgacacrttggctccccatcgcctcccaccatgatcgtaagctacaccagaagcagatgctggcaccacgcttcctgtacaggctgcagaactgtgagccaattaagacacttttctttataaattccccagtctcaggtactcctttgtaataatgcaaacagactaacacattagccata

SEQ ID NO: 734226 - DNA, 608 bp, Homo sapiens
ctttaagttgtcacaactcactcatggtctgttcatttttttttccctcaatgtctttctctttatttgggatatgtcttcaggtatactaataccttcttttgtaaggtggaatctgctgttgatactatctagcatattttttaaaaatctcaaacattatgttttttgagggagtctttatttacatctttcctgtctctatttagtacgctcatgttttcctttaccttcttgaacgtatgaaatttaattgttttaattttttaaatcaggtttatcatctgtgccatttttatgtctctcttgatttttctcttcattgtgggtattgccttgcttctttgcaggaaatatatgtgcttggtatatcttgattggatgctagacataatgaatkctacctgttgcatgctagatatttttgttctctaagtattcttgagatttgttgtgagctacagttaaattacttggaaacagtttgatctttccaagtaattttaagctttaagcttttaagcattgctaggtagacccagagcagactttagtctaaggtagttagtctctacaagtgaagcaacaccttctgagcactctattta

SEQ ID NO: 734227 - DNA, 638 bp, Homo sapiens
gtgagccaccacacctggcatcaacaaacaattaagaaaatgaatgggagtgatgtagaaaaatatttttgtacctatgataaatcatgagtgtatgcttatcataaatatcatcacagggctatctttgaagagctcagaaaatgcctacccatatcatatgctgatatgttacagagacttatgttacgatccccatttacaracagaaaattaatagggtaagaggttaacagtctcttacacaccttggagtgagtcagtgacagagttttctcctctaagcctcagtgttctcctctttataataatggccttacagtgagcagagactatcatgatggttaaatgtgtcagcatgtggaaaagggaaagtccctgaaaagtgtccgacacacagttagtgttcaagaagtattgtatacaaatattattagttagtgttcaagaagtattgtatacaaatattattgtgttactgttactagaaggctgacgcctgaatatagaaatgaaaaatagaaagacatgaagaaaaaccgtggctgaaagtcatacccattgcaccgtacgtacctgcagcaatatatgagcctcccccagctttgtagagaaaatggctggcgaagggggctgca

SEQ ID NO: 734228 - DNA, 491 bp, Homo sapiens
cacacccacaagtctaggtcatatcagagaaagctgaataaggagcctggactttcatccctgcagggtggtcatgaggtcaccctccacagtgatagtagagaccatatagggtgctaagacttctacttctaagaggtagaaatgaggtagccccttctaactagagtggtgtcataggaggcctagtggagggtcaggaccctcaccacccccactgcataatgccctcccaccacctttgtcagcagaagctatggttagagctgtaatgaggtcttgcccagcgagactgstatcagaggaagcatcatgggaggccagaaccctcactagcactcagcagcaacagggagcctctctctaccacaggtaacagaagaggcttagggggtgcctggaattaatgaggcaatgcctactccttccttcactggggtagtatgaaaggaagccaactaaaacaaaagatttaaataagatccatagtc

SEQ ID NO: 734229 - DNA, 575 bp, Homo sapiens
acagcatttggggaagtttagggcaggtcctggggcaaggggacagatactgagatggaggaccttaaagaaggtcagatggctcacccccataagtatatatttgttcccactcatcaagaaaagatgaaattgtgttcattgcattctgcttcagaagaaactaaaagtatgcaattgagtttctaaacatttccacttggaaaaataaaatcaaactagtttattgcagaaaayagtaactgtaattttgcataaagtcattctagacatatttttaagcatctagtaattaccaggaactatgctttggagagctcaaataaataatgaaggaactgaagtaaacaaacaattccagttaagcataacgagcactctgatagaggggtcatcaaaggctatggggacactgagaaggcaaaaaattaattctctcagggttgaattgtcttgaaaattcatttatgttcagtacatcgttgccaaatgataccaaacaagtgaactgtgactgaatgtaaacatgaaacaaaccagaaaatctagactctgacaactctccaaaggtaata

SEQ ID NO: 734230 - DNA, 622 bp, Homo sapiens
tattacttttgatggtagaaaaaatatttacatttttaattggaagcctaattggagtctaacttagtcccttttgggtaacactcaatgattccagatttctaacccctccacattttccttttcaagtgtgtccaggtgaagcttgtacgtgctcatgcagtgagagtgcccatgattcataccggcccttgcagttagtcatgcccttgcctggtcataggggctggtgctgaggtgtagctggttcttccggtycttctaaagtcctcaccattaaagactcttcttcctgagcccaaacctccctgaagcccactttttctgcatctcggttttttcctgaaaggtgtgggaactcatggcttccttcttaatattttgcagggctctgaaaaactgccctctgtccacccacctagacaactctcctaaccatcatgaaactactgcccatgcaacactgtattagtccattctcacactgttacaaagaactgcccaagactgggtaatttataaagaaaataggtttaatcgactcacagtctgcatggctggggaggcctcaggaaagttacaatcatggtggaagtcacctcttcatagggcagcaggagag

SEQ ID NO: 734231 - DNA, 622 bp, Homo sapiens
tattacttttgatggtagaaaaaatatttacatttttaattggaagcctaattggagtctaacttagtcccttttgggtaacactcaatgattccagatttctaacccctccacattttccttttcaagtgtgtccaggtgaagcttgtacgtgctcatgcagtgagagtgcccatgattcataccggcccttgcagttagtcatgcccttgcctggtcataggggctggtgctgaggtgtagctggttcttccggttcttctaaagtcctcaccattaaagactcttcttcctgagcccaaacctccctgaagcccactttttctgcatctcggttttttcctgaaaggtgtgggaactcatggcttccttcttaatattttgcagggctctgaaaaactgccctctgtccacccacctagacaactctcctaaccatcrtgaaactactgcccatgcaacactgtattagtccattctcacactgttacaaagaactgcccaagactgggtaatttataaagaaaataggtttaatcgactcacagtctgcatggctggggaggcctcaggaaagttacaatcatggtggaagtcacctcttcatagggcagcaggagag

SEQ ID NO: 734232 - DNA, 400 bp, Homo sapiens
attttttgaaaattcacacaaacatggaagttaaacaacatgctcctaaacaaccaacgggtcaatgaatgaatgaagaaaaaaaaactttaaatatcttgaaacgaacaaaagtggaaacagaacataccaaaacttatgggttgcagcaaaaacagttctgaaaggaaaagttatagcaatgaatgcctacagcaaaaaaattttaaatctcaaataaataacaatgttatacaccaagaatcaasaaaaagaagaacaaacgatgttcaaagttagaagaaaggaggaaataaacatcagagcaaaaaataaatgaaatagagactaagaaaaacagagaagatcaataaaacatagttgattttttgaaaagataagcaaaagcaataaaacttta

SEQ ID NO: 734233 - DNA, 644 bp, Homo sapiens
aacaaacaaccccatcaaaaactgggcaaaggatatgaacagacccttctcaaaagaagacatgtatgcagccaataaacatatgaaaaaaagctcatcatcactgatcattagagaaatgcaaatcaaaaccacagtgagataccatctcacaccrgttagaatggtgatcattaaaaagttaggaaacaacagatgctagagaggatgtagagaaataggaatgcttttacactgttggtgggagtgtaaattagttcaatcattgtggaagaaagtgtggtgattcctcaaggatctagaaccagaaataccatttgacccagcaatgccatcactgggtatatacccaaaggattataaatcattctactataaagacacatgcacatgtatgtttattgcagcactattcacaatagcaaagacttggaaccaacccagatgcccatcaatgatagactggataaagaaaacaaggcatgtatacaccacggaatactatgcagccataaaaaagaatgagtttatgtccttcgcagggacatggatgaagctggaaaccatcattatcagcaaactaacataggaacagaaaaccaaacaccacatgttctcactcctaagtcggagttgaacaatga

SEQ ID NO: 734234 - DNA, 613 bp, Homo sapiens
tatatgaacatgtcgtatctttagaataaattgtcaatagaaaacaattctaataaatagttttgctaaaatgcataatatgtaaaattgggaagtttagctgtgatgtatcagttaatcaggtaattaaattgaccaaatggaatcactccaggtaagtcttttcttgatgaaattgatcaatattggaataattctgattaagctgttaatatttaaagttatcttggggtgcgagtatcagggaccagatattcttgaggttcataacagcrtttaaaatattctgtaaaccttatcaggctacaaaagtaagattctagcttttaaaatttatgttggctactaattataatgtggggcgcttaaatactcttcatggcctaacagaagaaagaaaataaagaaagacagaaacttatagagaaaacagcacccttgctgccatatatttggcctaaacaaagttttctgttaccctgaaagtatttgcagcctctgatagtcctgtgtggcctcgcatcctatttgaggttaaaatgagggtggatttagaaaatcttctcaacgcaaaatactgaaaagcgtggtccacttatgataattcctagaa

SEQ ID NO: 734235 - DNA, 613 bp, Homo sapiens
tatatgaacatgtcgtatctttagaataaattgtcaatagaaaacaattctaataaatagttttgctaaaatgcataatatgtaaaattgggaagtttagctgtgatgtatcagttaatcaggtaattaaattgaccaaatggaatcactccaggtaagtcttttcttgatgaaattgatcaatattggaataattctgattaagctgttaatatttaaagttatcttggggtgcgagtatcagggaccagatattcttgaggttcataacagcatttaaaatattctgtaaaccttatcaggctacaaaagtaagattctagcttttaaaatttatgttggctactaattataatgtggggcgcttaaatactcttcatggcctaacagaagaaagaaaataaagaaagacagaaacttatagagaaaacarcacccttgctgccatatatttggcctaaacaaagttttctgttaccctgaaagtatttgcagcctctgatagtcctgtgtggcctcgcatcctatttgaggttaaaatgagggtggatttagaaaatcttctcaacgcaaaatactgaaaagcgtggtccacttatgataattcctagaa

SEQ ID NO: 734236 - DNA, 568 bp, Homo sapiens
tgtattccaaatatctggaagcccaatgttaaagagatcgttttcctagctacttgggaggctgaggaaggaaaatcctttgaacccaggaggtggagtttgcagtgagctgagatcatgccattacactccagccttggtgacagagcaagactctgtctcaaaaaaaaaaaaaaaaaaaaaaaaaagagtatttaaccactgkgccatctttaccaagtattgcctgaaaactgccagaaacttgaactaagaacccacctctcaacaaaggaagtaaatgcactgcaaaagcagttttattgggaatggggtggtggacatggaggtaaaggaaaccttatctttaagccaaattcaaaacaaagatcgttgtgcagctcccaaaagttgaaatgagtgaacaagtgagcagaccaaggttgggataacccagtgtattaaggattgaagtgaaaggatgaagagcaggaatgaagaattcactcaccgcctccacaattctgagcctaccttgaattctacccttacttggtcagatggagaccaaaggaaagataaaattaag

SEQ ID NO: 734237 - DNA, 534 bp, Homo sapiens
ggtctttttcaatatacctatatacttttcaaatatatttagcaaagcacatattgaatatacattacaatatgctgagtcgtcattcctcttttgtcttcgtaaacttctgtggagaaagaatacagtaaaatttaggatccttgttctccagcccatagtgtacacagcaggatactagagagccatcagagcacaatttcgaaaatgtaagcaggaaagttctacagaagaatgtcatgacactgagctgggcttgctgtccgttctcagaatacattatccctcttttcagaatttaattcargttcgtgggaagtggtagaaaccatagagtcctatgttgaatgaagaacaaggaagatgtatacaatagatgccaatccaaacatataagggggtaccatattagttttgcacagtaagtgttaaagaacaaaaaaaaaactaaaatatagcttattctcacacacccttgacccactcttcccctacccccaaacacaagcaaaatttgattatgttaagatggag

SEQ ID NO: 734238 - DNA, 621 bp, Homo sapiens
cagcaacatggatggaagtggacataattacgttaagtgaaataagccaggcacagaaagacaaatatcccatgttctcatgtaggagctttaaaaagttgatctcatggaggtagagtacaatgatagatagcagatcctgggaaggatctgtgttggggataggggaaagaagagaggttagttaatgggtacaaacatacaggtaaaaggaaaaagttatattcaacagcagagtagagtgactatagttaacaacatayggtatatttcaaaatagctagaagcgaggacttgaaatgttcccaacacatagaaatgataaatatttggggtgatggatatcctaataccctggtttgatcattacaacactctgcatgtaacaaaatatcacatgaatctcaaaacatacaaatattatctatcaaaaaaattctaaaaatgcaaaaaagaacataaagcgattaagaacatactatgtttgtagtacagctaccaggccaggtggagaactgtgagttccaagacaagctcattgtttgctgcctgctgtggtctgaatgttagtgcctctcacagattaatattttgaacaacaaaaatacttctttcttggat

SEQ ID NO: 734239 - DNA, 443 bp, Homo sapiens
tccatttacaatagctacgaataaaatgaaatacctaggaattatcttaaccatagaggtgaaagacctctacaatgaaaactataaaatattgatgaaagaaactgaagaggacacaaaaaatgaaaagatattccatgttcatggattggtagaatcaatctttttttaatgtccatacaacccaaagcaayatacatatttaatgcaatcactatcaaaataccaatgacattatccacagaagtataaaaaaatcctaaagtttatgtgaaaaaaagacccagcatagccaaagctatcctaagcaaaagaaacaaacctggaagaaccacattacctaactttagctcacactacaaaactataataaccaaaacatcatgatactggcatgaaaaaagacatataaccaatgacatagaataaagaacccagaaaca

SEQ ID NO: 734240 - DNA, 638 bp, Homo sapiens
ggctggctggccagtactgagaagtgactgccccagtcaaatgggcctggaattttaaaggcagtaaaatcatgccactgtcaagtggtaaaagggttcagtgcctgaaagctgctgcaataaaatctaagtccctggggaaaatgtaatagctaaatcctgcaaaaagaaaggcatcaaggaggtttgaattttatatataaaagaggcagttcactgtgaaagctgattttctctccataaaggacaaagtgaaacaagggtctagatcagggatgtccaatcttttggcttccctaggccacattacaggacgaagaattgtcttgggccgcacataaaatacgctaacactaatgatagctgttgagcttttaaaamattgcaaaaaaaactcatgttttaagaaagtttacaaatttgtactgggttgctttaaaactgtcctgagcctcatgtggcccgtgggccatgggttagacaagcttggtctagatgcatctagaagggtctagaaggcaatcagaaaggtacaggtctccaggaaaaaggaaacattggtgattcagcaaattttaatcttctagcctctctataatttggttagctctccatggcttctcaagaattctagaagc

SEQ ID NO: 734241 - DNA, 619 bp, Homo sapiens
tgaattaaatccccataatccccataatacccacatgtcaagggagagaccaggtggaggtaattggatcatggggacagtttcccccatgctgttcttgtgataatgagtgagttctcatgagatctgatggttttataagtgtttggtagttcctcctgcattcattctccttcctgccatcttgtaaagaaggtgccttgcttcctttttgccttttgccatgattatgtttcctgaggcatccccagccatgctgaactgtgagtcaattaaacctctttcctttataaattacccagttctgggcagttctttatagcagtgtgaaaatggactaatacagtaaattggtaccagtagagtggggtactggtataaagatacctgaaaatgtggaagtgacwttggaactgggtaacaggcaggcagaggttggaacagtttgaagggctcagaagaagacaggaagatgtgggaaagtttggaacttcctagagatttgttgaatggctttgaccaaatgctgatagtgatatgaaaaatgaagtccaagctaaggtggtctcagatggagatgaggaacttcttaggaactggaataaaggtgactcttgct

SEQ ID NO: 734242 - DNA, 577 bp, Homo sapiens
ggcagaagtttgctgcaggggtggagccctcatggagaacctctgctagggcattgtgaaaggaaaatatggggtcagagcccccacacagagtccccactgtggcactgcctagtggagctgtgagaagagggccactgccctccaggccccagaatggtagatccactgacagtttgcactgtacacctagaaaagctgcagacactcaattccagcccatgaaagcagctaggagggggactgtaccctgtaaagacacaggggcagagctgcccaaggccatggyaacccacctcttgcatcagtatgacctggatgtgagacatggagtcaaaggagattatttcagagctttaagatttgactaccctgctggatttcagacttgcatggggcctgtatccccttcattttgggcaatttctcccatttgaaatgggtgtatttacccaatgcctgtaccccaattttatcttggaagtaactaacttacttttgattttacagcctcctaggcagaagggacttgcctcatctcagatgagactttggacttggacttttgggttaatgt

SEQ ID NO: 734243 - DNA, 630 bp, Homo sapiens
cattgatctcgaggaagttgtctattatttctggcctcagtttcctcatctgtaaattgaactctggaattcctatttgggcagtatttctgtaagttgacattaatccagggcatagcattataattgtcacataaatattaagcatttaatcttggtgccagttacttttcttagacaatgttgtaagacctgtttttgtttcctgggcaataaatgcctgttgaatgaagaaatgaatgaatttttaaattcctamtgctgagtcattccaaattgttctccagtgttcgcttttagtgaccttgaatataactagcattctttctgcttttagtgttttctcacaaataagtttggcagatgacaaaaattctttttttttttttttctgcagcttctcactgttgatctggctggagtgcagtggcgcgatcttggctcactgcaaactctgcctcccgggttcaagtgattctcctgcctcagtctcctaagtagctgggattacaggcaccgtgcctgactcatttttttttttttttttttgtagagatggggttcaccatgttggccaggctcatctcgaactcctgacctcaagtgatccacccaactcagcctctcaaa

SEQ ID NO: 734244 - DNA, 596 bp, Homo sapiens
cacacccctcggtacatcctgtcccgcatcctctgctcaggctcctctgcccaaacatgcaagtccctgatgcatcctccaaggctgcttctcaccctactttctccctagccaatcacattcactctggctttgaatgctatctgtcaacaaatccaaattatcctcaagattcagtttgctacctaatgcactgtgacaaatcccttctgcttaaaccagctagcatgtgatctgttgctcatggccaaggtccctgatgaacatgccaatccctctgccactcagctctttaaaatyttcacatctgtcatacttgcatggcattaaaacaattttaaaaatcagaataaaggacttgatcccatttattcttcctcattccttggcactttttatattcttactgtgtatattcaatctatgccatgttttatagaaatggtatcatactctatattaacattctacaaattatttttaattctccttatgtttttgaaatgtatccatgttgatactcatagacctacttcattcattttagctgtcctaaaatattttactaagtaatttatccctctgctactattagg

SEQ ID NO: 734245 - DNA, 639 bp, Homo sapiens
gtctagtttcattcatctgtatatggatatccagttttaccagcaccatttgttggagacactattcttcccccaaggaatgttcttagcacctttgtcaaaaatcagtttgctatagatatgtccattaatctctgggttctctgttctgttctgttggtctatgtgtcttttatgccagtaccatgctattttgattactatagctttgtagtatatttttaagtctggtagtgtgataccaccagctttgttctttttactcagaattactttaactattccccaaataaaagatctagagtaactgaatggattaaaaaacatgacctaaatatatgctgcctataagaaatacacctgtaaagacacacatagactgaaagtgaagggatgggaaaacatattatacacaaacagaaaccaaaagtgagcaggagtagctmtacttagataaaatagactttaagccaaaagctattaaaaaagcaaaaaaggatattatataataataaagggatcaattcggcaagaaatataacaattgaaagtatatatacacccaatactggagcacccaggcatataaagcaaatattattagatctaaaaggagagaaagaccccagtataataata

SEQ ID NO: 734246 - DNA, 626 bp, Homo sapiens
gggtgtgtgagtgtgtgtaaggattttttctcccccttttttccctttcctgcacttctacctgatgattttacctgaggcttgccctaacaatagtcaccagtgagccggcagaggcttcagagaagttactggttagtattaataatcagtagaaaaaataatataaaacatcttttccaaagagcttaccttggactgcccaaagatctgttattctcatgtggcccaagtcaaacatcttaaagaaaccaccatgttagagagaaatggttccccatcaacacagaatcagagtttactttagatcaaaagccactttagtggccattccaagtggttgaaatgccgaaggagaaaattcacagtatatgtactgcgggaagacagacttctagtgaatccaatyaaaggcttttacaaaggctggcctggcacaaacatgaatttcccttctaaagacaaaacagttgaagtttctcagtattgcaatgaaattaaactagaggagaaggtcaccccaccattcagattcctgtgacttgggcctgagttgtgaggtttgcccttgggagatggcaggccaaagtttgtttattttgttgctatggacacagaacagtagc

SEQ ID NO: 734247 - DNA, 554 bp, Homo sapiens
tgacctcctggactcaagcgatccttctgcctcagactcccaagtagatgggactacacaggtgcacagcaccatgcccagctaatttttttttttttttttttttttgagacggagtctcgctctgtcacccaggctggagtgcagtggcgggatctcggctcactgcaagctccgcctcccgggttcacgccattytcctgcctcagcctcccaagtagctgggactacaggcgcccgccactacgcccggctaatttttttgtatttttagtagagacggggtttcaccgttttagccgggatggtctcgatctcctgacctcgtgatccgcccgcctcggcctcccaaagtgctgggattacaggcgtgagccactgcgcccggccgcccagctaatttttttgacttttagtatacatgaggccttgctatgttgtccaggctggtcttgtactcctgaattcaagtgatcctcctgcttcggcctcccaaagtgctgggattacaggtgtaagtcaccatgcagccacaatgactcatattgagactt

SEQ ID NO: 734248 - DNA, 535 bp, Homo sapiens
gacctcctggactcaagcgatccttctgcctcagactcccaagtagatgggactacacaggtgcacagcaccatgcccagctaatttttttttttttttttttttttgagacggagtctcgctctgtcacccaggctggagtgcagtggcgggatctcggctcactgcaagctccgcctcccgggttcacgccattctcctgcctcagcctcccaagtagctgggactacaggcgcccgccactacgcccggctaatttttttgtatttttagtagagacggggtttcaccgttttagccgggatggtctcgatctcctgacctcgtgatcygcccgcctcggcctcccaaagtgctgggattacaggcgtgagccactgcgcccggccgcccagctaatttttttgacttttagtatacatgaggccttgctatgttgtccaggctggtcttgtactcctgaattcaagtgatcctcctgcttcggcctcccaaagtgctgggattacaggtgtaagtcaccatgcagccacaa

SEQ ID NO: 734249 - DNA, 535 bp, Homo sapiens
gacctcctggactcaagcgatccttctgcctcagactcccaagtagatgggactacacaggtgcacagcaccatgcccagctaatttttttttttttttttttttttgagacggagtctcgctctgtcacccaggctggagtgcagtggcgggatctcggctcactgcaagctccgcctcccgggttcacgccattctcctgcctcagcctcccaagtagctgggactacaggcgcccgccactacgcccggctaatttttttgtatttttagtagagacggggtttcaccgttttagccgggatggtctcgatctcctgacctcgtgatccgcccgcctcggcctcccaaaktgctgggattacaggcgtgagccactgcgcccggccgcccagctaatttttttgacttttagtatacatgaggccttgctatgttgtccaggctggtcttgtactcctgaattcaagtgatcctcctgcttcggcctcccaaagtgctgggattacaggtgtaagtcaccatgcagccacaa

SEQ ID NO: 734250 - DNA, 535 bp, Homo sapiens
gacctcctggactcaagcgatccttctgcctcagactcccaagtagatgggactacacaggtgcacagcaccatgcccagctaatttttttttttttttttttttttgagacggagtctcgctctgtcacccaggctggagtgcagtggcgggatctcggctcactgcaagctccgcctcccgggttcacgccattctcctgcctcagcctcccaagtagctgggactacaggcgcccgccactacgcccggctaatttttttgtatttttagtagagacggggtttcaccgttttagccgggatggtctcgatctcctgacctcgtgatccgcccgcctcggcctcccaaagtgctgggattacaggcgtgagccacygcgcccggccgcccagctaatttttttgacttttagtatacatgaggccttgctatgttgtccaggctggtcttgtactcctgaattcaagtgatcctcctgcttcggcctcccaaagtgctgggattacaggtgtaagtcaccatgcagccacaa

SEQ ID NO: 734251 - DNA, 617 bp, Homo sapiens
aaaaagacatgtgaagcctttccaagtaaaatatagctattctctttcttataaagacatgtgaagaatttctctctggggtatcatcttaaagcctacaaaaagctaacctttcaaaagctaaataagataggcattcgaatacaaaatctatcaaggtgttcagaggacaatgggcatgagtcaataatttacaccactttctgaggaagcactaaccccattttacaaagagaaatartgacttgaaagtatttattcatgatatcttatatgacataaagatgattaaaacagcaatcagattagggcattttaaaagggcagggacaatgtttattttgtttattgtatctagcacttagcatggtgcaagatactatgtgagtgcttaacaaatatctgttgaatgaatgaataaacctacttctttaagtttgtgctgaaggtctacaatctgtgacaaaagagaggaaagctcttcttggtatcgaatcagctcatcactcttccctgacaattcttcagtcattctggacatctgagcatttgtttcaccttggaagcaaaaaaaatttttttaaattaatacaaatgtagagaaggagttggcaaac

SEQ ID NO: 734252 - DNA, 536 bp, Homo sapiens
ctcacggggaaccctgtggaggacagccaaaaagttcaggcagtggtcgcaggttgaaagaagcctccaactgggtttcatgatataaccttaggtgcggatgaactcccttggccagggccagggtggaggagagtgaaaagtgggctgcagccatgagtgcaggagctgccagtgcaggaactgggtgcctggctttgcagtggacagggaggggcttggcctgaaagccgtgattgctrtctctgcagggaacgtatatgactcgggacagttgcaagttctgagtgcaggctaactggaacttagcttgctgctgccagtggaacactgtgggagtgcatctgtcttgccaagtgcatgggatctgtgtggggctcacagccacctgcttctcctcactctgcacaaacccttctgtgtggcaaagccagcaacactgccttttggaacatcaacccagtggcctgagaaccactcccatcccctggcttccacaggggctgctgcttgccctgcacagggagactcagagc

SEQ ID NO: 734253 - DNA, 536 bp, Homo sapiens
ctcacggggaaccctgtggaggacagccaaaaagttcaggcagtggtcgcaggttgaaagaagcctccaactgggtttcatgatataaccttaggtgcggatgaactcccttggccagggccagggtggaggagagtgaaaagtgggctgcagccatgagtgcaggagctgccagtgcaggaactgggtgcctggctttgcagtggacagggaggggcttggcctgaaagccgtgattgctatctctgcagggaacgtatatgactcgggayagttgcaagttctgagtgcaggctaactggaacttagcttgctgctgccagtggaacactgtgggagtgcatctgtcttgccaagtgcatgggatctgtgtggggctcacagccacctgcttctcctcactctgcacaaacccttctgtgtggcaaagccagcaacactgccttttggaacatcaacccagtggcctgagaaccactcccatcccctggcttccacaggggctgctgcttgccctgcacagggagactcagagc

SEQ ID NO: 734254 - DNA, 536 bp, Homo sapiens
ctcacggggaaccctgtggaggacagccaaaaagttcaggcagtggtcgcaggttgaaagaagcctccaactgggtttcatgatataaccttaggtgcggatgaactcccttggccagggccagggtggaggagagtgaaaagtgggctgcagccatgagtgcaggagctgccagtgcaggaactgggtgcctggctttgcagtggacagggaggggcttggcctgaaagccgtgattgctatctctgcagggaacgtatatgactcgggacagttgcaagttctgagtgcaggctaactggaacttagcttgctgctgccagtggaacactgtgggagtgcatctgtcttgccaagtgcatgggatctgtgtggggctcacagccacctgcttctccycactctgcacaaacccttctgtgtggcaaagccagcaacactgccttttggaacatcaacccagtggcctgagaaccactcccatcccctggcttccacaggggctgctgcttgccctgcacagggagactcagagc

SEQ ID NO: 734255 - DNA, 523 bp, Homo sapiens
acatcaattcaaggataattagaagaaataatctacccaaatgaggaggaaccagaaaaggaactctggtaatatgaaaaaacagggttctataacaccctcaaaagataacactagctctccagcaatggatccaaagtaggacgaactctttaaaataccagataaggaattcagaaggtcaattattaagctactcaaggagatttcagagaaagatgaaaactattataaatttaaaaagcatttcaggatatgaatgaaaaattttctagagatatagatattatcaagaaaaaacaataagaatttctagaaatgaaagacacacttagggaatacaaaatgcagcagaaagctttaacaatagactagaacaagtagaagaaagaatttcagagcttgaagacaaggtttttaaactaacccaatcagacaaaaataaagaaaaaagaatmaaaagaaatgaacaaagtcttcaagaaatatgggattatgttaaacagccaaacctaagaataac

SEQ ID NO: 734256 - DNA, 511 bp, Homo sapiens
atgaaagacacacttagggaatacaaaatgcagcagaaagctttaacaatagactagaacaagtagaagaaagaatttcagagcttgaagacaaggtttttaaactaacccaatcagacaaaaataaagaaaaaagaataaaaagaaatgaacaaagtcttcaagaaatatgggattatgttaaacagccaaacctaagaataactggtgttccagaggragaagagaaaataacaagtctggaaaacttatttcagggaataattgaggaaaacctttctggcgtggctagagatctagatatccaaatccaagaagctcaaagaactcctgggaaattaattgcaaaaagatcttcaccaaggcatatagtcatcaggctatctaaactcaacatgaaggaaataattctaagagcagtaagacaaaagcatcaggtaagctataaaggaaaacctatctgaataacagcagacttctcagcagaaaccttacaagccagaaggtattg

SEQ ID NO: 734257 - DNA, 626 bp, Homo sapiens
ggcaaagcagtgaattggtattgctattgttcctagataaaggtttactacttttgattctctctattgataggaatcaagaagagaacacattcaccagattgataatcacatataaagtgctacaggctgtgctgatgtgttccagtgaagacatatctggcacagcagctatgatagaacctacctattggttaagtttgttaaagtgcattgtcattcaccttaatctatttgtttggggtttttgttggttttgtttcttacagggggcagataggtgaattgaaaggatatgaagcaccaccattctgcatcctttaagtctttcaagttgacactaatatctgcaatttatcctkggacatactcctgtcagtataagctcaaaccttgtatccaatgatcttcaagaagccttggatttctgtttaccagttgacagttactttggcaactggccacaggtcccttttaggaatgattgggggacagtcaccaataatacttgtagtggtatacactttccctacacttccctagggggatccagcaacacttttaatcaatgaattcctggttcctgagacattaaagttttaaaatatgtgcctcttaagatgatg

SEQ ID NO: 734258 - DNA, 609 bp, Homo sapiens
aacacttttaatcaatgaattcctggttcctgagacattaaagttttaaaatatgtgcctcttaagatgatgaaatatagtaacttgatgtggttactatacacagtactagagggaagaattttccataacacaaatgtttagatttaaattcatgccttgaagccagataaatgaagtataagctataattacaaaacacctagttcttcagtgtttggatttatgaaaattgycatgattgttatctattgtgagttattaatccaagttacttttattacattttaacagttttagctataacataaattccatgggttttcgtttttgttttttgtactaccttaaaaaaacctatcattgttctgtggggttttttttgctcagttatgtgtttgtatcagctttatgcccagacccatactatatgtcttcacatataatatctcagtgttcacagtggtcttccttgggaggtgtttgactctcatttagatgcaaaactgagacccagaaatgtcatcttttttgacttttatgtcacagctggtaagtgaaagagtcagaattcaaattcatgtctcccaactctaaacccaaagctcc

SEQ ID NO: 734259 - DNA, 544 bp, Homo sapiens
cattccaggttgtggaaagtgacaaagatgaggagttatacctggagttgactcccagccccatcacttactaactgtaagacccaagtctcagttttctcatctgtcgaaacaggataaagtaagctaataaagtttaaataagataataaaggaactaaatatatcctcaataatgttagacattattatgattattttcacttcttcctgaactttgacacttcattattctgatctgttgtaacctctctgatcactccttccccatttctctccttagctcactgcatcattcctcaaaatggggttccatcctgggtcctggctctttttcctctatatcttctcctttggttaaatcatctgctcacaagtatcatgagaatgtgaatgatttytaagtttagggcctcataccttagctcttatttggccattcacccagctgaaattcttttcttgctccctctcattcctatccaatcccaacaatctggttaaactctccctagccagcctttgaaaatgtacaataagcatt

SEQ ID NO: 734260 - DNA, 601 bp, Homo sapiens
tcctgcttctgcccaatggttcccagaccaatatattcttcctaattgggataacatccatatagaggtttgtgatgcagtgtctagcctgcatgatgataccccaccatggcagatgccatgatgtaggcaattgcctacaaattggcattccggttgtgcctttggtaggcycttgcattgctctatagagctaccttctctggattatgtgatatgtgataaaaccagaggatcccatggtcacaggctcattcgtctcctcctctgtgaagtgtgtctctcatggtcggatgctgtgttatatggaattctatgtctgtggatcactttcaaatcctccagctagtagtgctgcctgggactttgtaggtaagaaaggcaaacagttatctagaataaatgtttactaccatgacaataattcacaggtccttccaggaagaaatggctcaatgtgtcataaagtggccatgtgatccctgttgtactgctcaggtttgatccctggtataccactttccactagacaaattgctgctgagtctgcctgacattctgacttaatgtattctacagagctcagctcacaaggggcagt

SEQ ID NO: 734261 - DNA, 365 bp, Homo sapiens
tttcagattttaaaggtaggtattatccctgtgatccttcgtgtgcaaactagcttagcaacctgcgcccaggagagtaaccacagaggcagtggatctatcccatgctcccttgcatgaaccagcctggcactttgcccacagggaagcagygccagaaccagcaaactagccacacaaactctagcagcctaggtcacagaggcacttacaggcatcactgacattgactatagaaacttcagagaggctacactactgtcctcacccagaaccaaagccaatgcactctacccaactgactccctaggacacaccttcaggtgaaagtcttcccctctggaagctactgtataaaactggaa

SEQ ID NO: 734262 - DNA, 589 bp, Homo sapiens
ctcttagcctttattgatagcttaatcagaagatctaagtggggtgcagtggcacatgctctgtagtcccatctacctgagaggctggagcagaaggatcgcttgagcccaggagtttgacaccagcctgggcaaaatagtgagaactcattttttaaaactgtgaagtttctgaagggccctgctgtttctgttccagccaactgtgaatctgccatttgtgaatttaagcagaaaaagggtctgttttctcatatttttttcttcttgcccttttgtatgaagtttaacctaaagtagtattctcaaataattagtcatagcttcatgttaaaaacacatgcttgttacatggttttccactgattaaaattttgtggaaatttcaccaattgctaaagcagaaagaccagaaawagctttttatagaatcgttttggggtttgcgaaaattgtcctatgacagaaacaggactaaagttaaatttctaatgaaaacataataatttgcctttttgcaatttctatttcattcctacacaaacccagatgaagggtttgtaactccagaagaaaaaaaatacttaga

SEQ ID NO: 734263 - DNA, 514 bp, Homo sapiens
aaaaaatgggcaaaggacaggaatggacacttcataaaagaagacatacatgggaccaacaatcatacgaaaaaaaggtcaacatcactgatcattagaaaaacccaaatcaaaaccactatgaggccgggacagtggctcaygcctgtaatcccaaaactttgggaggccaaggtgggcggatcacgaggtcaggagattgagactatcctggctaacacggtgaaaccccttctctactaaaaacacaaaaaattatccaggtgtggtggcatgtgcctgcagtcccagctacttgggaggctgaggcaggagacttgcttgaacctgggaggcggaggttgcagtgagccgagattgcgccactgcactccagcctgggcgacagagcaagactctgtctcaaaaaaaaaaaaaaaaacacacacacacatgcacaatgagataccatcttacaccagttcagaatggctattactaaaaagtcaaaaaacaacagatgctggcgagattg

SEQ ID NO: 734264 - DNA, 612 bp, Homo sapiens
gcgtcagattttatggcatttaaatgttcttgtacaatgactcatcttatttactgaaggtgctcattcagcacattgctgggacccatcccagggcccaagaaggggccagtgggagtgaggagacttgagctttcagcttcagtgtttcatggtcagccctcttgtaagtcagttctcaataaacattaactaaattatatttgtatgatttttattgacactttaattttctaattttggaattaytaaagaatgtgttcttatgcatgctaaatataatcttagttaaatctgtacagcagtcgttcattcattatcatttgttaaccatctactttgatcaaccaacttcaccttgattgttgggagccttctgtgacataaagcagataaaaccctagctcattgtctgtcatgtagtaaccactcaataaacttagccattatgactgttgcagataaagggttctagtcctgacccccaagagagggtccttggatcttgcacaagaaagaattcaggttgggttcctacagtaatgtgaaagcagctttattaggaaagcaaaggaataaaagaatggctattccatagacagagcagccctg

SEQ ID NO: 734265 - DNA, 423 bp, Homo sapiens
ctgcctgttctttgttcctctaaccgtgctgtggacaacattctgaggacagcaaagccatggaggagagttcggggaagggggagaatcaaagacatgcctacgagactggacacccagattcgttagttgggtttgctgcccttgcctttgatctcctgtgcaagtggaagggtgagctgatggactattgaygcctggcttcatcctcgttgtaacgatcttattttcactgtatatcctttcagggttatgccgacgttaaagattttatttagcaattatttgtgctatctcatcaagatattgctgtgtgatgctgcaccaagagacaataattcaggaaatgattttaagatcagaaaggtgtttggatttagagtctagaatgagtaggagaaggaataaaaaggatcgatggtc

SEQ ID NO: 734266 - DNA, 669 bp, Homo sapiens
aagtcaggattctggttcttaagcaggagccgcgagttcaccatcgatgacctcagttcccatctcctagtggccctcagtgggtacagacaccagcacccggcctgtgtgatccgtcctggtgctggccaggccttcctctcgtcccctccagatcagccgggctcagcgtaagttttctaggacaacttcgtaaaatgaattctcatttcataagcaaatatagtgtgagtcatgctttggccacatagaattaagaaggaagaaaaaacactatttatttggttggtactttttttttttttttttttaagaaactacactgtattccagatttgtccscagatcactgtcagcttcctctcctctgggtatatgtttttaaaggacgttgtctattatgggtcagggtcccccgctccaccaggcacttcggtgtgtattttctcacttaactcccagctctgtgcagaaggtctgggagacaccagtgcttaagccaagttttatgggggccagacgaggagcagccgggttgaatgcccaggttttctctggtttccaagcccatactctgctttatccttagttttgggcccagttttcagaacacatccagaatcatccatttgcccagcaaaccaacataaggtatcaaatgaatggcca

SEQ ID NO: 734267 - DNA, 669 bp, Homo sapiens
aagtcaggattctggttcttaagcaggagccgcgagttcaccatcgatgacctcagttcccatctcctagtggccctcagtgggtacagacaccagcacccggcctgtgtgatccgtcctggtgctggccaggccttcctctcgtcccctccagatcagccgggctcagcgtaagttttctaggacaacttcgtaaaatgaattctcatttcataagcaaatatagtgtgagtcatgctttggccacatagaattaagaaggaagaaaaaacactatttatttggttggtactttttttttttttttttttaagaaactacactgtattccagatttgtccgcagatcactgtcagcttcctctcctctgggtatatgtttttaaaggacgttgtctattatgggtcagggtcccccgctccaccaggcacttcggtgtgtattttctcacttaactcccagctctgtgcagaaggtctgggagacaccagtgcytaagccaagttttatgggggccagacgaggagcagccgggttgaatgcccaggttttctctggtttccaagcccatactctgctttatccttagttttgggcccagttttcagaacacatccagaatcatccatttgcccagcaaaccaacataaggtatcaaatgaatggcca

SEQ ID NO: 734268 - DNA, 577 bp, Homo sapiens
atctcaatctctctgttctttcttcttcctccccctcccttcttccctccctactcctctccctcctcccctccctactcctctcttgttttatacattaacaaaaattatttatgttgaagtgggcagatcacttgatcccaggtgtttgggatcagcctgagcaacatagtgagaccctgtcctacaaacaacaamaaaaaaaacttagccaggcatagtggtgtgtgcctgtagtcccagctactctgagggctgaggcaggaggattgcttgagtccaggagctggaggctgcggtgagctgagattgtgccacgacactccagcctgtgtgacagagcaagaccctgttgtcaaaaaaaaaaaaaaaaaaaatttttggtaaaatacatataatttaccatcttaactattttgtaagtatgcagttctgtagtgttaagtgcatttacattgttgtacaaccaacctccggaactcttttcgtcttgtaaaactgaacctctgtaccgattaaactccctactcctccttccatgagcctctagcaaccgtcattccattttctgtctctg

SEQ ID NO: 734269 - DNA, 577 bp, Homo sapiens
atctcaatctctctgttctttcttcttcctccccctcccttcttccctccctactcctctccctcctcccctccctactcctctcttgttttatacattaacaaaaattatttatgttgaagtgggcagatcacttgatcccaggtgtttgggatcagcctgagcaacatagtgagaccctgtcctacaaacaacaacaaaaaaaacttagccaggcatagtggtgtgtgcctgtagtcccagctactctgagggctgaggcaggaggattgcttgagtccaggagctggaggctgcggtgagctgagattgtgccacracactccagcctgtgtgacagagcaagaccctgttgtcaaaaaaaaaaaaaaaaaaaatttttggtaaaatacatataatttaccatcttaactattttgtaagtatgcagttctgtagtgttaagtgcatttacattgttgtacaaccaacctccggaactcttttcgtcttgtaaaactgaacctctgtaccgattaaactccctactcctccttccatgagcctctagcaaccgtcattccattttctgtctctg

SEQ ID NO: 734270 - DNA, 593 bp, Homo sapiens
acgttcccagctgagggtgaacaaagtgatgttctgcccgcttgttttggctttccaagtgtcctttttgtggtctgtttagtaccacattttttgcatttttgttcattttgctgtttgaaacggagcccaagcactgctgaaatrctatctagtgtttctaagtacaggaaggctgtggtatgccttatggataaaatgtgtattagataagcgtcattctggcacagttcgttgtgaatgaacaacaatatatattcaaaaagcttcttaaatggaaacacagataaaataaatatcaacaaaattatgatgtgataatatatcagtaaaattaagttttcattggttgatgaaagggttgtgagtggaggctcacaggaacctaaccccatatttcccctaggagcaatgattcaggatttgttaattcagtgtttgtgacactttatagaacacaactactatgaataaaaataatcagctataggctgggcgcggtggctcatgcctataatcccagcactttgggaggccaaggtgggtagaacacctgaggtcaggagttcgagaccagcgtggccaacatgctc

SEQ ID NO: 734271 - DNA, 679 bp, Homo sapiens
tttatgtgctttgcccttgttttattaaaatgaaagtgacaaattaaaaaggttaataataggagttagaaagagcgtaattctcctaaacacatcaattgagaaagagggaaatcaattggcgtgaatctttggtcttgattgggcgcttgtgggatctaccgctgtgaagggaaaggatagaatgaaagggtgttcrtgaaatgctgtgaagtaattgtggatgcttgagtctgagacattaggtatatttagagattttataatctttcttttttttttgttttaagtactctaaaaaagggaatagttctttatacctaagagatgcacattgtaacatgtaagtttttttcactttcatacattttacttccaaattcgtttgcaggaaagaatcagagatgggaaaaaagaggaattgtccataaagacaaattcctcccaaacgggcctgtaagttcccctcaggctgcagctctccctgctggagtctgcctggatcagcatttccttttcacaagagcaagcacccagtcacccagtctccaaaatcagcccttgtagtatttcctgaatctctgagttctcttcccagagcctcagatggcccagttttctgtttctggatcacccgactttggttttctgggatcccttgctgaactctgcctggtgt

SEQ ID NO: 734272 - DNA, 623 bp, Homo sapiens
aacatatactgcattagcaaacgtttagcatatgtaacactgccacagagccttggtaagcaaagaattgtaaatatgctctgaattttctcggtgtcttgggagcaattccaaagctgtgtggccactgcgccaggctcacacaccagtgccgctccctctggcttctcctcaacaccccttcctcagaaggcaaatgtcccccaccggtgccgttttgcttcccactgattctctccttggctgcattcatctctccaaatcacctttttccctctcttattttttctccttccctctctcttccaccccmtgtgtttctgtggagtggggttggcacttacagccattgctcagagatgagcatgcttttggtccagttagcaagccatccaaatacatgtttgctgggtttctcagtgatattcttcattactcactgctcgttttaaattttcacttccacgtatggatctgccaatgggcaatggaggtagtagaaagtgtggcttccggaaagggggaccagagtctgctcattagcaatggtgggaaaggattttggaggccacgtccatctgacagtgacagaggtgcaggctgcagtgatgagagcctgggtt

SEQ ID NO: 734273 - DNA, 517 bp, Homo sapiens
tagccatgaatcaggggttggggtggggaataggaatgtaacacctgtatgtgtagtttttgttcatgataggtcatttccattagattgtaatcccactggatgaaggacctttcatctctttttacctctagatatataatacaaaatagtgcctggaacataataggcactcaattggcagtttcttaataaatgaaatagagaataaagtgagttgattctggaaacacagataaaggtcattttgagtgtttttttttttttttttttttttttaagaaataccaaagaaaataagctattctctgtaggtagtggaattaarattcctacatgagacttgataagctttttgtcagactcgtcatatttttttgtctgttttttcagtctaaacattttttaacactaatcacatatcattttatagatggtgaaaggtttaattaataaaaaatgattactttgaaatcctttgaattgaaaaaacacttaaagctttactgtattctta

SEQ ID NO: 734274 - DNA, 517 bp, Homo sapiens
tagccatgaatcaggggttggggtggggaataggaatgtaacacctgtatgtgtagtttttgttcatgataggtcatttccattagattgtaatcccactggatgaaggacctttcatctctttttacctctagatatataatacaaaatagtgcctggaacataataggcactcaattggcagtttcttaataaatgaaatagagaataaagtgagttgattctggaaacacagataaaggtcattttgagtgtttttttttttttttttttttttttaagaaataccaaagaaaataagctattctctgtaggtagtggaattaagattcctacatgaracttgataagctttttgtcagactcgtcatatttttttgtctgttttttcagtctaaacattttttaacactaatcacatatcattttatagatggtgaaaggtttaattaataaaaaatgattactttgaaatcctttgaattgaaaaaacacttaaagctttactgtattctta

SEQ ID NO: 734275 - DNA, 598 bp, Homo sapiens
gatagatctagtagtctttttataacttttattttagtttcaggggtgcaggtgcaggtttgttatataagtaaattgtgtgtcatgggggtttagtgtacagattatttcatcacccaggtaataagcacagtagcacagtgcctgataggtagttttttgaatctcaccctcctcccattctccaccctcaaataagccccagtatctgttgttcttttcttcgtgtccacttgtactcaaagcttccacttataagtgagaacatgygatatttggttttgtgttcctatgttagtgcacttaggataatggcctccagcttcatccatattgctgaaaaaggacatgatctcattctttttatggctgtctagtattccatggcatgtgtgtaccactttttgtttaaccagtctaccattgataggcatttatgttgattccatgtctttactattatgaataatgctgtgatgaacatacatgtacatgtgtctttatgatataataatttatttcctttgggtatatacccaataatggaatcactgggtcaaatggtagttctgttttaagttctttgagaaatctccaa

SEQ ID NO: 734276 - DNA, 626 bp, Homo sapiens
attatgactaattatcagagaaatacaaatgaaaactataatgagataccatctcactccagtcaaaatggctattaataccaagtcaaaaaacaacagatgctggtgaggctatggagaaaagggaacattcatacactgttggtgagratgtattaataaattagttcaaccactgtggagagcagtttggaagtttggagatctctcaaagaactgagagttgaactaccactggactcagcaatcacactacttgggtatatacccaaaggaaaataaatctttcaccaaaaagacacatgcaccttgatgttcattgcagtgctgttcacaacggcaaagacatgcagtcaactcaggtgcccatcaacagtggattggataaataaaatgtggcacatatacaccatggaatactacacagctgtaaaaaagaaaaaagtcatgtcctctgcagcaacatggatgcagctgaaaaccattatcttaagcaaaataatgcagaaatagtcatatattgcgtgttctcacttttaagtcgaaactaaacattgggtgcgcatgatcataaaaataaaaacaatggacactgggcaatacaagaggagggaggaaggaagcag

SEQ ID NO: 734277 - DNA, 626 bp, Homo sapiens
attatgactaattatcagagaaatacaaatgaaaactataatgagataccatctcactccagtcaaaatggctattaataccaagtcaaaaaacaacagatgctggtgaggctatggagaaaagggaacattcatacactgttggtgaggatgtattaataaattagttcaaccactgtggagagcagtttggaagtttggagatctctcaaagaactgagagttgaactaccactggactcagcaatcacactacttgggtatatacccaaaggaaaataaatctttcaccaaaaagacacatgcaccttgatgttcattgcagtgctgttcacaacggcaaagacatgcagtcaactcaggtgcccatcaamagtggattggataaataaaatgtggcacatatacaccatggaatactacacagctgtaaaaaagaaaaaagtcatgtcctctgcagcaacatggatgcagctgaaaaccattatcttaagcaaaataatgcagaaatagtcatatattgcgtgttctcacttttaagtcgaaactaaacattgggtgcgcatgatcataaaaataaaaacaatggacactgggcaatacaagaggagggaggaaggaagcag

SEQ ID NO: 734278 - DNA, 605 bp, Homo sapiens
tcaccataacttaaagcaaaacttttttttttttttttctgtattgggctaaaaaaatggtgccttctaatttaaccaaacatgtgagagacttgacttgaaactagataagtaacaatgaaatcggctatttgaagaaaatctaaaacacgtttgatacttccacacagattttcttctatttaatatatagtgatgttaaaatctttgggagtagttgaagacagacttggaccattaagtaaaaggcagatgatggttcatccatgtcagttcttgaaattggttgtaaaatgcaccatgaaataaatgtctctcatttgctattatgtccttagatatctctggtattacacgttagcctacagactgaaaytgtgggacttaagcacttaattaggtgacccataatcagatacatttttaagaataggagtctgggatgtccgcaaatataaacatttaaaacattgtggtgtatatgacataatgtttctaaagcatcattgaaacttaattatatcctggtaacagttcaagaatacagagttacatttggttctttaaaaaaaaaaaacattgtcattaatgtttaatcattattg

SEQ ID NO: 734279 - DNA, 605 bp, Homo sapiens
tcaccataacttaaagcaaaacttttttttttttttttctgtattgggctaaaaaaatggtgccttctaatttaaccaaacatgtgagagacttgacttgaaactagataagtaacaatgaaatcggctatttgaagaaaatctaaaacacgtttgatacttccacacagattttcttctatttaatatatagtgatgttaaaatctttgggagtagttgaagacagacttggaccattaagtaaaaggcagatgatggttcatccatgtcagttcttgaaattggttgtaaaatgcaccatgaaataaatgtctctcatttgctattatgtccttagatatctctggtattacacgttagcctacagactgaaactgtgggacttaarcacttaattaggtgacccataatcagatacatttttaagaataggagtctgggatgtccgcaaatataaacatttaaaacattgtggtgtatatgacataatgtttctaaagcatcattgaaacttaattatatcctggtaacagttcaagaatacagagttacatttggttctttaaaaaaaaaaaacattgtcattaatgtttaatcattattg

SEQ ID NO: 734280 - DNA, 638 bp, Homo sapiens
gagctaagggagggtttagtaagtgctgtttctataagtctttgcactagcccacggatgcatggtatgacacaacacccaacaagaatgagtacacctgttatggctgtaagagaagtaagaattgaggctatgattcctttctatttactgaaccacctctctagccatcttaagaaagggttgtcgactccagaatttttagttaayttattagataaagcagtaagtccttgtagggcccttgttatgttcccatcaagggcagtgttgtttgggatgagggtacaacactgagttttaatcataacaaacactatcttttttggctaatatcatttctgtggccattctattcttccaggccatctgtctagtaggccccaattgttctgctattcctttgacaacatccctgatgtaattgataaatcgctgttgattataatagatgtaatttatccaatctatgtttttattgatagtcaaccaccaaaatattgactcaaatcctgcagttatttgatcccaggctttaaatttatgtggtacccttgtgagcctaattgtatctaaataaacgtgggagtggaaagaccaataaggggcttcccttggtttacaacgttgtgtttttc

SEQ ID NO: 734281 - DNA, 638 bp, Homo sapiens
gagctaagggagggtttagtaagtgctgtttctataagtctttgcactagcccacggatgcatggtatgacacaacacccaacaagaatgagtacacctgttatggctgtaagagaagtaagaattgaggctatgattcctttctatttactgaaccacctctctagccatcttaagaaagggttgtcgactccagaatttttagttaacttattagataaagcagtaagtccttgtagggcccttgttatgttcccatcaagggcagtgttgtttgggatgagggtacaacactgagttttaatcataacaaacactatcttttttggctaatatcatttctgtggccattctattcttccaggccatctgtctagtaggccccaattgttctgctattcctttgacaacatccctgatgtaattgataaatygctgttgattataatagatgtaatttatccaatctatgtttttattgatagtcaaccaccaaaatattgactcaaatcctgcagttatttgatcccaggctttaaatttatgtggtacccttgtgagcctaattgtatctaaataaacgtgggagtggaaagaccaataaggggcttcccttggtttacaacgttgtgtttttc

SEQ ID NO: 734282 - DNA, 658 bp, Homo sapiens
aagaaatggcagcctgtttggctatctgatctgctaggttatttcctcgactttcacaagaaagacttttctgatatccagggacatggacaatacctattcttctggcaactgcagattattaaatatttgggtgattagctccttatgaaaaaggtcttgacttttactaytaaagagacctcattcagtcaaaattttccaaatgtgtgagccactcaacaggtgtactgagaattggtatagatggttccttcctggttctgaaagtactttaaggcttggctgagtgcaaaccgcttgcaagtttgggcagaccaattatgaggcaattttcctgactctatttcttcgagagtttctccatcaagtactgaatacccattgtgtcttttttcctcaatcacccgggaggaatcatctataaataactctcgtcccgtcctgaagggagtgtctcctaggtctggttggacttttaaatgataatcaattaaatctaaacatttgtgctctctctttagatttggatcccctgttaggaaacctgctgggataagtgaattatcagtggttaatattaacagaatagcctcatactttaagattcttgagtcagtaagccactgccctgctttctggtttaagatagttctaa

SEQ ID NO: 734283 - DNA, 658 bp, Homo sapiens
aagaaatggcagcctgtttggctatctgatctgctaggttatttcctcgactttcacaagaaagacttttctgatatccagggacatggacaatacctattcttctggcaactgcagattattaaatatttgggtgattagctccttatgaaaaaggtcttgacttttactactaaagagacctcattcagtcaaaattttccaaatgtgygagccactcaacaggtgtactgagaattggtatagatggttccttcctggttctgaaagtactttaaggcttggctgagtgcaaaccgcttgcaagtttgggcagaccaattatgaggcaattttcctgactctatttcttcgagagtttctccatcaagtactgaatacccattgtgtcttttttcctcaatcacccgggaggaatcatctataaataactctcgtcccgtcctgaagggagtgtctcctaggtctggttggacttttaaatgataatcaattaaatctaaacatttgtgctctctctttagatttggatcccctgttaggaaacctgctgggataagtgaattatcagtggttaatattaacagaatagcctcatactttaagattcttgagtcagtaagccactgccctgctttctggtttaagatagttctaa

SEQ ID NO: 734284 - DNA, 658 bp, Homo sapiens
aagaaatggcagcctgtttggctatctgatctgctaggttatttcctcgactttcacaagaaagacttttctgatatccagggacatggacaatacctattcttctggcaactgcagattattaaatatttgggtgattagctccttatgaaaaaggtcttgacttttactactaaagagacctcattcagtcaaaattttccaaatgtgtgagccactcaacaggtgtactgagaattggtatagatggttccttcctggttctgmaagtactttaaggcttggctgagtgcaaaccgcttgcaagtttgggcagaccaattatgaggcaattttcctgactctatttcttcgagagtttctccatcaagtactgaatacccattgtgtcttttttcctcaatcacccgggaggaatcatctataaataactctcgtcccgtcctgaagggagtgtctcctaggtctggttggacttttaaatgataatcaattaaatctaaacatttgtgctctctctttagatttggatcccctgttaggaaacctgctgggataagtgaattatcagtggttaatattaacagaatagcctcatactttaagattcttgagtcagtaagccactgccctgctttctggtttaagatagttctaa

SEQ ID NO: 734285 - DNA, 575 bp, Homo sapiens
atgataatcaattaaatctaaacatttgtgctctctctttagatttggatcccctgttaggaaacctgctgggataagtgaattatcagtggttaatattaacagaatagcctcatactttaagattcttgagtcagtaagccactgccctgctttctggtttaagatagttctmacttggtggggcatgcttactgtcaattttcctccaaaggttaactttctactttctttactaatactcctgtagttgcaatggattggatgtattgaggccatctacaagtaactggatctaagacttttgacaggaagaccacaggctaccaacagcctctgtgtccttcagtaagcacttctaaagttactccattatccacgttgacaaaaatgtggaatggctttttagggaaggtaaggctaagacaagggtggttatgagcctttctttcagctctttgatctgatcacctttctcagaagtctacaggagatggtcaggcttcttctgggcaagtttttgatataaaagtttattgtttagtgcatatgagtcaattcataagtgacagtat

SEQ ID NO: 734286 - DNA, 575 bp, Homo sapiens
atgataatcaattaaatctaaacatttgtgctctctctttagatttggatcccctgttaggaaacctgctgggataagtgaattatcagtggttaatattaacagaatagcctcatactttaagattcttgagtcagtaagccactgccctgctttctggtttaagatagttctaacttggtggggcatgcttactgtcaattttcctccaaaggttaactttctactttctttactaatactcctgtagttgcaatggattggatgtattgaggccatctacaagtaactggatctaagacttttgacaggaagaccacaggctaccaacagcctctgtgtccttcagtaagcacttctaaagttactccattatccacgttgacaaaaatgtggaatggctttttagggaaggtaaggctaagacargggtggttatgagcctttctttcagctctttgatctgatcacctttctcagaagtctacaggagatggtcaggcttcttctgggcaagtttttgatataaaagtttattgtttagtgcatatgagtcaattcataagtgacagtat

SEQ ID NO: 734287 - DNA, 547 bp, Homo sapiens
acgttttgactgggtgaatgctcacgttctcaaactactatagcagccctatgaatcatactcctttcttctcctgaaaagaggatgtccaaaatggacattaactcaacccaagtgtataactgaggtcctaaaaattgatcaatttgatctgccactccgtaagggtcatctagtaatggcttaagctccttttttaaactctggrattctgaactggttaagggagtatccatgaagtcaatggttcctcctccttgtggcacctatcttaagggaaggagatcaggggctgactctttagttgtagagggaaaagggaagtttcggatatcctttttatattgttctatttcacattggagtccctttagggaggggtccttaggctgttaggggacagactcttgggatgataatttccaagagtcaggattgtaaggagggggaatatcgtgagtaggtgaagaatctggagcaggatcttgggcagcagcagctgtctgaggagagggcttggggtcactgagcaggggaagatggtcta

SEQ ID NO: 734288 - DNA, 451 bp, Homo sapiens
tccttgcacccttcttttgcttcatccactctggccgcttcccttttgggtgtctaggcccctcttggtattggcatgccagtttgaaccccatggcaggatctgtcctaagccgtatgaggtgaccatggaaccgcagataggacccactcastccacacagcggtagtgcgtagtaccattcacacaagcagcactgcaagcagtagtgtttgtgatcatttaaacacacttttaacctccagaatatcttgaccagcaaggaaatacttcgtcacccctgcgacattgcttaacttggtctgtgtacagagttacctgattgctgcggtatgtgagaatcctttccccaagctatcatcctgtttccttctgggttgttgagagcccgagtttatttgtcgcactgggtggttccccatctctcaccctgaggccaccacaatgaggc

SEQ ID NO: 734289 - DNA, 616 bp, Homo sapiens
tatggtttggctctgtgtccccacccaaatctcatcttggattgtaatctccatgtgtcaagggaggaacctgatgggaggtgattggattatggcggtggttcccccatgctgttctcgtgatagtgggtgagtctcaggaggtcttatttttttttattttttgagacagagtcttgctctgttacccaggctagagtgcaatggcacaatctcagctcactgcaacccccgcctcccaggttcaagtgattctcctgcctcagcttcccgagtagctgggattacaagtgccagccaccacacccagctaatttttgtatttaatagagacagggttttaccatgttggccaggctggtcccaaactcctgaccttaagtgattcacctgcctcggcctctcaaagtgctgggattacaggcatgagccaccacatccrgccagatctgatggttttaaaagtggcagtttttcctgtgctctcacttcacttctcccgcctgccaccatgtcagatgcacttgcttccccttccacaatgattataagtttcccgaggcttccccagccatgtggaattgtgagccaattatacctcttttccttataaatt

SEQ ID NO: 734290 - DNA, 701 bp, Homo sapiens
tgtctacctcttttcttgctcgtgcagtttcctctacccagaatacaacccttctttctcctccagctcaagtcttcttcttccgccttctcccccctccaaggcctatcccaaatactgcaccacttctttagggttttcccatccctccraccaggagaaacaggcaactatctctccctgctctgaaaccttgaggtttttcatctccccctctctgatggcactttgcagcccctactttgcattgcttgagttctctcccctgctgttcagttaataagcttaaaagtaggctgagattgagtataacttgaacagagcagatgtttaaatatttgccaaataaatgaaagtggctacgtttacacaacttatatccacagtgccttaaaaaactgaaagcacacttactaggtagagagcccttgataacttccagtaacaaagttttctgaggaaatggtcctaaatttccccaccaggcaggatttggcaatcactatggacaggcttggtctaaccagcttcttgtttacttgggtaatttactgactcggcaactgtctacttctcgggtcagtggttctcaacccacattacactaactgcacagtatgatcacctgaggactttaaaaagccaggctgcatgcattcccatcacatcagaacttctggagttaggatccaggcatcagt

SEQ ID NO: 734291 - DNA, 524 bp, Homo sapiens
agcagggagccacccatgctgaccagatccccatagggatccacaccacccagaaatagctcagtctcccctagtactctgaagtgtgatggaaactagtgacaaataggaaggtctacatcaaagaagtatccagcctttagttcttctcatctagatgagtaaatatagaaaacaactttctactaaagaaagagcaaaagccaccacagcaggaactccttgtccagtgtgtttggaaaaaccaatgctggcctgggcattgaatgccagagctctggctctgtttctgacaataaccaggtttgtgaccttgaataagttgctmccctcctggaactctgtaaaatgtatagcttggggagagaatgtggaacaagatggcagaatagaagaatccgccaattgtctcccctacaaggacaccaagttaacaaccatctacacagaagaaacaccttcataagaaccaaaaatcactcatagtatctggttttaaatctgtatcacagaaaaggacacca

SEQ ID NO: 734292 - DNA, 624 bp, Homo sapiens
tctgcagtgggcctgaccagagagagaaggctggagaggaagtcgcctcttagggaaagtctcccagagactgtggaattggaggatgttctgaattttggtaaaattctgatcagctagagaaaatgcgagaaggcctcctaggcaaaggaggaggaagggtgcaggcaagagcagagacagaggagtgctgggggcaggcgacatggccaccaggccaacctgggaattcacacagcaggacagcgaggggaagctggaggacagggcagggaggtggtctgggagtgacatgctggtgggaaagcatgggcttcagctcctgaacaggtggagcccctgggaggtgtttcagcaggagcgggatgacagaagagcggcatcatgggaaggatggttcatgtgtgggctgtgcaagggacattgcagayggaggaagccactagggagctgttcctccaaagacgtaaaatgcaggataataacaaaggacaggatggtcatgccagggaggaaagcattaagaagtggatcaattccctgctactgttgcttttttaagttctctccctcctgtggaaagctaagatgacttcaaaactttggaatcctggagaatccctt

SEQ ID NO: 734293 - DNA, 654 bp, Homo sapiens
tagaggaatcctaaagccttgttcatagttatcaatggcttatttacccatgtaaatgggagaaggaaagttttatttttatcattgaggatgcacaaggatatgaagataaagtaaaaatttcccaagaggtttcaagtgtygctatgaaatctcaattattcagctaatacaaggcgaaaagccacaagattggtggtttcaactaaggcatgtggattttaagggcaaaagtggcaatgagacacagaaagacaggatcaccgtcaccagatgccacagatggggatggacctaccccaagcctcttgaccactaggttctaggttgaagtctgacttttccatctcacccctacaaaccttctagggctcctggacaacagaaccagaacccagagacagggatgggcctcatctcttgtcctttgtcccctttctaaatgccctgccttgtgcttcccagcctcccctataactccaacacatctcctctccagccaccagggtctacgatgccaaggccactattgcactggacttgtcaaaaagttgactgagaaccagagacctttctccctggagcactgcctcccagtcaggcaagaacagctgtttctcagattgggatccacagacagtttcagaggactaa

SEQ ID NO: 734294 - DNA, 579 bp, Homo sapiens
aaaaaagaagttcgatgaaccccaggtacaagaaacatgaataaaattgcaccaacaaacatgataatcaaattgcttaaaatcagtgctattccttggatatgaatgatctatcaatctgtcccataacttgccctttggacaggaaaggactaagctaaagacacagtatctctggaattttgycaggatatgaagtttagtgtctgctccattccagactttttatttttttcttttttgagatggggtcttgttctgttgcccaggctcaagtgtagtggtgcaaacatggctcactgtagcctcgatctcctagactcaagcagtcctcctacctcagcttcctaagtagctagtactaaaggcacatgccatcatacctggctaatttttactttttttgtagagacaaggtctccctatgttgcccaggctggtcttggactccagggctcatgcagtcctccggcctcggcctcccaaagtcctgagatcacaggtgtgagccaccatgcctggctaagactttttaaatgaatcagaccagccctaacacaagggattcagtcctagaca

SEQ ID NO: 734295 - DNA, 637 bp, Homo sapiens
cctgaatctctgaatagaccaataacaggctctgaaattaaggaaataattaatggcttaccaaccaaaaaagtccaggaccagatggatgcaaagccaaattctaccagaggtacaagtaggagctggtaccgttccttctgaaactattccagtcaatagaaaaagagggaatcctccctaacttactttatgaggccagcatcatcctgatacccaagcctggcagagacacaacaaaaaaaaagagaattttagaccaatatccctgatgaacagcgatgcaaaaatcctcagtaaaatactggcaaaccgaatccagcagcacatcaaaaagcttatccaccatgatcaagtgggcttcatccctgcgatgcaaggccrgttcaacatatgcaaatcaacaaatttaatccagcatataaacagaaccaaagacaaaaaccacatgattatctcaatagatgcagaaaaggcctttgacgaaattcaacaaccttcatgctaaaaactctcaataaattaggtattgatgggatgtatctcaaaataataagacttatttatgacaaacccacagccaatatcatactgaatgggcaaatactggtagcattacctttgaaaactggcacaa

SEQ ID NO: 734296 - DNA, 639 bp, Homo sapiens
attccataatacttgttttattactattttataataatcgacatttattgctatgttataataatcgacatttatcctttatcagttataattctcacaaaagcttgatgatgtgagttattttatcatttgcattttacagatgaggaaacaggtttggagaagataaataccttgcccaaaaatgtagcatgtccaatcctctttcctcagmtagaggctgggatgaagctggccaagggagtgtcttctccctaaagttgcaagtatttcagaatcaggagccctgcagagtcctgagttaaagagtgagccaaaagtgatgtttcagagaagggcaagggctaagaagctgatcccaaagtccacacaacagacccagagaatctgtcaactacggagatgaaagcagggatgatgcatggaagggagggaagtttccaggctaacacctggggtagcggtgtcactcctgtctgtgtttagtatgcccagaggggccaggtgtgggtgggcagtccagagctgaaaccaacccatttccatgcactgcttagtacagaatgccaagtaaaggcttccgttatttctttgaaacggtgctgccaagtaattgtcatagaacatttatgggtctgt

SEQ ID NO: 734297 - DNA, 639 bp, Homo sapiens
attccataatacttgttttattactattttataataatcgacatttattgctatgttataataatcgacatttatcctttatcagttataattctcacaaaagcttgatgatgtgagttattttatcatttgcattttacagatgaggaaacaggtttggagaagataaataccttgcccaaaaatgtagcatgtccaatcctctttcctcagctagaggctgggatgaagctggccaagggagtgtcttctccctraagttgcaagtatttcagaatcaggagccctgcagagtcctgagttaaagagtgagccaaaagtgatgtttcagagaagggcaagggctaagaagctgatcccaaagtccacacaacagacccagagaatctgtcaactacggagatgaaagcagggatgatgcatggaagggagggaagtttccaggctaacacctggggtagcggtgtcactcctgtctgtgtttagtatgcccagaggggccaggtgtgggtgggcagtccagagctgaaaccaacccatttccatgcactgcttagtacagaatgccaagtaaaggcttccgttatttctttgaaacggtgctgccaagtaattgtcatagaacatttatgggtctgt

SEQ ID NO: 734298 - DNA, 615 bp, Homo sapiens
tatgggttggttccaagtctttgctactgtgactagtgacgcaataaacatacgtgtacatgtgtctttatagcagcatgatttataatcctttgggtatatacccagtaatgggatggctgggtcaaatggtatttctagttctagatccttgagattaatccatgaattttaactcaacagcayttctactatcctaatgaagactttattttatatgctgaagtgtaagacactaaaataatctgctttttagtacatagcatttgtaagcaacaatagtcaatcgacattgagctttcactttgtacagaggattagatggagctatgaagtaagctagaagcattggattccttgcccatgatgcttatggtcattatattttatttcctaagagcatgggaaaaaaagtaattttctatatgcaaagttgtacagaggcatgaaggcatccctgtttatgacagaattaatcagaggtcaaccttcaagcatctcaaatgtgggggataaaacccagatttgataaaattaaacatgtactgtctacacactttaagacaatattagataaactctttaaattgttggaccatacctccaactctttag

SEQ ID NO: 734299 - DNA, 615 bp, Homo sapiens
tatgggttggttccaagtctttgctactgtgactagtgacgcaataaacatacgtgtacatgtgtctttatagcagcatgatttataatcctttgggtatatacccagtaatgggatggctgggtcaaatggtatttctagttctagatccttgagattaatccatgaattttaactcaacagcatttctactatcctaatgaagactttattttatatgctgaagtgtaagacactaaaataatctgctttttagtacatagcatttgtaagcaacaatagtcaatcgacattgagctttcactttgtacagaggattagatggagctatgaagtaagctagaagcattggattccttgcccatgatgcttatggtcattatattttatttcctaagagcakgggaaaaaaagtaattttctatatgcaaagttgtacagaggcatgaaggcatccctgtttatgacagaattaatcagaggtcaaccttcaagcatctcaaatgtgggggataaaacccagatttgataaaattaaacatgtactgtctacacactttaagacaatattagataaactctttaaattgttggaccatacctccaactctttag

SEQ ID NO: 734300 - DNA, 639 bp, Homo sapiens
ccctttctacactagacctgccaactgatgactgtgttagccaccctttgctgtcactaacctctttgtcattaacctcacattttcacagaaaatctcttttgtccattgaatgtgaaaaggtgtggtttacaaccctgacatctctttgatttttaatttttgatctcagagaaagtagtttgaactcatttagcatgatcatgagaaatactagagggtctatgaacctttaatacagacacccaagagttttaggcctcctggaaatgagatgagcctttgtgaaggtctgaagttgcagacacatattgatactgtacaatctcttaagtccacaggaatccgctgatgctcaaaggagagcaatcaaaaacctaaattaataattatgtcaatagattttcctaaagaaaaaattacctrcacctgaggcaattgggaaaaataaagctccaagttgggagagagaagtaatcaagcatccaaaggcccactttgataatgttcacttttaaacgttgagagcaaatctgttattatgtcctttttcttctccagcccattttagcagaagtctgtggcctctgaatattgagacatagtctctcaaggtaattgactctaagatcccactgc

SEQ ID NO: 734301 - DNA, 610 bp, Homo sapiens
tcatgagcagaatatggaaacaggaacatccgccactgtgaatctgaatgaataatgtccgtaagtcttcaaaagagtggaggcatgcaaaaaaaaaaaaaaaatgaagacactgcaaaggacttttaaaggtatatgtgaagcagggagaagaacagttattcttactactaggggcaggtattataatattatactgcartattatcgatttcttatactaccagtcagtacagctactgagcatcacgcacactgtgttattctatgggaatggtacttcctggatttggacaacacactggagctcctagctggacttccactacccagtctgggaggactccaaagacctgcatttctttcactctcctccctggcctattctccctggtgcatttcaggttttcatatccattttaatgttccttatcatagactcattgtgtccaggtctgtattcatcacagctttcctgctcctaattgaatttactactactatctcatatatgttgagccagaaaaacaccaaatatgctactcatctattttacacacactcccagtcaaagcttttaatctttcattttattacatgaaaatatcac

SEQ ID NO: 734302 - DNA, 640 bp, Homo sapiens
agaaaaggaagtgatggttaatatcagccagcttgcatttgctaacaacaatcatatcaaggcaatctcattgttgcccacaactgaatagactggaggttcacaggagtatggcagacacagagtatcttcactattgtgagtcacttgaaaaatattctcatgatctctctgttaaaccaaaggtacattgtgagctgaatgatcagatatagggcattcgagtgcccttttagttaattaagcaacacccttgcgttgtggatgaatggatcatatgtaactagaaggatcaaactggagttaacagcagagcactctgtccctggtgttagcctcgcccgtagttttagcaggggcttgagggagaacataccatgttgatctcatctacatgcctcacaaacctgcgtgtgatggctaatatgtyggcattcaaaatcagaattccaacctcttgacatgtagaatgaactaaaaacaacaaattatttaacagaaataaatataaaatcatgaacataagttacaaattctactctacaaacaaaaatagagagaacttgcttgatttcagtttttgtggaaagacttgcctgccaactcagaataaatcaaccatataatgaggctgtcccaa

SEQ ID NO: 734303 - DNA, 640 bp, Homo sapiens
agaaaaggaagtgatggttaatatcagccagcttgcatttgctaacaacaatcatatcaaggcaatctcattgttgcccacaactgaatagactggaggttcacaggagtatggcagacacagagtatcttcactattgtgagtcacttgaaaaatattctcatgatctctctgttaaaccaaaggtacattgtgagctgaatgatcagatatagggcattcgagtgcccttttagttaattaagcaacacccttgcgttgtggatgaatggatcatatgtaactagaaggatcaaactggagttaacagcagagcactctgtccctggtgttagcctcgcccgtagttttagcaggggcttgagggagaacataccatgttgatctcatctacatgcctcacaaacctgcgtgtgatggctaatatgttggcattcaaaatcagaattccaacctcttgacatgtagaatgaactaaaaacaacaaattatttaacagraataaatataaaatcatgaacataagttacaaattctactctacaaacaaaaatagagagaacttgcttgatttcagtttttgtggaaagacttgcctgccaactcagaataaatcaaccatataatgaggctgtcccaa

SEQ ID NO: 734304 - DNA, 599 bp, Homo sapiens
gttgcatggttttctgacggaactctgaaactatgggaaagaataaattgcttcagatttgtgacctacagaaacctaactggttaggataatcgttatattttcattgaatggatcacattttctctaagacatgtgtgtcttgctaaggcatcaatatttcttgctgttccctggtaacctaagcctgtcagcaagtcatggaatagtatgtcctatgggatgataaaataaagccctwgtagtcaaatttacagaacagaactcaagtggatacagcctaaaacaaaatggcaaaagtgcagttgagccttgaacaacataggtttgaactgtgtgtctacttaacatgtaatattttttcagtaaatatattggaaaacttgttggagatttgcaaggatttttaaaaacttacagatgaactgcatagcctagaaatgttgaaagaataaggcaaagttaggtatgtggtaaattcattaaatatagatactagtctatttcatcattttctaccataaaatatacatgaatctactataaaaagttaaagtgtatcaaaacttatgcatacaaacacaaactatacatggtgc

SEQ ID NO: 734305 - DNA, 626 bp, Homo sapiens
gctcaggaggagcctcagtgggtaccagcaacatggatttcctcagatactgagtctcaatgagacttcttgtttaatgctggagttttaacactgtacccttgatacagcgatccatagttgcaatctaaaacaacagtatttgacccattttaatgtgtacaactttaaaagtgcagcaatttattaattaatcttatttgaaaaaaatttttattgtatggttatgtggttacctattttaacttaattttttttcctttacctcatatgcagctgtggtagaaatatgaataatgttaagtcactgagtatgagaacctttcgcagatttcacatgatctttttaagatttaaataaagagctttcctaaataaaataagcaatakttaactttagaaactgtactctatgaaacgtgttttatgaaaacatcttttacaaaaagtgcttacttgactaactcagcaagaaaggtttaatgtacacatttcacatctaaaatcaaaacctacaagaaactgcactgccttcactatttacaaatcggcctacaaggaaaaaattattctcatgagaggtgtgacaaacactaattttccttaacagccaatatctacatgca

SEQ ID NO: 734306 - DNA, 648 bp, Homo sapiens
cagatatggaggagctttttctccttttctgtttcctggaagttcatagtttatatgaagtaggaattatttgtactttgaagatttagtagaattcatctgtaaaaataatctaggtttcatgggggcatttgctgtagggagtttttactgatttaatgaataggtatgttcaggtctttatttcttcttatggcttttgttatttatatttctctggaaaattgttcattgcacccttgttttaaagcttattggcataatgttcctaccatagtcttaaratgattacaccagaataactgtagttgtaccccctgtttctcattcttacgattattcatttgggccttttatcttttttatcttgatcagtcttgtcggcagtttacccctttttaaattaattttttcaaaaattagggaatcatttctttcgcttttaaaaaatttcattaatttctgctttttatttccttctactttctttttgttcacctgttaacttcttaacaacttctagtttagcacttggttcattaatttttcaaatttaaaatttttctaatgtagccatttaaggctataaatttccctctaattgttgctttagctgaatcttacaagtcttagtacgttttgttttta

SEQ ID NO: 734307 - DNA, 648 bp, Homo sapiens
cagatatggaggagctttttctccttttctgtttcctggaagttcatagtttatatgaagtaggaattatttgtactttgaagatttagtagaattcatctgtaaaaataatctaggtttcatgggggcatttgctgtagggagtttttactgatttaatgaataggtatgttcaggtctttatttcttcttatggcttttgttatttatatttctctggaaaattgttcattgcacccttgttttaaagcttattggcataatgttcctaccatagtcttaaaatgattacaccagaataactgtagttgtaccccctgtttctcattcttacgattattcatttgggccttttatcttttttatcttgatcagtcttgtcrgcagtttacccctttttaaattaattttttcaaaaattagggaatcatttctttcgcttttaaaaaatttcattaatttctgctttttatttccttctactttctttttgttcacctgttaacttcttaacaacttctagtttagcacttggttcattaatttttcaaatttaaaatttttctaatgtagccatttaaggctataaatttccctctaattgttgctttagctgaatcttacaagtcttagtacgttttgttttta

SEQ ID NO: 734308 - DNA, 585 bp, Homo sapiens
caaggtctcttcttcctctgtggatcctctacctacatgtgtctacctgctaattggacaggcacatgcacagtagtcttccttacccccaaaattcaatttgcaaataggaccaaagagctccctgttcccctcatgacaccsacacgacaaagaagagttgttccactaattcccttgatggtcggtttaggactttctgcctccactattgctctcggtactggaatagcaggcatttcaacctctgttatgaccttctgtagcctgtctaatgacttctgctagcatcacagacataacacaaactttatcagtcctccaggcccaagttgactcttaagctgcagttgtcctccaaaaccgccgaggccttgacttactcactgctgaaaaaggaggactctgcatattcttaaatgaagagtgttgtttctacctaaatcaatctggcttggtgtatgacaacataaaaaaactcaaggatagagcccaaaaacttgccaaccaagcaagtaattatgctgaacccccttaggcactctctaattggatgtcctaggtcctcccaattcttagtccttt

SEQ ID NO: 734309 - DNA, 487 bp, Homo sapiens
tttttcgtaatttaccattctgctgaatcaatttttaatccagttggaagctctaaaattctaacataattcagaagcattaaaaaagaagactaaggaagagaaagctacatttttatttcagcttgtattgcattgtgcagaaaggaaaatagtctagctaatttacttttcctatgaaaaaccttaggaggtccagagggcatcttttaagcattttgtgctccaccatgccatttgggtcaaaaggatttatttaaaatatattggtttgtttatctgataacacataactctggaaaagctaatcaatctactttattcacggaaatattaaaatgattcasctggatggttaattttggtagtcagggattataaactcacttcacaggatttttaaacaggtttgacattcctttcccataagaaagcctgtatatatttgacctttggatttcagccaaccctgtcatttattttctgc

SEQ ID NO: 734310 - DNA, 658 bp, Homo sapiens
gcttattgaggtgatgttcctgtaaactttgcaacaagacagagatgacttgcttgtttcaaatacaatgtagtcagcctgaagcttgagggtaaatcctaaccatgaattttttgtctagcctagggagaagatggtgatttaataaatcaaaaggagtgagaatgagctgtacctctttgagacgcaagggaggagggaaggggagtaggtcaagtccccaaacatttgtttcctttcacaagtgcctctttgtactggtttatatttgatgtagaactattttctgagtttgtggagatgataaggacaacttgcttttatttttgttatcgattctaaaatgatatttgtygtagaaactgataatgaaccagtcttgcaaacacaatattcaaaacaaagtctatttttaatattttaattatgcaagtaatccatgttcattccagaaaaaaaaatagaagataaagagaacaaaacaacaaaaaattatagaaactaaatccttatataattccactacttggggatacaattgtcaatactttatggatgtccttccagatatattctttgtatatacacacaaatataaataaacacacttgtaagatatataaagacatcaaattttaaatgttcttctatagttttt

SEQ ID NO: 734311 - DNA, 548 bp, Homo sapiens
ggtgaagctttttttttcactgcaaaataattggttcaactagttatttcaccatgtctaagcattttaggttgcatgaatgcaatttcaacatctccagttaactatggagaccaactgtccacaggacccagtcccccaaatattttgcaaggttatttcttccactcctccccaggaagatttatgctctgtcttctctaaatgctgagagcaagtcctatttttaaaagcctccagagaagatgcttctacaaagagatgggatgacaaagttttgccctttgcagcrttctcagtggagctaatcagccaggtgtctgatctccatggcgtctacctgactccctttcccccataggactgagcccctattggaaataactgcgagcccaatacacctttagaggtttgtttttattttgtttgatttttttttccaacagagaaattccttctgcttactgagtaaagtatagcactatgatattggtggtgattcccagaagtcttggtagctcagagccttaaacatcacttaagagaaa

SEQ ID NO: 734312 - DNA, 513 bp, Homo sapiens
tctgatcttttgcaaaatgtctgttaatgagcatttagagcaaatgatcaaaagagttgcataagtgtacacaggcagatccccatcctacacacaagcgttaaacggtttctctggcatgctcattttccagagacagccccattccatggcttttcatctgatactgctggaaaattttagagcacaacttccattgcccttcagtgtggggctggacagcctagttttgctgttattagattatttttaatcccagaaattatgtgtttatttacaaaataagcaagttcggattactcaatacatttatgtggggctacaaatatgataagatgctgtacccaggtttccttggtagaaatctagtatgcraatgtgatcatggagaacaaacagctagaaagcaacagtgcccagtctattccatccacaagggctgttccacatcttctgagggccctctgactccagactcttcagccaaggaaatgagcaaatatgatgaaatga

SEQ ID NO: 734313 - DNA, 733 bp, Homo sapiens
ttattgtcttttcctagcttcctaacatgaatacctagagcattcccccaatattactttactgaagctttttatttgtgaaagaattatatgttcatctaatcaataatacccagttaaacggagtaaaagttaatagcatcctccttcctctcctccagagctactttcgtgtgaaaacaatgtaagcattttgaatccattcacacatttgtccatgcttgtaatagggggaattttttgtttgctttgttacaaaaatgaaattatatttttctactacttgttctttcacttgtttatcatacatgtttcttttttaaatttttctattcatttaaagcaatgagcyttcaaatgttataacgtaaactgtgtttaagagagatttgggagaaatttaagcaaagaaaaacaaaaggaacaaaagaataggtatggaagtacaagatgtatgtcaagaattcagagttagacacatttggctgaaggagaggaacgatactggcaaatattgagcaacttgcagagacaatatagagttggtatgtgaggacaatgagtgggaagccattgaggctttaagaatagggtcatttattaactgcttaatgttaattaaaccttaaaataacctaaaagtatctctaataaaaatgttactcattgaattgttattttaattaatttagtccatagtgaaccctctacagactaaaggagataatgtata

SEQ ID NO: 734314 - DNA, 596 bp, Homo sapiens
gcactgctctcttcaaagctgtcagacagggatgtttaagtctgtagaagtttctgctgccttttgttcagctatgccctgccccccagaggtggagtctacagaggcaggcaggcctccttgagctgaggtgggctccacccagtttgagcttcccagctgctttgtttacctactcaagcctcagcaatggaggatgcccctcccccagccttgctgctgccttgcagttggatctcagactgctgtgctagcagggagcaaagctccgtgggcgtgggaccttccaagccaggcrtgggatataatgtcctggtgtgccgtttgctaaggccattggaaaagtgcagtattagggtgggagtgtcccgattttccaggtgccgtctgtcacagcttccctttgctaggaaagggaattccccaaccctctgtgcttcctgggtgaggcgatgccccaccctgctccgtgggctgcacccactgtctgacaagccccagtgagatgaacccagtacctcagttggaaatgcaggaatcacctgtcttctgtgtcactcacactgggaactgcagacgggagctgctcctatttg

SEQ ID NO: 734315 - DNA, 636 bp, Homo sapiens
ttctaattaggaaatattaattaattaagacctctatgccctcatatgttgtatctcctacaggagcaataaccatacaaaaggccagaatgccttctgcctccatttaatcaaatactcagttgattatagattatgtaaataaatctgcttgagaaagggcttttcttggcaaaacaaatcagaatctgtatattagctctgtcagactatgcaaggaaaataaataaaagcataaactcaattcagtaaatctttattgagctcccacggggtgcgtgaatttaggatctataatttacataagtaggaaagtgttactttagcccccttktttaaaaaaaagcaaattacaatttctgtatatatttcaagtgaatcatttaatgtgagtgaggctcagttaggtgttaccataagtattaacagaagaaaaagggaaagcacaaacattttccctctaccagaaaagggtctgatgtaagataaactagcctgttggtttaacaatagctcattaaaaaggccagagaatctgggagaagatgtacttggaagcactgtcctctgagggcccattcccaagggacagcaaaatactgaaaaaaattaactggctcaaaaattatattgaga

SEQ ID NO: 734316 - DNA, 567 bp, Homo sapiens
gaagccaggatccacatcatgaggaactcagcatgggagagaagggagaagtggctgggcatgcagacaaacttcatatatgtgagaattttatttggtgctatcactgatccttgccctcttttcttgatgtcataataattcattttaactgttggtgttaatttttaactctgtctgtcaacatcactgaggttttcttstgaatatttagccaaagattattctgctgaattcattataattatttttattttgatcctcagctatcttaagtatagaaaccatgtttattcacattaagccacatattgagtgaaaaaataattgtttttaaaggtgataaacatctctaattataactcaaagcaaattaaaagagacttacttttattatcgcaatttacatttttctgcatattaacccatggttctattattatttattgccaataaagaaatgtaacacctacatgtgatttatcacatcatcaatcagtggggtgaagctgacatactatttaggaagaaaaagtatgtcaaaagaaaagtataaacacattgtat

SEQ ID NO: 734317 - DNA, 578 bp, Homo sapiens
ggatattgacctatagatttcttttttgttgttgtatccttgtctggtttttgcatcagggtaatactggcctcaaagaatgtgtcagggagaattctgtcttcttcattttttgaaatagtttgaggagaattcatgttagttcttcttcgagagtttggtagaattcagcagtgaagtcatgtggtctgtgacttttctttgttgagagacttttttttttttttttgagacggagtctcgcactgtcacccaggctggagtgcagtggcatgatctcggctcactgcaagctctgcctcccaggttcacgccattctcctgcctcagcctcctgagtagctgagactacaggcgcccgccaccacgcccggctaattttttttcrtatattttagtagagacggggtttcactgtgttagctaggatggtctcgatctcctgacctcatgatctgcctgcctcagcctcccgaagtgctgggattacaggcatgagccaccgtgcctagctgagagacatcttattactgcttcaatctcattacttgttattggtctgttcaggctttctattt

SEQ ID NO: 734318 - DNA, 643 bp, Homo sapiens
tatctagaagacctgcattgtaataaatatcaaagaaagcttcaggttgaagacaaatgatcccagatagaagcccagatatacaggaaggaagagcactagaaatggtaaatgagtgggtaaaaatacaagactattaaaaaaatttatccaaaagacaattgagttttattatttaaaaacacaataatgtcaatgaatgataggaattgtagcatatgtagaagtgcaatacatggccagaatagcacagagaatgaggaggtgtaaatagaattatgctattggacatggtggtttaattttaattcaagatacattgtgatatgtgaaagatccatattataatccctasagcaaccactaaaagttaaacaaaattgtattaggaaggaagaaaggagaaagagagggagggagccagggagaaggggggaaggagggaggaagatgagtgtggaaactaaattagcattaaatttgagaacttagaaaatgacagtaaaactttaggaaatcaagaggaagaaattagtaacaaaagaaataaatgaggtatttacaacagtatagatgttaaagaaatgtaacaatacaaaagctaattagtaataaaagtaacacagtaggcacaattctggta

SEQ ID NO: 734319 - DNA, 569 bp, Homo sapiens
tttcttgcttttgggttgtttgtgtaccttatatattttgaatattagccccttatcagctgtatggtttgcagatattttcttccagttcatgttttgtctcttcactctgttcattgtttccttttctgtacagaagcttttgatttgatgcaactccatttgtcttatttttgcttttsgtgcctgcatttttggagtcctatccaagaaatcattgcatagaccagtattgtggagattttcccttatgttttcctctattaactttacaattccacatttccacatcttacatataagtcttttatacattttgagatgatttttgtgtatggtgtgagataagtgtccaattttatcttctgggccatatctatttttcccaacatcatttattaaagagtctgttctttcccttttgtgtttttggcatctttgtcaaatatcaactaattataaatactgaatacttgggtttattactgggttgtctacctgttccattggtttatgtgtctttgtgccagtgccatgctgtttttattacaatagctttataacataat

SEQ ID NO: 734320 - DNA, 625 bp, Homo sapiens
ttatgctgtggttccagtattaggtaagattcctgcagttgccttacattcattcatgtctagaatctgcctcactgtagttattttgcaggagaaataccccaaactatgtgtacagtgagatgacccttggctatttgttcaaatcaccagacacatacagttaaaactgtgtgaccttaagcattattgcatattcccatttcatttctaataatgattaaatattgacctcaaaataatgtaatttaaaagggggatctttctagaaaccatacataaaagtaaaaaaagtatttgaggaatagaccttcaaatatattggcactgtgaaaaaatgtgttttaccagttaaaacttttttgagacaggctcttgctttgttgcccaggctggagtgcagtggcatgatctctgttcactgcaaacttcacctcccaggctcaagcaatccttccacckcagccttcttggtagctggactatatgcgcatgcccggctaatttttgtattttttgtggatatgggtttcgtcatgttgcccatactggtttggaacacccgggctcaagtgatccttccctcccaaaatgtgagccaccatacccaaccaaaacatatttt

SEQ ID NO: 734321 - DNA, 613 bp, Homo sapiens
aataattaagcaaaacacagatttggtgttcatatttcataaccctctaatatcagaaaatatgcgatctgtgttaggaagacaattgatgtatcttagaaatagttccaacataaaaggttaagttattttaaattcagtcatcttgaaaataagtgcaatgctaactcctcatgttgttcttcatggattacaaggaagcagtggagtatcacagttaaaaggatgcatatggttcccaactgcccagatttcaaatcccagctatgcygtgtgtgaccttggacaactcacttaacgtctctgaagctcaattcctccactgcaaaatgggtagtggtaaggatttaatgagttaatgtatataaagcattggaagagtacctggcacatagtaagtgttagataagcattctctacaaagatatttgcatttaccaagtacctaatgtgtgtcaggtactgggaagggtgctgtgatctttatcattatattttataagattttactacatgaagtgaaacaccagaatcttgccttcaatattcctcaagcccaacgtaaccggcaataaagagttatcaaccctagtacaacacaatgtaatccatt

SEQ ID NO: 734322 - DNA, 619 bp, Homo sapiens
cattgtccctataaactttttgtagggcatcaatgatttcaccaatctgccacccaagcttcaccataaatttaatgtcattcttgtttcaattttagcaaacttatgtttctctgataggggctcttttcaaactgatgtcttatcctccttagtgcctcaaactagatcctgttcagacatgctataacaaattagtaggagtttattttagtgcaaaaaaaaaawtcatgtatagttttttcataatacacattttccatgaactttttgaagaccacttgtattgtggtaagcagaattattgctcctcaaagatgtacacatcctatccttggatcctgtgaatgtgttacagatagaattaagttcataagtaagatgaccttaaaatagggagcttatcctggatcatctcgggggtgggggcaatgtaatcacaaagtacttaaaagtagaagatggcagaaaaggagtgcagaatggtgtgatgtgagaatggaggaagactcaaacaatcatagcttgctttgacgatggaggaaggaataagccgaggaatgcgggtggcttccagaagctgcaaaggcaaggaaacagatgtccccctagaacctcc

SEQ ID NO: 734323 - DNA, 542 bp, Homo sapiens
gattaaatcagtaatcaaaaacctcaccacaaagaaaagcttaggacttgacggcttctgtggtgaattctaccagacatttaaataagacttagcaggtatgcttgtcaaacttttccaaaaatgattagggaaccctttcaaaaccatcatacaaggccagcattaccttgataccaaagctarataaggacactctatgaaaagaaagttacaggccaatatccgtgataaatatggaagcaaaaatcctctacaaaatactaacaaacaaaattcaattgtacaacaagatcagacaacacgaacaagtgggatttatccctgagatataggggtggttcaacatacaaaaataaatataccaaattaaccaaaaggaaggataaaagccatatgataatctcaatagatgcagaaaaagcatttgataaagctcaacactctttcatgatgaaatctctcaacaaattaggaatagaaggaatatacctcaacataataaaggccatatatgacaagctcacggctaacattgtact

SEQ ID NO: 734324 - DNA, 542 bp, Homo sapiens
gattaaatcagtaatcaaaaacctcaccacaaagaaaagcttaggacttgacggcttctgtggtgaattctaccagacatttaaataagacttagcaggtatgcttgtcaaacttttccaaaaatgattagggaaccctttcaaaaccatcatacaaggccagcattaccttgataccaaagctagataaggacactctatgaaaagaaagttacaggccaatatccgtgataaatatggaagcaaaaatcctctacaaaatactaacaaacaaaattcaattgtacaacaagatcagacaacacgaacaagtgggatttatccctgagatataggggtggttcaacatacaaaaataaatataccarattaaccaaaaggaaggataaaagccatatgataatctcaatagatgcagaaaaagcatttgataaagctcaacactctttcatgatgaaatctctcaacaaattaggaatagaaggaatatacctcaacataataaaggccatatatgacaagctcacggctaacattgtact

SEQ ID NO: 734325 - DNA, 641 bp, Homo sapiens
tggatgctctgtttcatgatttgtgtttcatcccactgcagcaaacttttaagagatgtccaaatcctttcattatctccggctaccacccctgacagagtcctctgttacagtactctccacctttaatttccctttattatttctttttctatcttttccagctagtttgtcagctcctggccaaaaaaagagaggaaaaaaatatgtaattatctatgcaactctgtgcttaagacaacaggcagtaactrgtaatgaatatatgcatggatctagaatttgttgagctcctgagttctgagtgctgtattaggcagtgggtgtttaaatgcttgtgtctgctgtgtatttgctaattatgagttagggtaagagccaagctgctataacaaagagacctgaagatatagtgacatacttaagatataagtttgtttttctctcacataacagaccagtagtaggtgagtggtccaaagtgggtaagtggctgtggtctgcaaagttattttgggacctgagctggtgggttatttctgccatcttcaacatatggtttccatctctgggcctcacatggctccatttcccagcctgtaaaaatggggaaggaaaacgagagagggaaagagtggaga

SEQ ID NO: 734326 - DNA, 590 bp, Homo sapiens
taaaaaaaaagcttacgttcatcttttaatcccttggattgtatgccaaaaattctagtatttgaaaatgggccttaaatcaaaaaaggcagataatatcaactggcaatgttagtaagaccttgaaggattttaagcaggggagtgagatgattacattagaaagaatgctctagcagataacacaagcaagaaggaagaaagatctgtccacgataatgtggtggaaaaccaacagataagggcaagtatctggggcaaaactgataaactcacccaactgagaccaggagtyttagtaaagattgagttccctgtgaaggacagaaaacccaagataacactgtcttaaacaaagtagaaatttatttctttgagaaattcagagcagttcacatggggtttccatgatccccagagacctggctatttccagctcatggctccttctaccttgctgctccaccactctcagcacatggctccaacatcatgatacaacatggtagtcagagctctagccatcaatgtatcttatctacattccaggaaaagaatagagaaaaggttaaaaagaaaataaagttact

SEQ ID NO: 734327 - DNA, 590 bp, Homo sapiens
taaaaaaaaagcttacgttcatcttttaatcccttggattgtatgccaaaaattctagtatttgaaaatgggccttaaatcaaaaaaggcagataatatcaactggcaatgttagtaagaccttgaaggattttaagcaggggagtgagatgattacattagaaagaatgctctagcagataacacaagcaagaaggaagaaagatctgtccacgataatgtggtggaaaaccaacagataagggcaagtatctggggcaaaactgataaactcacccaactgagaccaggagtcttagtaaagattgagttccctgtgaaggacagaaaacccaagataacactgtyttaaacaaagtagaaatttatttctttgagaaattcagagcagttcacatggggtttccatgatccccagagacctggctatttccagctcatggctccttctaccttgctgctccaccactctcagcacatggctccaacatcatgatacaacatggtagtcagagctctagccatcaatgtatcttatctacattccaggaaaagaatagagaaaaggttaaaaagaaaataaagttact

SEQ ID NO: 734328 - DNA, 590 bp, Homo sapiens
taaaaaaaaagcttacgttcatcttttaatcccttggattgtatgccaaaaattctagtatttgaaaatgggccttaaatcaaaaaaggcagataatatcaactggcaatgttagtaagaccttgaaggattttaagcaggggagtgagatgattacattagaaagaatgctctagcagataacacaagcaagaaggaagaaagatctgtccacgataatgtggtggaaaaccaacagataagggcaagtatctggggcaaaactgataaactcacccaactgagaccaggagtcttagtaaagattgagttccctgtgaaggacagaaaacccaagataacactgtcttaaacaaagtagaaatttatttytttgagaaattcagagcagttcacatggggtttccatgatccccagagacctggctatttccagctcatggctccttctaccttgctgctccaccactctcagcacatggctccaacatcatgatacaacatggtagtcagagctctagccatcaatgtatcttatctacattccaggaaaagaatagagaaaaggttaaaaagaaaataaagttact

SEQ ID NO: 734329 - DNA, 616 bp, Homo sapiens
tgcagttatgatatgactctgacaaatgcttgtattgccttaagtcaaagatggattactgtaagtaataatgtgtgatttttgattcctttttgaattgtgcaaatatgtctttactcatgaagcagggagggtactttaaatcacaaacagttatatttggaaaggctatttgaaagtcaggtttatctaaggtgatattatatctactctcaatatagaaaattaagggtttgagacagggtcttgctctgttgcccaggctggactacagtggcgtgatcatggctcattgcagcctcaacctcctgggctcagtcagttgtcccacctcagcctcccgagtaactgggactacaggcatgtgcctccatgcctggctaatttaaaactttttrtacaaacagggtctgtgttgtacaggctggtctcaaactcctggtctccagtgatcctcccaccttagcctcccaaagtgctggaattacaggcatcaggcatgagccactgtgcccagcctagaaaattaagttttatggggggaaaaattgatgttgaaggcattaatcctgatttttcttgcttcttaactcttaaaaaaaaaaagtatgcaaaa

SEQ ID NO: 734330 - DNA, 606 bp, Homo sapiens
atttccgtgccttttctcaaatacattattgctgtgagaaatgccatcatcttcacagtttgtcatattaaaaattatttttatgtttttctcccctaatttctacctcctatttttttctggagtaatttaaagaacatctcagacatatataatttcacttataaatagttcgctgtgtattgctaacagataagaagttaaaaaaataaccacagtaccattatcccacctagaaaattaataacaattccttactataatcaattataatactcattttccagttttctcaattgtcttaaaaaatatcttctttggctgggtatggtggctcctgtctataatcccagtgctttgggargcctgaggcatgaagcttgtttgaggcccggagttagaggccagcctgggcaacatagtgagatcctatctctaaaaaaaaaaggaaaatcagccaggtgtggtggcacatgcctgtagtgccatcagggagctactcaggggactgagggaggagattccttgagcccaggagtttgaggctgcagtgagctaatggcaccactgcattccagcctgggcaacagcgcaagaccctgtctc

SEQ ID NO: 734331 - DNA, 658 bp, Homo sapiens
tttttaatgctttcccagtgcctagtcttttgcttttgacacgagttacttttagaattttatgtatttcattgtctcataaatacagcttcattctttttttttttttttttttgtaataagcaagagtatagagattaaatagggtcttgggtccacttaaattgcccacaggtcaaaacattctgagaaacaacgctgccagtgattaaaaagagccaatttagaggctaatttagtaatttattaattaatttactaatttcttaaatgtatttagaggctactttagtagttatcctccctgttagrcaggcacaaaaagatccttggcctctgtcccttctctttacctctcacgttgactgttgatctggtggattctacttccttcaataccttcacagctgtccccttcttacaagtcccactgccactggctgtcttcaccccaggagatgcagtgccttcatccctgctccccctctctccgccttccatctgcccaccaccattctcaatgtcggctttgactgggtcattccccttctcagaaactttcaattgcttttaaaaaatgtattctcaaatcctggtccgctgttccaggctcccatcccttgcccttctgcccctgcagcttccgaatcattccacc

SEQ ID NO: 734332 - DNA, 645 bp, Homo sapiens
tagttataattttttttgcttaggccaacatccagaatagtttttcctggttttcttctagaatttttagggtttcaggtcttatttataaggtctttgattcatcttaagttgatttttgtataagttttattcttctacatgtggctatccaggtttcctagtaccattaattaaatagggtaccctctctccagtttatgtttttgtatgctttgtcaaagatcagttggttttaagtatttggttttatttctgggttccctattctgttccactggtctgtgtatctaccatgctgtcttggtgaccacagctgtgtagtataacttgaagtcaggcaatgtgatgcctccagatgtattctttttgcttaagattgctttggmtgtttgggtccttttttggttccatatgaattttaggttgtcaatatcctcaataaaatactagcaaactggatccaatagcacatcaaaaagataatacaagtgtgtttcatcccagggatgcagagatgatttaacatatgtgagtcaataaatgtgatacatgacataaagagaattaaaaataaaaaccatatgatcatctccatagatgcagaaaaagcatctgataaaatccaacatcgctttatgataa

SEQ ID NO: 734333 - DNA, 642 bp, Homo sapiens
ggagagaacggcagaagggaagttcttaagcaagtaaataatataacatgtctcatgaatttttccattttcccttggggtaaagatgaagtaaagggatgcagtgccaacctgtcccagtgttcttgccaattgcagttcatttccaattttaacagaggaaagtggacccctaggattgtccagtcagtggcagaggaaggcagtgcctggaaatgtcagttgctagaggaactgaatatgatgcagcatatttcaaaatattgagggaaattgtgatgttcctttgctgacaatcaagagaagatgtaaatttggtaccagttcatataatwttacaattataatcctagcaaaactatatgtatctgtaatgtacaacttggcagtaaatatatatatatacacatatatatatatacacgtgtatatatatatatacacgtgtatattttaaactatctcactgaatggaaaacaccatagctagtttgggtttggtttgtttacctctttcaaacctcatgttgaaatttgatccccattgttagaggtggggcctaatggaaggtgtttggctcctaaggacaaatcatttatgaatggcttggggtccttgaggtggtgagcgagttcttgctc

SEQ ID NO: 734334 - DNA, 571 bp, Homo sapiens
attggaggtcataacacagaatgaattcaaagaattactccagattttgcccacttgataaatgtctcagtcggaaacaataatttcattattttgcccagaacagtttcctttggaatatcatgctcaccctaattccaatttcaatcccttgtactgtttcttaaggtcacagtgactgattccaaagacaaacggtcccaagatagcakagtaaacatcacaattatataccaaggttttcatggtaaggagaaacatttacgttacagagaaaaggggaaaaatttaaagcccctaaaaacataaaatcttgtaagatgtcctagctctccacatctgtttggctcctgggccagagtttggaaaacagtttgagtctgacagacaagctgccatcttgatttagcttctaagggcaaggaaccagaatccagggaaagaagtatttgcatggaaatcagactgtatgtagctctcaagttggaagaacaagagtccacagtgcaggagtctgggcagcaaggggtacctaatcatattttaaaacctcacatttatattaaacatt

SEQ ID NO: 734335 - DNA, 571 bp, Homo sapiens
attggaggtcataacacagaatgaattcaaagaattactccagattttgcccacttgataaatgtctcagtcggaaacaataatttcattattttgcccagaacagtttcctttggaatatcatgctcaccctaattccaatttcaatcccttgtactgtttcttaaggtcacagtgactgattccaaagacaaacggtcccaagatagcatagkaaacatcacaattatataccaaggttttcatggtaaggagaaacatttacgttacagagaaaaggggaaaaatttaaagcccctaaaaacataaaatcttgtaagatgtcctagctctccacatctgtttggctcctgggccagagtttggaaaacagtttgagtctgacagacaagctgccatcttgatttagcttctaagggcaaggaaccagaatccagggaaagaagtatttgcatggaaatcagactgtatgtagctctcaagttggaagaacaagagtccacagtgcaggagtctgggcagcaaggggtacctaatcatattttaaaacctcacatttatattaaacatt

SEQ ID NO: 734336 - DNA, 572 bp, Homo sapiens
ctcaactgtgcttcctaaagctgaatatttgtctttttcaactctggaaatcccattagaaattgattggggccgggcacggtggctccaatctcagcactttgggaggccgaggcgagcagatcacctgaagccaggagttcaagatcagcctggccaacatgacgaaaccccttctcttctaaaagtacaaaaattaattagctgggtgtggtggcgtgcagctgaaatcccagctacttaggaggctgaggtaggagaattgcttgaacctgggagagaggttgcagtgagcagagatcacgccactgcactccagcctgggcgacagagtgagactccgtctaaaaaaaaaagaaaaagttgactggagcttttcattcaactttttttttttttttttttgaccctgttacccaggctggastgcagcggtaccatcatagctcactggagtcttgctcttcggctccagtgatcctatctttcttaccctcctgagtagctgggactacaggcatgcaccaccatgtggctaattttaaatttttttgtagagacagggtcttccc

SEQ ID NO: 734337 - DNA, 572 bp, Homo sapiens
ctcaactgtgcttcctaaagctgaatatttgtctttttcaactctggaaatcccattagaaattgattggggccgggcacggtggctccaatctcagcactttgggaggccgaggcgagcagatcacctgaagccaggagttcaagatcagcctggccaacatgacgaaaccccttctcttctaaaagtacaaaaattaattagctgggtgtggtggcgtgcagctgaaatcccagctacttaggaggctgaggtaggagaattgcttgaacctgggagagaggttgcagtgagcagagatcacgccactgcactccagcctgggcgacagagtgagactccgtctaaaaaaaaaagaaaaagttgactggagcttttcattcaactttttttttttttttttttgaccctgttacccaggctggactgcagyggtaccatcatagctcactggagtcttgctcttcggctccagtgatcctatctttcttaccctcctgagtagctgggactacaggcatgcaccaccatgtggctaattttaaatttttttgtagagacagggtcttccc

SEQ ID NO: 734338 - DNA, 596 bp, Homo sapiens
tccaagctgcttgttctcatttccacttaaagctgatgcgttcccgtcaaggtccccaaagtcatgtaccctgcctggcctgcccctagattagccccaatcagttgtagcattcttgccatctcttagtaaattcaagaaagcaaaactttcacccacactctgcagttctgtgggagcagaagctgcaggaatgcagtctgtctgttggaagatatgggggaggcagacagtccacagggatgcagtggggacccagaggagagggaggttggccctgggracagaggaaggctgcacaaaggacctgactttttgcagaaggtgaaggttttgagggaacccaccaattgaaggaggggttggtgcaggcacatggcagtaaaagcacaggggaagccgggatgaaggaagttgttggccatttcaagggcccagcagggccagacacagtggctcatgcctgttatcccaacattttataaggccaaggcaggacaatcacttggggccaggagttgaagatcagcctgggcaacatagcaagattctgtctctacaaacataaaaaatttttaaagctgggcatggtgata

SEQ ID NO: 734339 - DNA, 483 bp, Homo sapiens
gtttcaccatgttggccaggctggtctcaaactcctgacctcaagtgatctgcccgcctcagcctcctaaagtcctgggattacaggtgtgagccaccacacctggcctaattattattattattattattattattattattattattatttccaattcaaaaattttaatttaaaagtaaactttaatgtcaaaaatgcaaacttggggaggggagaaagatcacacgcaaagctgccacttcacacttgcagggctgcacggcagctaggcaaaggtgttcctcaattcccagayggtgcggcggccagacagaggtgctacttactcacttcccagatggggtggtggccaatgcccggcttaattattgtttttctttttttcatacaaacagacaccttactgactttttacatttttttgtagagaaaggctctcactatgttgcccagggtggtattaaactcctaggttcaaga

SEQ ID NO: 734340 - DNA, 599 bp, Homo sapiens
ctgcgtggggtgggagcaaaggcccgctggatcagctagagaaaggaggggaaactgctcagtctgcagatccccagtgggagcagttaaataacaaaaacctgagcatgcctcttctccctgccgacttccacaaggaaaacaccgtcaccaacgactggattccagagggggaggaggacgaygactatctggacctggagaagatattcagtgaagacgacgactacatcgacatcgtcgacagtctgtcagtttccccgacagactctgatgtgagtgctgggaacatcctccagctttttcatggcaagagccggatccagcgtcttaacatcctcaacgccaagttcgctttcaacctctaccgagtgctgaaagaccaggtcaacactttcgataacatcttcatagcacccgttggcatttctactgcgatgggtatgatttccttaggtctgaagggagagacccatgaacaagtgcactcgattttgcattttaaagactttgttaatgccagcagcaagtatgaaatcacgaccattcataatctcttccgtaagctgactcatcgcctcttcaggaggaattttggg

SEQ ID NO: 734341 - DNA, 638 bp, Homo sapiens
ctacaagaaacacacttcacctaaaaagatacacatagaatgaaatcaaagggatagaaaaagagattccatgcaaatggaaatcaaaagaagagccagagtagctacacttatataaaacaaaagataattcaagacaaaaactgtaataagagacaaagaaggtcatcatacaatgatacaggagtcaatccagcaacagggtataatgatctatacactcaacactggagcacccagatatataaaacaaatatcactagagctggctgggctcggtggctcatgcctgtaatcccagcactttgggagaccraggcagaggagttcaagaccagcctgatcaacatggtgaaaccacgtctctactaaaaatacaaaaaataagccaggcatggtggcgcacacctgtaatcccagccactcaggatgctgaggcaggagaattcgcttgaacccgggaggcgaggttgcagtgagccaagactgtgccactgaactccagcctgggtgacagtgcgagactctgtctcaaaaaagaaaaaaatacatatcactagagctaaaaagacagaactcaacacaatagtagctagaaatgtcaacaccccactttcagcattggacagatctcctag

SEQ ID NO: 734342 - DNA, 565 bp, Homo sapiens
agcttcagccttctcatttgtaaaatgagtatatttgtataagagctccaaggttatcagctaatcttcagcaaaggcgccaagaatacacaatggtgaaagaacagtctcttcaataagtggtgctgggaaaactggatatccasatgcaaaaaaaaaaaaaaaagatccttatcttacactatacaaccaaaatccactcaaagtagattaaagatttaaaccaaagatctgaagctgtaaaacttccagaaggtaaacatatggtaaaaagcttcatggcattggtattggcaatgattttttggataggacacaaaaagcacaagcaacaaaacaaaaaatagaggggaggactacatcaaactaaaaattttctgcacagcaaagaaaacaatcaacaaaaaaacacataatgggagaaaatatttgcaaatcatatatctgataagcaattagtctctaaaagatataagaagctcacacaactcaataacaaaaaacaaataaaccaattcaaaaatgggcaaaggactaaaatagacatttttccaaataagacata

SEQ ID NO: 734343 - DNA, 623 bp, Homo sapiens
gagcaaacaatgtccactgtatatgaaatggctctctattcttgaggatgagggaggagaggaagagaagagaggacagaaagagcaggctttcacctcatcagaaagcagttgacacaatttctatccactgaaatttgtcatctgaaccatcaaaaaaccagacttctactgatcttgattgtcacaagagtaaaagtttgaataagcatccattactgagaagcatacctagagctgataactcctgaatctttatcaatttattttcatagagtgaaaagtcagtgaaaatcttccattagccaaatgggctttcagtgagaaggttaatttaaatggttgttkaagaaggtactagatgaatgtggtaatcctgaagtgaggaacctcttcctctgagcttatttgatcaagctctctgcaaactttctagaatatttagccaactgcctctattttccaccacaagatcaacacataccactactcttaagtgaaattaaatgtaaatgctaaaatgtatgtcacagacagatcaagaggatacacacccatgggctttactgtaaaggcatatactaaggcagagtgagccactgcaaaaacacactgtccataat

SEQ ID NO: 734344 - DNA, 637 bp, Homo sapiens
caatgaatattaaaaacacattcctagagctggccctgtggcttggcagccgcgcacagcatggagacctgcgagggagtcaaaggaagcctctttgcttttccagagctgtcagggcttggcaggagctgaggtgggaaccttcggtgtatgaggaaagtggaaggaggaaggtggcggtgactatgcccagcggtgtgactcctgtctcctcctggcagagcctagggtggcttcaggagggtttcatagaagaagtcagtctcagccgtttggtgctccaattcagagctgaagcggagccagactgagaaggaggagggatggggatagaaaaacaaacaccagagaacaaacagacagaaggtagtgctgggaacagccagcctgtgtcctgcaggaaaatcccaagtcctctctctctccctccaggccgcctacagcatggtgtagcatgagggccttcgctgctgcygagacatagactgggaaagtgtttatctccatgaaataaatacattgatctgccttttttctttcaatatttgctgtgcagtgggggatgaattcctctagtggtgtgctccagaaccttcaaaggcacattaaccaaacattaaaggtacgtaatgatctt

SEQ ID NO: 734345 - DNA, 616 bp, Homo sapiens
tctctccctccaggccgcctacagcatggtgtagcatgagggccttcgctgctgctgagacatagactgggaaagtgtttatctccatgaaataaatacattgatctgccttttttctttcaatatttgctgtgcagtgggggatgaattcctctagtggtgtgctccagaaccttcaaaggcacattaaccaaacattaaaggtacrtaatgatcttttcaatgaatcccttccattgtcagcaaagacaaaggcccttctcttaagtacagctttggttttgagtgttcagattttgcctcttgccattggcagggaattgaccctggaatccttgcatctttggcaacaagagaggtcagagggtgggaatctctaactggagagtttggttcacatgctgagagttgaggtcttaggattcttaagctgccggccatgaacatctaaggaagcatggagatagaattcagggagctccatgaaggtggatgaaaaaaagagacatctttaatctttatttttgataatctctgaaatttagcattctttctatcacaaatgtgggaaacaaactatagtcatgttagtaatacttatgactttgtcactaat

SEQ ID NO: 734346 - DNA, 616 bp, Homo sapiens
tctctccctccaggccgcctacagcatggtgtagcatgagggccttcgctgctgctgagacatagactgggaaagtgtttatctccatgaaataaatacattgatctgccttttttctttcaatatttgctgtgcagtgggggatgaattcctctagtggtgtgctccagaaccttcaaaggcacattaaccaaacattaaaggtacgtaatgatcttttcaatgaatcccttccattgtcagcaaagacaaaggcccttctcttaagtacagctttggttttgagtgttcagattttgcctcttgccattggcagggaattgaccctggaatccttgcatctttggcaacaagagaggtcagagggtgggaatctctaactggagagtttggttcacatgctgagagttgaggtcttaggattcttaagstgccggccatgaacatctaaggaagcatggagatagaattcagggagctccatgaaggtggatgaaaaaaagagacatctttaatctttatttttgataatctctgaaatttagcattctttctatcacaaatgtgggaaacaaactatagtcatgttagtaatacttatgactttgtcactaat

SEQ ID NO: 734347 - DNA, 616 bp, Homo sapiens
tctctccctccaggccgcctacagcatggtgtagcatgagggccttcgctgctgctgagacatagactgggaaagtgtttatctccatgaaataaatacattgatctgccttttttctttcaatatttgctgtgcagtgggggatgaattcctctagtggtgtgctccagaaccttcaaaggcacattaaccaaacattaaaggtacgtaatgatcttttcaatgaatcccttccattgtcagcaaagacaaaggcccttctcttaagtacagctttggttttgagtgttcagattttgcctcttgccattggcagggaattgaccctggaatccttgcatctttggcaacaagagaggtcagagggtgggaatctctaactggagagtttggttcacatgctgagagttgaggtcttaggattcttaagctgccggccatgaacrtctaaggaagcatggagatagaattcagggagctccatgaaggtggatgaaaaaaagagacatctttaatctttatttttgataatctctgaaatttagcattctttctatcacaaatgtgggaaacaaactatagtcatgttagtaatacttatgactttgtcactaat

SEQ ID NO: 734348 - DNA, 611 bp, Homo sapiens
gactcacagctggaggggaatttgccccaggatgaatygtatcttgagtctcactcatatatttgaataagactttggatttagactttaaagttgatgctgggataagacttttggaggctagtggaatggaatgaatgtattttgtatgtgaggacataaattttaggcagtgagtgatacagtgatatgaattaaatgttctcatcctctccaaaattcatgttgaaacttaatccctaatgcaacagtgttggtgggccacctgaatgtgatactattttttgagtgtcattaagtttaatcaaagtccggtgtcagaagatgcgatagactttcttggtcttccttataatagcttttcaatggtttattctcttatagagttctcttctatcacagaatactgaatttgtcttcttgaatctgcaagtgcacaagaaaagtaatcctttgtatctctagacatggcaagcatatcgattgagctgcaggtgctatgaagcaggaagttcctagtacttctgactgttgggtcaatagagacttctacctgtatgttatagctctttggttttggtggtgaaaggatgatctactaccaaggatct

SEQ ID NO: 734349 - DNA, 611 bp, Homo sapiens
gactcacagctggaggggaatttgccccaggatgaatcgtatcttgagtctcactcatatatttgaataagactttggatttagactttaaagttgatgctgggataagacttttggaggctagtggaatggaatgaatgtattttgtatgtgaggacataaattttaggcagtgagtgatacagtgatatgaattaaatgttctcatcctctccaaaattcatgttgaaacttaatccctaatgcaacagtgttggtgggccacctgaatgtgatactattttttgagtgtcattaagtttaatcaaagtccggtgtcagaagatgcgatagactttcttggtcttccttataatagcttttcaatggtttattctcttatagagttctcttctatcacagaatactgaatttgtcttcttgaatctgcaagtgcacaagaaaagtaatcctttgtatctctagacakggcaagcatatcgattgagctgcaggtgctatgaagcaggaagttcctagtacttctgactgttgggtcaatagagacttctacctgtatgttatagctctttggttttggtggtgaaaggatgatctactaccaaggatct

SEQ ID NO: 734350 - DNA, 638 bp, Homo sapiens
tcctgctgccactttcataagctaaaacacgcatagccgaagcatttttaagtaaaagtcctttgcacaaaggattaaggatttgatcatcattaagtagataatgttcactctctattgtttcttaaggatacaatggaaagcagtcccaaagtaaagagttcattagtgattacagtttgaatgtagtgaactagacatatatttcccttgtagcaaacaatagaatctatctggtaaccctgagaaatgtaaatttaaccacacataactgctttatagacggagaagcagacataactagtttagtgaaggggagggagagggagaagaagtgggggcgggtmtcagacacacagaggagaacagataagagaaagagtacttctggccttcggtttttttccaaatactttgtgaatctttatttcatctccgccttcgtatgctaagagatactcttatgttaaaatttcttccttttttgttttagctatgtgttagctaaaactctttgctgttgtttattgcaacttcctcatagtttttgtgatttagaaaatcacattgctccaaatgaagcctctctttcatttggtatttttaaacagcaaaaatctctccagtttagttattta

SEQ ID NO: 734351 - DNA, 531 bp, Homo sapiens
gaactgaatgcaaattcacaaaatataatgacttctaaattctgacactctgagatgttgaaaacaaaataattttaaagactttcaaatatacattaaagaacaaaaaaattgttgcttaacaaaaaagatgtcattttttacccattcatagtctacctgataaagaaaaagagcgaaaaatagccattattagtggcacacagagtttctattgttttcaataaacaaagatatagtaagaccctatcactatgggaaagaaaaaaaaaaacagaaaaaaaattagccagacatggtggtgcatgcctgtgatcccagctatttgggaggcrgaggtaggaggatctcttgagcctgggtagttgaggctgcagtgagctgtgatcataacactgcactccagcctgggtgacagaaaaagatcctgtttctaaaaagtaaaaataaaaaaaaaaacaacaaagggtgaaacaagttgggagactatgcatataattccacagaccacatatcccattaactcctttc

SEQ ID NO: 734352 - DNA, 556 bp, Homo sapiens
gtcttatatccatgaaaaacccatgcatatatgcccggaggaaaggagatccaatgaggtgggtgagccctgggaaaggtcaaacagaagacagcaggtccttatgcaatcttcattaacattcaacagtttttcttgggcaacaatttgattatagtaagatttcacttcagactaaaaatttaaggattagaattactaatcttctttgatatctatagagaacatttaatctacttcagcaatatcatccttattttaaatgtaataatactacacacaaaaatgatgagaaagtccttatgaactaagacaaagagggttcccttatrccctctgagtggtcctcagattttttatttccacaaacaagttcaatttagaaaataatactggggatcaacagtaagttgccaaattgaaatgaggagaagggagagaggagaaacattgtcatcgaccatttgcaaagacaaaggacactcacaaaaacaacgtagaaagaaccgtcttccaagaaagaacagctgacaaattcctaccaccatatataaac

SEQ ID NO: 734353 - DNA, 608 bp, Homo sapiens
tcgggcaaaatggaacttccagtgacgacttaacctgtttatttcagtagcaatcaagcatactggaaaaaaacccagaaatcataatggaaattattaaatctagcttaaactttctgaagaaggaaaggcagaaggaagagarttataacaaagaaaaacagcccctgttaacaccctcttcaaataaaaagaaaagtaaatgttagatatggccataataatttagtgacattattttgccggattagaaagagtgattctcttcacctcaacacagctatggtactcataaacatgaaaaaaactcgagcatatatagtcttccacagaaacttcatattagtgcaatctacaatttttaaaaatagaagtaaaggtttttatatactaagtggtttgactccaaccataaaagacaaaccttcaagaaatgcaaggcatttttaaaaaattccatatagaacactttttaaaagaactgctatggttttaagcaattttaggacagtagcttgaagtcaacaactaaatgctaccacatacaaagcactgtgctaaattaaagacactgaccacaatctccctgaagaagtttaaaatccagc

SEQ ID NO: 734354 - DNA, 608 bp, Homo sapiens
tcgggcaaaatggaacttccagtgacgacttaacctgtttatttcagtagcaatcaagcatactggaaaaaaacccagaaatcataatggaaattattaaatctagcttaaactttctgaagaaggaaaggcagaaggaagagaattataacaaagaaaaacagcccctrttaacaccctcttcaaataaaaagaaaagtaaatgttagatatggccataataatttagtgacattattttgccggattagaaagagtgattctcttcacctcaacacagctatggtactcataaacatgaaaaaaactcgagcatatatagtcttccacagaaacttcatattagtgcaatctacaatttttaaaaatagaagtaaaggtttttatatactaagtggtttgactccaaccataaaagacaaaccttcaagaaatgcaaggcatttttaaaaaattccatatagaacactttttaaaagaactgctatggttttaagcaattttaggacagtagcttgaagtcaacaactaaatgctaccacatacaaagcactgtgctaaattaaagacactgaccacaatctccctgaagaagtttaaaatccagc

SEQ ID NO: 734355 - DNA, 608 bp, Homo sapiens
tcgggcaaaatggaacttccagtgacgacttaacctgtttatttcagtagcaatcaagcatactggaaaaaaacccagaaatcataatggaaattattaaatctagcttaaactttctgaagaaggaaaggcagaaggaagagaattataacaaagaaaaacagcccctgttaacaccctcttcaaataaaaagaaaagtaaatgttagatatggccataataatttagtgacattattttgccggattagaaagagtgattctcttcacctcaacacagctatggtactcataaacatgaaaawaactcgagcatatatagtcttccacagaaacttcatattagtgcaatctacaatttttaaaaatagaagtaaaggtttttatatactaagtggtttgactccaaccataaaagacaaaccttcaagaaatgcaaggcatttttaaaaaattccatatagaacactttttaaaagaactgctatggttttaagcaattttaggacagtagcttgaagtcaacaactaaatgctaccacatacaaagcactgtgctaaattaaagacactgaccacaatctccctgaagaagtttaaaatccagc

SEQ ID NO: 734356 - DNA, 562 bp, Homo sapiens
aatgggctcactgtgtttcaataaaactttatttacaaaaacagacagctggtgtgtagtttcccaaaccccagtctagagtacaccctgcaagatcatctgattctcattctacaggacctattttacaactttgcaaaytgtaagtaactggaagcaatgcaaaataattgtctatagacatgcaaatgaattatgtctggtggacagtttatacctttggaaaaggccccaaatagtccaaaatagaccattttgtgtctacttgcacattcccaattcaatataactttattccatgtaaatttgtccttttttacacttttccttttaaaagttaaattaaaattttaccttttgatttaaccatgggcctggttccctcatttaatttacaggttaaattaaaatgtgaaatttttaaattttaaaatattatttaaaaaaataatagcaacagtgtcttggttatgttgcccaggctagtctgaaactcctgggctcaagtgatccttcggccttagcctcctaaagtgctgggattacaggtgtgagccaccgc

SEQ ID NO: 734357 - DNA, 623 bp, Homo sapiens
aaaattacacagtatgctaaggctgtattatagaattatattgaacatgggaggcagaagcaaattgatagatacatttatagatgaaagggggtagaaataatttgagtttaactagataaagtaaactatcttatcctcaaatgactaagtgtttagtcattttgcatattaatgtagtgatggattttaagatatgaaactataagatgttatgaaaattttaaaataaaattaaagagctttcatataaatacatcctaatatagattagctttttttttttttttttttttsagacagagtctcactctgtcgcccaggctggagtgcagtggcacaatctcggctcactgcaagctccgtctcctgggttcacgccattctcctgcctcagcctcctaagtagctgggactacaggtgcccgccaccacacctggctaattttttgtatttttagtagagatggggtttcaccgtgttagccagaatggtcttgatctcctgaccttgtgatctgcccgcctcggcctcccaagggagggattacaggtgtgagccactgcgcctggcctagattagcttttaaaaaattatttattttcatctaaagttatatgtg

SEQ ID NO: 734358 - DNA, 623 bp, Homo sapiens
aaaattacacagtatgctaaggctgtattatagaattatattgaacatgggaggcagaagcaaattgatagatacatttatagatgaaagggggtagaaataatttgagtttaactagataaagtaaactatcttatcctcaaatgactaagtgtttagtcattttgcatattaatgtagtgatggattttaagatatgaaactataagatgttatgaaaattttaaaataaaattaaagagctttcatataaatacatcctaatatagattagctttttttttttttttttttttgagacagagtctcactctgtcgcccaggctggagtgcagtggcacaatctcggctcactgcaagctccgtctcctgggttcacgccattctcctgcctcagcctcctaagtagctgggactacaggtgcccrccaccacacctggctaattttttgtatttttagtagagatggggtttcaccgtgttagccagaatggtcttgatctcctgaccttgtgatctgcccgcctcggcctcccaagggagggattacaggtgtgagccactgcgcctggcctagattagcttttaaaaaattatttattttcatctaaagttatatgtg

SEQ ID NO: 734359 - DNA, 550 bp, Homo sapiens
ttaatgtagtgatggattttaagatatgaaactataagatgttatgaaaattttaaaataaaattaaagagctttcatataaatacatcctaatatagattagctttttttttttttttttttttgagacagagtctcactctgtcgcccaggctggagtgcagtggcacaatctcggctcactgcaagctccgtctcctgggttcacgccattctcctgcctcagcctcctaagtagctgggactacaggtgcccgccaccacacctggctaattttttgtatttttagtagagatggggtttcaccgtgttagccaraatggtcttgatctcctgaccttgtgatctgcccgcctcggcctcccaagggagggattacaggtgtgagccactgcgcctggcctagattagcttttaaaaaattatttattttcatctaaagttatatgtgctttcaaaataatcttgagtaacttcaaagtattttaattgaataaatgcctattcaagcatacttggtggaattaaaacagtaaaaacattcacgcc

SEQ ID NO: 734360 - DNA, 635 bp, Homo sapiens
atataagtctatcgatttagatattctttaatgtctttggatccaattttattactttatttatttatttattttgagatggagtctcgctctgttgcccaggctggagtgcggtggcatgatctcagctcacagcaacctccacctcccaggttcaagtgattctcctgcctcagcctcccaagtagctgggattacaggtgcatgccaccacacccagctaagttttgtatttttagtagagacggggttttgccacgttcaccaggctggtctcaaactcctgaactcaagtgatccgccctcctcagccttccaaagtactgggattataggtttgagccactgtgcccagcttttattattctctttatagagggcttacatatcttttgatatgtgtattcctaagtaccatctatttttagttgtttttgtaaatagtagtaccttttacaagttttttttaattttytgtttgttgctggaatcaagaaatgcagttagcttttgtgcattaatcatatattgtaccatcttgacaaattcccgtaattcctataatttgcataaccctttgtattgttcatatagatggtaattttctctgtgaatgacagctttttcccttcttt

SEQ ID NO: 734361 - DNA, 645 bp, Homo sapiens
tggcttacttaggtagtcaatattccaagagggaagtgggacctaatagcctgcagtttccatgagacttggaaaagactcaggtgactggacctggcgggaaattttcagaactaactattcaagacactgagaaaaagtagagctctgatctctcaaaggttagaaaagacttaccatgttagcagtgataaagacttgcaatatgcagtaggtgggtagaaaagaatattctatgagggctttgtgtcaagttttggagttgggatagaaaggaaaaatgtcataactaaaaatatcagtctgattaaaattgtaacatgtgatatgttataaccatatttacaaatggtctagaccagtagtttggatgctaaaaaaattatctttccctgtgtcctttcatttttctttttctttttattttcctctcttttmatttttttctccctcattctcttcttcctttctcttcatcattggatgaaggaaagcccttcccctaactcatctgaacaatttttaaagcaaaagaagagttagaaccatactatctggggtgatgtgtcttgagacagctatagcaatagcatctacagcctttcaaatcaaagagttataattataagagggagattgtgctca

SEQ ID NO: 734362 - DNA, 490 bp, Homo sapiens
gtttttgtataaggtgtgaggaagggatccagtttcagctttctacatatggctagccagttctcccagcaccatttattaaatagggattcctttccccatttctcgtttttgtcaggtttgtcaaagatcagatagttgtagatatgcggcattatttctgagggctctgttcttttccattggtctatatctctgttttggtaccagtatcatggtgttttggttactgcagccttgtagtatagtttgaagtcaggtagcgtgatgcctccagctttgttcttttggcttaggattgrcttggcaatgcaggctcttttttggttccgtatgaactttaaagtagtttttttccaattctgtgaagaaagtcattggtagcttgatggggatggcattgaatctataaattaccttgggcagtatgactattttcatgatattgattctttctacacatgagcatggaatgttcttccatttgttt

SEQ ID NO: 734363 - DNA, 628 bp, Homo sapiens
gagatgaagtgaggcttacaccaatgcttttttcctttcttggtaatatgttactgtagaaacattcaagaaattcctggccttaaacaacataccaaatgagacagaaataagtgttctccctggcactcctcaacttttaaaatagattaatggccatctaaatgtgctcattttattgccacataaaacatcaagcagtttgcatcagcacaagcttaatggtaagaaatagcgaggctgaggttgtgaagatgtaagaaaacaaattataattgtaagttcatcgtggaaacagcccgggggaaactatatcctcatggttgcaaggcagggctcacaccatgtttcatgaaggacaactaggacactggtgcagaaagccattttttatctttaaaggcaagttcttggagtgattaccaacmatgggactttagaggtaacagaaagaggcctctattctccaaattatctccatctagctcgtattttagagctggagtagattttaaatctcacctcatattttattatctttaaaaatactaaaaaaaactgtttaaattttgcaaaaagagcaaaacatccattattccacattatttttatttttcacattgttttt

SEQ ID NO: 734364 - DNA, 632 bp, Homo sapiens
actcttagcaagttgtatatttctaagaatttattcagtttttctaggttacccaatttgttggcatataattgtttctattaatccctcaattttcttttttatttttgaggcatctctttaacatctccctttaatttctgtttttattttagtgttctctcttattttcttagttggtctactaaggggttgttgattttgcatattttttttcaaaaaaccaatcagttttattgaattcttctacmgtttatttgatttatttctgctgagatctttattatttcccttccgtctgctagctatatttgtcttctttttctagttctttgagttataaagttcagtaagatcttaattctttttttaaagtagaaatgttttaatttattaatataaacttccgccttagtattacttttgttgcatctgtaagttctgataagttgtgtttttgtttttgttttatcttcgggttttgtaaaatacccttttgattttctctttaactcagtttgtgcaagtgtgttagttttcatgtctttgtgaatttttctcattttcttgtaattaatttctaatttcatgtcattgtagctggaaaagacacttggtataattgtttaaaa

SEQ ID NO: 734365 - DNA, 623 bp, Homo sapiens
ttattggatggatatatatatatatatatatatttatatgtgtgtgtctgtgtgtatatatatatagtttctaaatagaaatacgtcagcgtttcttttgattataaaaataatagacagtcatgctcattgtttttaaaaacagacaatataaaacaaatgaagaagaaaactaactcatcaaaattttatgacccggrgaaactcacatcttccacaatcacatttcataaaaaacactgccaacttattgtgttttaatttatttcagaatagtttgttgccgagttgttgttctgctgccttaaataaactgtgaaattaaaaaaagaaaaatgatataaaactgacaaatgattagattttaatttctgtatatatcctcctgatagttttctgtatacatgcgtatacatacacacccacccactcacacacacaagggattgaactatttcataaacctttttcatttaacaacaacatgggaagtaacatggaaattttgtcagtaaatatgaatgtgcacagttattcataaatacagagcatttcattatgttgacatacaatttgtttaacatgtcttctattgagcatttaaaatattaatagttctcatt

SEQ ID NO: 734366 - DNA, 623 bp, Homo sapiens
ttattggatggatatatatatatatatatatatttatatgtgtgtgtctgtgtgtatatatatatagtttctaaatagaaatacgtcagcgtttcttttgattataaaaataatagacagtcatgctcattgtttttaaaaacagacaatataaaacaaatgaagaagaaaactaactcatcaaaattttatgacccggggaaactcacatcttccacaatcacatttcataaaawacactgccaacttattgtgttttaatttatttcagaatagtttgttgccgagttgttgttctgctgccttaaataaactgtgaaattaaaaaaagaaaaatgatataaaactgacaaatgattagattttaatttctgtatatatcctcctgatagttttctgtatacatgcgtatacatacacacccacccactcacacacacaagggattgaactatttcataaacctttttcatttaacaacaacatgggaagtaacatggaaattttgtcagtaaatatgaatgtgcacagttattcataaatacagagcatttcattatgttgacatacaatttgtttaacatgtcttctattgagcatttaaaatattaatagttctcatt

SEQ ID NO: 734367 - DNA, 623 bp, Homo sapiens
ttattggatggatatatatatatatatatatatttatatgtgtgtgtctgtgtgtatatatatatagtttctaaatagaaatacgtcagcgtttcttttgattataaaaataatagacagtcatgctcattgtttttaaaaacagacaatataaaacaaatgaagaagaaaactaactcatcaaaattttatgacccggggaaactcacatcttccacaatcacatttcataaaaarcactgccaacttattgtgttttaatttatttcagaatagtttgttgccgagttgttgttctgctgccttaaataaactgtgaaattaaaaaaagaaaaatgatataaaactgacaaatgattagattttaatttctgtatatatcctcctgatagttttctgtatacatgcgtatacatacacacccacccactcacacacacaagggattgaactatttcataaacctttttcatttaacaacaacatgggaagtaacatggaaattttgtcagtaaatatgaatgtgcacagttattcataaatacagagcatttcattatgttgacatacaatttgtttaacatgtcttctattgagcatttaaaatattaatagttctcatt

SEQ ID NO: 734368 - DNA, 623 bp, Homo sapiens
ttattggatggatatatatatatatatatatatttatatgtgtgtgtctgtgtgtatatatatatagtttctaaatagaaatacgtcagcgtttcttttgattataaaaataatagacagtcatgctcattgtttttaaaaacagacaatataaaacaaatgaagaagaaaactaactcatcaaaattttatgacccggggaaactcacatcttccacaatcacatttcataaaaaacactgccaacttattgtgttttaatttatttcrgaatagtttgttgccgagttgttgttctgctgccttaaataaactgtgaaattaaaaaaagaaaaatgatataaaactgacaaatgattagattttaatttctgtatatatcctcctgatagttttctgtatacatgcgtatacatacacacccacccactcacacacacaagggattgaactatttcataaacctttttcatttaacaacaacatgggaagtaacatggaaattttgtcagtaaatatgaatgtgcacagttattcataaatacagagcatttcattatgttgacatacaatttgtttaacatgtcttctattgagcatttaaaatattaatagttctcatt

SEQ ID NO: 734369 - DNA, 634 bp, Homo sapiens
cctctcaatttttgaatcaagatttttgaacaaggttgtctgtgtatagtattcctaactgacatttgcttccttttattattttaaatatatcactgtactccgttcacgccttcaaggtttcttctgaaaaattctctggtactcctgtctaggattcccttacatataacaagttgctttttcttgctgctttcaaaattctgttcttatttttgataatttgattataatgtatatcagcgtgggtctctttggatttattttatttggtattccagagacttctgagatctgtatgtctgttttttccctagaaatggaaaaatttcagctagcatttctttgaattagcttttaggtaatttctctttttatgctccttacagtaaccccatacttgcatatattagtttgtttggcagtgtttcataagttycttaaactaccttcactgtttttactgattttttttttgttcctctgattggtttccagtgacatatcttcagtttcactcagcctttgttttacttgacctagtctgctgttgaacccacctgttgaacttttctgttcagttattttcttcttctattgttaaaattaaaacatctggaaccagtctgagaac

SEQ ID NO: 734370 - DNA, 582 bp, Homo sapiens
ccttacagttgactggcgctcagatgtctgataaaatgcaatagaaatagtacaaatttataagcaagaacacatatattagaaacaaagggtgtatttttttttttttttttttttgagacagagccctgccctgtcacccaagctggagtgctgtggcragattttggctcgctgcaacctccaccttccaggttcaagcgattctcctgcctcagcctcccgagtagctggggttacaggtgcccgccacggcgcccagctaatttttgtgtttttagtagaggcggggtttctttctttctttttttttttttttttcttgagacggactcgcgctctgtcgcccaggctggagtgtaggggcgcgcgatctcggctcactgcaagctcaaggcgggatttcaccatgttggctaggctggtcttgaacttttgacctcaggtgatccacctgcctcagcctccctaagtgctgggattacagatgtgagccaccgcgcccggtctaaagtgttttttgtttttttttttgtttttttaagggagccaggtttgttttctggaacacatattctgtat

SEQ ID NO: 734371 - DNA, 582 bp, Homo sapiens
ccttacagttgactggcgctcagatgtctgataaaatgcaatagaaatagtacaaatttataagcaagaacacatatattagaaacaaagggtgtatttttttttttttttttttttgagacagagccctgccctgtcacccaagctggagtgctgtggcgagattttggctcgctgcaacctccaccttccaggttcaagcgattctcctgcctcagcctcccgagtagctggggttacaggtgcccgccacggcgcccagctaatttttgtgtttttagtagaggcggggtttctttctttctttttttttttttttttcttgaracggactcgcgctctgtcgcccaggctggagtgtaggggcgcgcgatctcggctcactgcaagctcaaggcgggatttcaccatgttggctaggctggtcttgaacttttgacctcaggtgatccacctgcctcagcctccctaagtgctgggattacagatgtgagccaccgcgcccggtctaaagtgttttttgtttttttttttgtttttttaagggagccaggtttgttttctggaacacatattctgtat

SEQ ID NO: 734372 - DNA, 631 bp, Homo sapiens
tcctaaggggttaggagctgaggcctagaatggtcaaagagttggaggtgtttgcaaaagtgatttcattgatgacccgtgatgtctgggttgaaaaggggagagtgaagagaggaggggactgcaggatggagagaaagcagcaggkcttggactgaagagcttgctaagctgaaaggactgttgctgcgggggttacttgagagcacggaaggagaggagagcgtgtttgaatgagtgaggaaggctgtgaagtttctggtccatgttgtgatcacgggagtgggtggtggtaacagagcagaaggaagtgtagctgggaatgtgaagtgagaaagctaaaaggccagaatggcttgacagaaccagagagcaagttccaattcacgggaggctcaagcgcctgggttttgtacagggctgacccctgctggtaaattctggtagaagcccaggaagccacgctgctcgcttaggagaacctgagaagtgtggtaacagcggtcacaggcagcaaaggaagagggctgtttttccttagacataacattttcatttttgaaatgtctctgccagttttaggcttagaatgtcctcacaactaaagcattctttgtaaataatccccaac

SEQ ID NO: 734373 - DNA, 631 bp, Homo sapiens
tcctaaggggttaggagctgaggcctagaatggtcaaagagttggaggtgtttgcaaaagtgatttcattgatgacccgtgatgtctgggttgaaaaggggagagtgaagagaggaggggactgcaggatggagagaaagcagcagggcttggactgaagagcttgstaagctgaaaggactgttgctgcgggggttacttgagagcacggaaggagaggagagcgtgtttgaatgagtgaggaaggctgtgaagtttctggtccatgttgtgatcacgggagtgggtggtggtaacagagcagaaggaagtgtagctgggaatgtgaagtgagaaagctaaaaggccagaatggcttgacagaaccagagagcaagttccaattcacgggaggctcaagcgcctgggttttgtacagggctgacccctgctggtaaattctggtagaagcccaggaagccacgctgctcgcttaggagaacctgagaagtgtggtaacagcggtcacaggcagcaaaggaagagggctgtttttccttagacataacattttcatttttgaaatgtctctgccagttttaggcttagaatgtcctcacaactaaagcattctttgtaaataatccccaac

SEQ ID NO: 734374 - DNA, 626 bp, Homo sapiens
gagttacaaatttccaaaaggaaattgataaaataattcaaaataccaaagaaaatagtgcttgcaggtaactttacctaaaagacaatgagaagctttgaaaaattattagttaatcctgtaagatgtttgaacagtgagaatattaaaaatattgataatggtatttttctacttgatcattttctctctctccttttactcttaccaaatcacatttttatgtctttgtatgtcttatgctatattgatttcaaaatccttttcatttcaaacaggattccatgaacaaaggacatagaaayaaatgaaaataattattttattgtatataatgtctaaattcaaattactacaaattgacataatataaaaaataattctatttgctaagaaaaaacaaaatagggcttcatcatttgactctactctcagaaaaacctataatgtattaaaaagtctaacttttatctcttattttatctttgaattggtttcttaatgggaataacaaccccagacagccaaatgaagttaaggaaactgtttttaaaaatctatttgtctgtgctgtctgagaattatatatatatatatgtcttctttgattagatctaaattctcta

SEQ ID NO: 734375 - DNA, 600 bp, Homo sapiens
agagaaggtagcataagggagcagggcaaggagggtgagaaagcttcagaggggatgctctggggaaattactttatttttcttatttttatatcttatctctaaactacactgtaaattcaatgaaagtagggacaaaataccatctggatgaggaatgaaaatgaggccaggccagtggctcactcctgtaatcccagcacttttgggaggctgaggattgtttgagctcaggaatttgagaccagcctgggttacatagtgagacmctgcctctactaaaaattaaaaaaacaaaaaattagccgggtatggtggcatgtgcctgtagttccagctactcaggaggctgaggtgggaggatcacttgagcccaggagtttgaggctgcagtgagctatgattatgccaccgtacaccagctgggagtgaagagcgagactctgtctcaaaactcctgtttatatttagattacctaaacatgactgttgcaagggagatggaattaccctgattgaattaaaccagagacatctcttggagccagagatggggatccatccatatgccccccaagtcttgtggctgctacattataa

SEQ ID NO: 734376 - DNA, 623 bp, Homo sapiens
tgagtccatggacatatgttttcatttcttttaggtatatacctaggcgtgaaattgctgggttatatggcaatttatgcttaattttttaaaaaactgtcaaactgctttccaaagtgcctgtaccattttacattctcaccaggaatgtaggagtgtttgtttctccacattcttgccaaacttgttttcyatttttttttgttttattttgttttgtttgtttttgagacggagtctcgctgtcacccaggctggagtgcagtggcacgatctccgctcactgcaatctctgcctcccaggtttaagcgattctcctgcctgagcctcccaagtagcagggattacaggcacctgccaccacgcccggctaatttttgtattttttagtagagacggggtttcaccatgttgggtcaggctggtctcaaactcctgacctgaagtgagccactcgccttggcttcccaaagtgttgggattacaggtgtgagccacctagccccgccaaaacttgttttctatttttctgattatagccattctagtgggtattaagtgttatcttattatgctttcaatgtgcatttctctaatgattaatgatgatgaatatcttttt

SEQ ID NO: 734377 - DNA, 528 bp, Homo sapiens
ggaatagtaaaattataaaatggtatttctaaattataatatatatacataatgcaccattttaactgtcacatttaccagcagaattatgaaatcaaaaacaaattctacattcaagggacaaacgataaatgctctttcattgttttaagagtccattccattctttgttgttttctactcccatattttaaaattatgaccaaaggagcctgaaggccaagtcaatcccatttccctgaacccaactgccagtaggtacgggccctacatacgcgtcctttaacaagccccgttctcaaaaggctgggggtatttatataagaacttattccaaagtgactctaagatccatgttcccaagatctagtacgggctattcakggttctgaggcatgtccagcatgcaggcaaacttatctgttcaaattgaggtaaaacagacaaaaaacacttaatattaacagaagctacataattaaaactaaccttctgctgcttatttaagctaatgatgtattcttacca

SEQ ID NO: 734378 - DNA, 559 bp, Homo sapiens
aaaaacagaatgaaaaagcaaacatgaagaacattagaattagtaaaatggtaaatccagataaaggatacagataagttttctgcatttttcttgcaacctttccgtaagtctgaaattatttcaagtaagtttataaacttagtcattctatttaattccatctatttctgataaataactttaaaactatttttatgatttttctgataaataactttgaaatcaccayttctaatgtacctggtatcaatgtcagctgcctgaattgtgttaaaaagcaattcagcaacaccaactccttcaacattgatcaagtgaggctgaaataaagcttctggtgcttcaaatctctctcccccaactttgatgatacgtccatctgggagctagaaaccaagaataatcaggtactaatcagcaaaagattaaaatttcccagtgttctccggaacactagtacttataaatacatctgttctgtaaccaaaatcattaccaacaacaatttttcctaaaatatatttggggaaaaaaaggtaaattaaatagatttagg

SEQ ID NO: 734379 - DNA, 561 bp, Homo sapiens
tttgtaaagatggggtttcaccacattacccaggctggtcttgaactcctggactcaagtgatctgcctaccttgccctctcaaagtgctgggattgcaggcgtgagccaccatgcccagctgacctcttcattctttatggagtctatgcccctgggtgtattagggtgctcatttcaaacaatcaaaaggaattatttgattccttttgtaattaccccagtcttaagaagactaagaaaaaaatagtttgttccacaagtgtgaagaagaaattctgaaattagaaggacaatttgcatgcatgccttttgtatctgcctctttacattttggtaaatttcagcaatcagctgggtgcagtggctcatgcctgtaatcccagcacttcgggaggctgaggcgggtagatcacctgakgttaggagttcaaaggcagcccagctaccatggtgaaaccctgtttctactaaaaatacaaaaattagccaggcgtgttgatgtgcaccggtaatcccagctactggggaggccgaggcaggagaatcgcttgaacctggg

SEQ ID NO: 734380 - DNA, 593 bp, Homo sapiens
atcttatgtaggatatgtacaattcattcttttcctggttttattgactttttaaagtcagcctgatacaaaaaatataatttatttaaattttccatgtgcgtgtactatttttcgaattacgcagagttcattgctttgagtttttcatttggattgaataaatattatgtagtgataaactattatgtgccatagcaagaggactctacagctataaaatgaagtgaagatatgtgtacatgtataaataattgaagcaaagaaattattacacttttttatgttcactctgtatcttggggaatactgagaatactctgagggaatactctgtagagtatatgtagctatattccartgtagaaaggtaaatatttctcaatattccccaagatataaagacttgaaaatatatatatatgtcagacttgaaaatatacatatatgtgtacttaattatacacattatgcatatatcagccatgttccccctttcccattaggcccttgaaccaagggcacaatcttggtttacttacaggatttgtggctactaaggcctggttgttggccactgcagtgaggtgaat

SEQ ID NO: 734381 - DNA, 496 bp, Homo sapiens
ttattttgtctggtgggtgacagaagaaggaattgcatgaaataaaaatcaacttcaattactcatgaaagctttaatagttggaaaccttgctaaacaaattttctcttttaaatggtaccctttttacttcttgaattcagatctccctaraaatactgaaagaaatgtactgaaagcacatggagaaaaaagacagttgaggtaatcttaaaaaaattaatataaactctatcaaaagttgtaataacttaacattatgtaatatctctatataactataaataagactactgtaaatactactaaattgattcttgttcatgagtgtatgtactaaccatgctgataacattatctgctacacctaaagagtttttaggtgaaacagcctcacacattgctatagttgtttagtcaagcagatcccgtatccaacagcagcaatatataaggtagcaaatgacccatggtatgatttagtgttacaaggatg

SEQ ID NO: 734382 - DNA, 562 bp, Homo sapiens
taaaaccataaaaaccctagaagaaaagcgaggcaatatcattcaggacataggcatgggcaaagacttcatgactaaaacactaagagcaatggcaacaaaagccaaaattgacaaacgggatctaattaaactaaagagcttctgcacagcaaaacaatcaccagagtgaacaggctacctacagaatgggagaaattttttgcaatctacccatstgacaaagggctaatatccagaatctacaaagaacttaaacaaatttacaagaaataaacaatcaacgccatcaaaaagtgggcaaatgatatgaacaggcacttctcaaaagaagacatttatgcagccaacaaacatatgaaaaaaagctaatcatgactggtcattagagaaatgcaaatcaaaaccacaatgagataccatctcacaccagttagaatggtgatcattaaaatgtcaggaaacaacagatgctggagaggatgtggagaaataagaacacttttacaatgttggtgggagtgtaaattagttcaaccattgtggaagacagtatggtgac

SEQ ID NO: 734383 - DNA, 562 bp, Homo sapiens
taaaaccataaaaaccctagaagaaaagcgaggcaatatcattcaggacataggcatgggcaaagacttcatgactaaaacactaagagcaatggcaacaaaagccaaaattgacaaacgggatctaattaaactaaagagcttctgcacagcaaaacaatcaccagagtgaacaggctacctacagaatgggagaaattttttgcaatctacccatgtgacaaagggctaatatccagaatctacaaagaacttaaacaaatttacaagaaataaacaatcaacgccatcaaaaagtgggcaaatgatatgaacaggcacttctcaaaagaagacatttatgcagccaacaaacatatgaaaaaaagctaatcatgactggtcattagagaaatgcaaatcaaaaccrcaatgagataccatctcacaccagttagaatggtgatcattaaaatgtcaggaaacaacagatgctggagaggatgtggagaaataagaacacttttacaatgttggtgggagtgtaaattagttcaaccattgtggaagacagtatggtgac

SEQ ID NO: 734384 - DNA, 583 bp, Homo sapiens
ggtagagatggggtttcatggtgttggccagcctggtcttcaactcctgtcctaaagtgctctgcaagcctcggcctccccaagtgttagaattagagacctgagccgtcacacatggacagtaagatacacaagactcgggagatttatcttttcacttcatcctcacaatgctacaggtgaatgaaaacactccataacatgaataactcacttgaaaatcaaagttggtaacttctccctttaaaattatttgtacccttaccctgtaaaaattgatgattstgtcaaaatttttcaagaaaatacttcctccttgcagattagtctgtcaattgtaagaattatggactgcaaaacttctggaacttgatgtatttcatttctttagtttgtataatcaggaaaattaattcatttagttatttcggtctaaatatttgtatcattcagtgatgtcttaaaactttaagcaatcccgtcggaaactttatgctgttgtttatgttttatacacttcactttcccctaagtatgaggtttaaagcgtttccattcatattatcaattaaatacgataggc

SEQ ID NO: 734385 - DNA, 614 bp, Homo sapiens
attgttgactgtactctgttgtgctatcaaatactagatcttattcatactatctaactatagttttgtactcataaacatccctgcctaccccccacccccattaccttccccagtttctggtaaccatcattctactctctgtctcaataagtttaattgttttgaattttagctccyacaaataagtgagaacatgcaacgtttatctttctgtgcctggcttatttcacttaacataatgacctccagttccatccacgttgttgcaaatgatagggtctcatttgttaagactgaatagtactccattgtgtacatgtgccatattttcttcattcatctgttaatggagacttaggttgcttcttaatcttggctatcgtgaacagtgttacaataataaacataggaatggttattctgcttaaactgttctcaatagtggttgtattaatttacattcctaccaacagtatacaaaggttcctttttcttcaccttgtcatcagcattcattatcgactgtcttttggataaaaggcgttttaactggggtgagatgatatctcattgtagttttgatttgcatttctctgatgctcgatgatgct

SEQ ID NO: 734386 - DNA, 610 bp, Homo sapiens
aagctccttgaaggcagaaacagtgtcatgatttcttgttagtacacagctcctactacaatgttagacatgtgtagatactaaatgaaggaatgaattacttaatgtaaaatatttcaggtagagaagactatttataaatgctattgactaacgttttttattttttggttgtgtagctataaattttcagccaccatcaacagaatattcactaattagtacaagatttactcctactcccrctactatcaaaaagttactgagcacaactaacaacatctcccgctcatcactgaaattaattacagcccaaatggataattcagtaaagcctatttcccatcagatatcagatattgaacatgtggatcgtagtctcagtacaaatctcagtctgggtgagttggaagtttctgtgaagaacagtagctctttaagcaggaacccaaacaacacccatggcaaagcaaatgatgatatccagaacaccatccaaacagagacaggagggtatattctcaaattagcaggtcttcccaaggttacacacagtatgaagatgagtttgtgtcatctattacaaaagcaattgctattttgccagaaa

SEQ ID NO: 734387 - DNA, 599 bp, Homo sapiens
aaagcaaaaaacactaaagagcacagaatggaatgctcttgactacaatgtaaaggaattcaataattaatatcattacatagaagtttaaagcttaagtaaacacacaatctctagatttaagactcaacaggacaagagaccattggttcaatcaaaacaagtcctcaaacacactggggaaatgagtaattagctattcatgttacataaatcactctggtgacaggaaagaaatgtccttaggagaaaaagcaagcatggagccaagaatgccagttacttcttctgttatctgacttcaatgttctcatattattttctattttcaactacttaacctttccgtaaatgtaaaggtcttatttaaatacactttcgcaagaatatattttcataaaatatattcttcaagaaggaaagagtctttccttcttgtgcrtctgtctagatgtctatccagtttgtctacgctctaaaagtatttccatgaattggatgtacttcaattaatagcatttaataaatattgacttattactttcatttacatgagggttccttataagttttaaagctcttcaaaaccttttaaaatc

SEQ ID NO: 734388 - DNA, 691 bp, Homo sapiens
ccagagtgctgggcttctcccagcaggatccagctggggctttctcctcagttcaacccttgcctctgaggaccagtggtctacagtccagcccacaacccttcagacagaagttccaggcacaaaaaggaagctcacaataaggaacgcccatgcctagccataactgagcgcatcacagactcacacaaatctgtggaatgagtgcatgatctcatgagctctggtctggaaaagtaagtctccctacactaggacttaaagggaaggcttctttggctatgccaatatctttcctgccactttcttcttcaggccaaacagctcctatccctgccttccatcttagctttccagcatactcttcccaggttctttgggctactgacaagcactccagacccaaatacacatgctcccacctgaggctgggaaatgtaccaagaactgcatagaaaatrtactggacaaaaggcactccagtctcacagatctccagtcccacagtctatatcaccagttttagctgtttgaagttttagaattccttttcaaaaccatagctagcatttctttggctagagaaaactgtgtgaaatgcagcctaccataggatcactgattacaacatgcattcaacattcaatacatattgactgagcaactattaggttgaactatgtgacattat

SEQ ID NO: 734389 - DNA, 584 bp, Homo sapiens
gcagactgcattctgaagcatcagacaatgggtcacatgcggaaacagaattaaatacacaaaaatagcaccaacttaaggcaagcctgggcaaactgcactacatcaaagaaagaacacacaactggtatcagatttttttttctgttttaataaagagaaggcctggacacctgaaagttgacgggaagcaggcatcactaatttctccgagttcacagttttgttagaatgtctttgctctgattatggttttatttatttatttttttgagatggagttttttttgttttgttttatttgcttttgttgccctggctggagtgcagtggtgcaatctcggctcaccgcaaactccgcctcccaggttcaagagattctcctgcctcagcctcccaagtagctaggattacaggcacccactaccrcgtctggcttctttgtgtttttagtagagatggggtttcaccatgttggtcaggctggtcttgaactcttgacctcaagcgatccacccgcctcagccccccaaagtgctggaattacaggcatgagccaccacgcctggcctgattatgttttg

SEQ ID NO: 734390 - DNA, 583 bp, Homo sapiens
ttttacatcccagctagaaaaccctaaattaaaggtgaaaaaccagacaccaagtggcatttaaataaatgtcaactttaactccacaaagcatctggttgcatgtggacagaaagagaaggaaagagggccctatatctggataacttggaaatgtgctccccctagcaagatatctaccaaaattaaaaccatatttgaggatgctggcactgtgagcaatatataaatgatgcatgtaacatcatttaatatgatcttatttttaaaaaygagtagagtggtgttttctagctgttagtgtttccaaatatcaatgtagaaattagccttctgcagctgcagaggcaattcagtttgcagcttgcttgcatgtggcctagagccacccagcctgatatgtactaattttttatgtttaacttgccagagtagaaactcagtttctgggcgaggcatagtggctcatgcctgtaatcccagaactttgggaggccaaggcaagcagatcacaaggtcgggagttcaagaccagcctggctgacatagtgaaaccctatctttgctaaaaatacaaaaatta

SEQ ID NO: 734391 - DNA, 590 bp, Homo sapiens
cagcgcctgcgcctacagaacgagcatcgaggtgcgcgggggcagcgggaggaggtgccgcctcctcggggtcggcgcctcccggcagctcttggtatctgtgcagctcggctccttccttgggagtgttcggaagaggtccctaagattaacaaaatcaagggcgcagagactgagacagcgcctttttggtgaccaatgtgtccaacgagttttgttttcagttgcgcagcacccaccttcttagcagaaactccctgttcgggcttccctgtgccccacccccttccaggcctgatggccctaggcctccgtgcttggttggccggcaggctgactctggtggtagatctgactgcgttgccctccggtaattggagttctgttgacagstgagcagcgcccttgggtagttggaggtctgttgacagctgtgcgcgcccttcagggtcagttccctctcaggcctgcagggcctcattctagttgcacatcaaattcctaagcactgtctcctgtggcgccctcccaaaccagaagagcttcccacttgagccgcatgcttcctgggcttcggagccctttcctgc

SEQ ID NO: 734392 - DNA, 472 bp, Homo sapiens
gactttggtcattgaaattgccaaaaacaaggggacacaggagtgtgtttggccaggtgggccacctgctgctgctgcctccaaatgttcatcccagccccccacgcactcgggggattttcaaagggtctcacgtgttgggtgccagagacaccctcctgggccttggattcctcctctgtgatgaaggcsggggctgctggctcctccacaccacactcggcccccagcagacaggcaacaggggccttgtcccactgtagctgtggtcaggtggtccagggctagacggtcctatggggagctgaggcccccacctcgagatctccctgcccaagacaccagtggggttggggtgggtcaaaggcctgttcctccagggcccatagcaggggcttcttaatctgagggtgagagggtttgggaggtgacaccccaactcccaccccaattctcaccctccacttctcac

SEQ ID NO: 734393 - DNA, 472 bp, Homo sapiens
gactttggtcattgaaattgccaaaaacaaggggacacaggagtgtgtttggccaggtgggccacctgctgctgctgcctccaaatgttcatcccagccccccacgcactcgggggattttcaaagggtctcacgtgttgggtgccagagacaccctcctgggccttggattcctcctctgtgatgaaggccggggctgctggctcctccayaccacactcggcccccagcagacaggcaacaggggccttgtcccactgtagctgtggtcaggtggtccagggctagacggtcctatggggagctgaggcccccacctcgagatctccctgcccaagacaccagtggggttggggtgggtcaaaggcctgttcctccagggcccatagcaggggcttcttaatctgagggtgagagggtttgggaggtgacaccccaactcccaccccaattctcaccctccacttctcac

SEQ ID NO: 734394 - DNA, 472 bp, Homo sapiens
gactttggtcattgaaattgccaaaaacaaggggacacaggagtgtgtttggccaggtgggccacctgctgctgctgcctccaaatgttcatcccagccccccacgcactcgggggattttcaaagggtctcacgtgttgggtgccagagacaccctcctgggccttggattcctcctctgtgatgaaggccggggctgctggctcctccacaccacrctcggcccccagcagacaggcaacaggggccttgtcccactgtagctgtggtcaggtggtccagggctagacggtcctatggggagctgaggcccccacctcgagatctccctgcccaagacaccagtggggttggggtgggtcaaaggcctgttcctccagggcccatagcaggggcttcttaatctgagggtgagagggtttgggaggtgacaccccaactcccaccccaattctcaccctccacttctcac

SEQ ID NO: 734395 - DNA, 510 bp, Homo sapiens
gagtcccaccaggtggctcctcgctgagggtgccaggtgtgctgggactgggtggagggtgagaacccaccagtgctcccctggagtccattagtgcccctcgtgggttggggtctccgcagagcaggtggcctcrgggggtacaaaggcaatggtggggtgatggggccagccaggaaggggcccatccttctccccgggagcacagggacaaccagagaccggcatgtaaccaacaagtcatggggcagggtgtgcctgcggagatgtgtgtgtggtcccaaggcagtcccaagtcaaagcattcgtggaagccccttggggcccccttcaggggttcacttggccgaggagaggcctgggtgtggtgaggatgcattggtggtgtcagagctggtgctgttggggacagcagcaggagcatgtgtttgagctgccctcacctcccccgccgcccccggccccacggcaggcggtggagcaccggatccgtgaggagcagcgggcgat

SEQ ID NO: 734396 - DNA, 510 bp, Homo sapiens
gagtcccaccaggtggctcctcgctgagggtgccaggtgtgctgggactgggtggagggtgagaacccaccagtgctcccctggagtccattagtgcccctcgtgggttggggtctccgcagagcaggtggcctcggggggtacaaaggcaatggtggggtgatggggccagccaggaaggggcccatccttctccccgggagcacagggacaaccagagaccggcatgtaaccaacaagtcatggggcagggtgtgcctgcggagatgtgtgtgtggtcccaaggcagtcccaagtcaaagcattcgtggaagccccttggggcccccttcaggggttcacttggccgaggagaggcctsggtgtggtgaggatgcattggtggtgtcagagctggtgctgttggggacagcagcaggagcatgtgtttgagctgccctcacctcccccgccgcccccggccccacggcaggcggtggagcaccggatccgtgaggagcagcgggcgat

SEQ ID NO: 734397 - DNA, 650 bp, Homo sapiens
cccacaggcgctgactaggagcccacggcattctccctgctctccctatcataggagaaccgcaggcagccaactgtcccttccacgccccaatggaacctctctcctctcctgcccattgtctaccacagatcagagatggctctttctatgcaggggtggggacccagccatctctatcagctctgccggcactgcaggggtgactgactrgaggcgggaagccctcctgggcctcaaataactaggcccaagctttgactccctcatggctgctctagggactgcaagggaggacacgggcttggcctttcctaaagggctgctttctttcaaagtcaaggggatgctattttcttctttgtgtttctttggttctgacatcagaattctcctcagtgcagataacattgccctctggaatgggtgagaatcctaacacctgggttttcggttctgcccagcgtggcttaagtctccaccttaagtgaatctcacctgagacagctacagggtttgttttctggggagaggaattaatgacttgaacagcactcacgggtcttaaacttagcatacagtttcaaataacccatgcccccacttattgaccccttactgttctaagcacttcatactttaaactgact

SEQ ID NO: 734398 - DNA, 650 bp, Homo sapiens
cccacaggcgctgactaggagcccacggcattctccctgctctccctatcataggagaaccgcaggcagccaactgtcccttccacgccccaatggaacctctctcctctcctgcccattgtctaccacagatcagagatggctctttctatgcaggggtggggacccagccatctctatcagctctgccggcactgcaggggtgactgactagaggcgggaagccctcctgggcctcaaataactaggcccaagctttgactccctcatggctgctctagggactgcaagggaggacacgggcttggcctttcctaaagggctgctttctttcraagtcaaggggatgctattttcttctttgtgtttctttggttctgacatcagaattctcctcagtgcagataacattgccctctggaatgggtgagaatcctaacacctgggttttcggttctgcccagcgtggcttaagtctccaccttaagtgaatctcacctgagacagctacagggtttgttttctggggagaggaattaatgacttgaacagcactcacgggtcttaaacttagcatacagtttcaaataacccatgcccccacttattgaccccttactgttctaagcacttcatactttaaactgact

SEQ ID NO: 734399 - DNA, 436 bp, Homo sapiens
ttgtgggtcctctatgctgtaacaggaactgtactaagtacttttcctgtgtattcctgtgagttccacacaactaagcatatcctcattagaggcagtgatgcttcaagggtggttcccagacagcagcatctgcrtcacctgggaacttgttaggaatgcagattctcaggccctgcccatggtctatgaaatgaggattcaaacggggtccagcagtctgtggtttaacaagctcctgggtgatccccgtgcacgctaaagcttgggaacctctcctggagaggtagagcgcagacctggagctagactggtctcaggcctcaggtgtttggccttcgacaagttgtgcaaccatttctgtgcctcagtgttctcatctatgaagtgggggtaataacaatggggttgtgtgggattacattaagcaatgtat

SEQ ID NO: 734400 - DNA, 591 bp, Homo sapiens
agccagctctatggtatgtgttttgcttattatctgtgtatctttttacttttagctttagaagatggagagcaaaactgttttgtatactcagctccagaaaagttataatattctttgtacttctttaagaaggatgagcctggattgatctggaattaaagtgctaactgttaaagaatgtaatcagattatttaataataataacagggacactgcaggactgcatataccagcctggcaccataaaatctgaactcagcaattccaccgtaacaggaacwttttcaggttgtgggtcaatcatttagatcctgtttttttaagtggctagaataccagtgtgattttgaggaatgaaagctttatattctgatcagttctaaaaaaggtaagaatcatgtatgaggtcatgtccatttcaattcagataaatataataactgtcatttatggtgtacctattatatactagaagcaatatattgtaataaatgccatttcaatgattttctaaatagctgcagtcattatcctgattttacagatgagaaaatccaatctctgatcaaatgcctttttatgggaca

SEQ ID NO: 734401 - DNA, 602 bp, Homo sapiens
tggatccctggagttgctttattttatagttccctggtgagttttggcattgctaaagggcctggaagcctagtttgggtgaggaggggaaagttagactactctgcctgagaaaatatcaggcattttggagggaagggaaaacaaagatctcaaaggaaacagcatgagaagagagtgataatggggcctaagaaggcacagccagcamggtggggactggccaattcacttttgggacagtgagctctaacatgcgattggcagtgctctcttcttcctctgttactccaagccctcagcaaaatcctagccacttcctgggttagtggcacaggacaaaattaaggaatcagaaagatgactcctacaggtaattaatggggccaacagcaatcttcacagtggagataccctgcaggagaaaagatgggagccagaggcagccaggaggcctcaggccttagatatgagatggaggaggctgggcttccccaagaactagggctggggtctccaagccattctgtttgggtactaaaggcagagggaacagcacatgtaaaggccctgaagtggagactgccatggatgttttggaa

SEQ ID NO: 734402 - DNA, 595 bp, Homo sapiens
ttgtcagatgctggtgcacctgtctacttctatgagtttcggcaccggcctcagtgctttgaagacacgaagccagcttttgtcaaagccgaccacgctgatgaagtccgctttgtgttcggtggtgccttcctgaagggggacattgttatgttcggtaagggactggccacttcccacagttcacatgaagccccttgcttaccccaccacgatgcaagcgcctggaggacttcggggttggcatttaattacctctgtggtttataggcggacacaamctttctctggaaaatgccctcccttccatttttagaagccaggatgaaaaagtgccatgacagttgcttgatgagggcttctctttgtactgaaacctacaggtttggccacttcagggcactcaagcaatctaaatatttttttttttaatatactagaaccattttcttccttttctttgaccactggtcttaccctccctccccttcccagaaatcccatgaggccacaacctgaggctttaagaggcaaggaccatgtttttcataattccagctcaaagtggtctgcacccagaagagctttgtaaatg

SEQ ID NO: 734403 - DNA, 631 bp, Homo sapiens
ttgtgtactttttaagtctaataactttgttccccaaattgggactaaattatccatcagatgtggcttcttcccctcctatactttttttttttttttgcagatatggatggtagagttcccacagacagcaattaaggttgctattaatgttctaataaatagccataggggattaaatcatccagaggagaaaaagcttgttaatctaataatagtcttttattctatgatggcttatgagaaactgttagccaaatgccctccatcttcacggaaaataaatgaraagaattggatttaaaccacagcaaaaaaacacttcagatgggcacaaggaggcacattttatatgacagtcgatattatcaagttaatttgcaatattataaaaacaaagttcatgtaattttctctgagagaagcttatatgaatgggtttaaatctgtctaaagccagatggccccttgtgattccctaaaaggaagagagttcttttgtgatacttttgctgagtagttaaagaagacatttggtttttggtgttcacagaggccatttcattgtgcctatgagaaataaaatcagttgttggaaagttttacacaaaccactcagtgtggcagaaga

SEQ ID NO: 734404 - DNA, 632 bp, Homo sapiens
ggaatagactaagaaattggaagttggaagagttcacagaggccacttggaattccttcagcaaatttgtcctaagacaaacatacctggaggcctaggtggaatgaatcatactcaattccagcttgtccagtccataaatagctgaacaaccaccagagaactcagacccaacggatgccctagtgagagcyttatgtttcaacacgaatatcctagaggagacttcttccgcctccagtaggctctagaagtgaacccgagttaattccagcctagtctctaagcatgggagccaatcataacatcacattcccctggccttctgtgattggttcagagatggacaggcaatctcatcagagccactgaaatttctccttagattcttgggagaaagtccacctgctctgttttgccagatttgacccagggtagtacctaatacaagtggagtcattccatatttgtcctttcgtgactggcttgtttcacttagcataatgttctcaaggtcaaccatgtagaaacatgtgttagaatttccttccttttaaaggctaaatactattccattgtatgtacatacagagtcctcatgagtgggattagtgtcctgacaagagacaaag

SEQ ID NO: 734405 - DNA, 632 bp, Homo sapiens
ggaatagactaagaaattggaagttggaagagttcacagaggccacttggaattccttcagcaaatttgtcctaagacaaacatacctggaggcctaggtggaatgaatcatactcaattccagcttgtccagtccataaatagctgaacaaccaccagagaactcagacccaacggatgccctagtgagagccttatgtttcaacacgaatatcctagaggagacttcttccgcctccagtaggctctagaagtgaacccgagttaattccagcctagtctctaagcatgggagccaatcataacatcacattcccctggccttctgtgattggttcagagatggacaggcaatctcatcagagccactgaaatttctcyttagattcttgggagaaagtccacctgctctgttttgccagatttgacccagggtagtacctaatacaagtggagtcattccatatttgtcctttcgtgactggcttgtttcacttagcataatgttctcaaggtcaaccatgtagaaacatgtgttagaatttccttccttttaaaggctaaatactattccattgtatgtacatacagagtcctcatgagtgggattagtgtcctgacaagagacaaag

SEQ ID NO: 734406 - DNA, 632 bp, Homo sapiens
ggaatagactaagaaattggaagttggaagagttcacagaggccacttggaattccttcagcaaatttgtcctaagacaaacatacctggaggcctaggtggaatgaatcatactcaattccagcttgtccagtccataaatagctgaacaaccaccagagaactcagacccaacggatgccctagtgagagccttatgtttcaacacgaatatcctagaggagacttcttccgcctccagtaggctctagaagtgaacccgagttaattccagcctagtctctaagcatgggagccaatcataacatcacattcccctggccttctgtgattggttcagagatggacaggcaatctcatcagagccactgaaatttctccttagattcttgggagaaagtccacctgctctgttttgccagatttgacccagggtagtacytaatacaagtggagtcattccatatttgtcctttcgtgactggcttgtttcacttagcataatgttctcaaggtcaaccatgtagaaacatgtgttagaatttccttccttttaaaggctaaatactattccattgtatgtacatacagagtcctcatgagtgggattagtgtcctgacaagagacaaag

SEQ ID NO: 734407 - DNA, 638 bp, Homo sapiens
gcctcttaagtaattgcattgtgaaacttaaataaataaataacaataaagagaggaacgttaattgcttttaatatctacggtctaatttcagcttagcacactaagaactctgaatctcaagctctacaacaatagatcaaaaatagaaggctcatcatggttgatatatttagaggctgatgtttttgttttataattttaggagagattttgttcccaagctcattgttagtcgtctctgtgaactggcatgggggtgtttttatagaggactcttgggtggggtgactgtgaagttgttgccaaaggaaaatgacaatgcttatctgaaggtgagacaagagaaagaactgttcagctgtcaaggtcgtgaatgacaamggaagggttatccttgtagagtctgccctgaggcttttaaagagcaggataaattattttttaaggttaggtgggctctagaactatttttacacacttgaaaatagtatttcttatctttgagtgtcagcgatctcatctgcagtgaaggaaggagaaagaagaaatagctagacaaatcctaaagtcacctcagtgctgtggaacacacagatcccccatttctatatgggatttactgaattggaatttct

SEQ ID NO: 734408 - DNA, 651 bp, Homo sapiens
cctgaatagcaataatttcaagtactttgtgggcatgttttgtgccccttactcccatccccacaaagtgattaagaagttgacatggattgaagaacagaaatattattgcccaaaaagaaacagagagggtctcatgaaggctgggaggtgctgaggctgcaaaggacttgggcctgggctatttgttcatayaacgaatatttattgaacgtctgctatgttctaggcaccatactaagtatattctacctgctacctcaattgagcctctcagaacaacactcgaaggtagatatattgtaaacttatttcacagatggggaaactgaggctcaaagaaatcatcaactaacctgcccagggtaaccgagttcaagagtggtggaggcaagacgtgaatgcaggtgtgttggtgaaaacacacacttcagggcagtctggcacatctacagccgcatcaggtggagtaagagggctgtgtttataacactctcaaagacagagctggggaaggaggagtcaattgtgctgggtcaagatgtgaaggatggcatcaagggaagcccaaaaggatagagtgagacattgtagacacaacattgagccacaccctgaaggagaagaaagtttctccaggcacagaaagag

SEQ ID NO: 734409 - DNA, 651 bp, Homo sapiens
cctgaatagcaataatttcaagtactttgtgggcatgttttgtgccccttactcccatccccacaaagtgattaagaagttgacatggattgaagaacagaaatattattgcccaaaaagaaacagagagggtctcatgaaggctgggaggtgctgaggctgcaaaggacttgggcctgggctatttgttcatacaacgaatatttattgaacgtctgctatgttctaggcaccatactaagtatattctacctgctacctcaattgagcctctcagaacaacactcgaaggtagatatattgtaaacttatttcacagatggggaaactgaggcycaaagaaatcatcaactaacctgcccagggtaaccgagttcaagagtggtggaggcaagacgtgaatgcaggtgtgttggtgaaaacacacacttcagggcagtctggcacatctacagccgcatcaggtggagtaagagggctgtgtttataacactctcaaagacagagctggggaaggaggagtcaattgtgctgggtcaagatgtgaaggatggcatcaagggaagcccaaaaggatagagtgagacattgtagacacaacattgagccacaccctgaaggagaagaaagtttctccaggcacagaaagag

SEQ ID NO: 734410 - DNA, 651 bp, Homo sapiens
cctgaatagcaataatttcaagtactttgtgggcatgttttgtgccccttactcccatccccacaaagtgattaagaagttgacatggattgaagaacagaaatattattgcccaaaaagaaacagagagggtctcatgaaggctgggaggtgctgaggctgcaaaggacttgggcctgggctatttgttcatacaacgaatatttattgaacgtctgctatgttctaggcaccatactaagtatattctacctgctacctcaattgagcctctcagaacaacactcgaaggtagatatattgtaaacttatttcacagatggggaaactgaggctcaaagaaatcatcaactaacctgcccagggtaaccgagttcaagagtggtggaggcaagacgtgaatgcaggtgtgttggtgaaaacacacayttcagggcagtctggcacatctacagccgcatcaggtggagtaagagggctgtgtttataacactctcaaagacagagctggggaaggaggagtcaattgtgctgggtcaagatgtgaaggatggcatcaagggaagcccaaaaggatagagtgagacattgtagacacaacattgagccacaccctgaaggagaagaaagtttctccaggcacagaaagag

SEQ ID NO: 734411 - DNA, 533 bp, Homo sapiens
atccaggatctcaaacagcatcacaaggccatgtcttctgttcccctgctcctctctgaggagccccttgccccagacagacacgttcaacagtctcctatgcccattcctgaagttagcatcatgtccctgagggatcaagtctcccaccgacctggggcacatggctggtagggacacctgctttcttgaggacagcctagtstgctgtgagcagaacagagagtgggggtgagcaggcacaagcaacagctgccccagcgccacatcctaaccagtcctgaccatcccagccagaggccacacatttggacaaaaccaaagtaagaggctgtggctaagaacacagcagggagagatggggaagtgggccggggcagagtcttggaggacacagtgactcagggattcagagaccccacgttgggtggtggagagaaaattggatgggggaagcaatgagcaaggtgggggtggcaaggaaggaagccaactgcccgcttatccttcccatcccagccagaatcttcaag

SEQ ID NO: 734412 - DNA, 572 bp, Homo sapiens
taaatgagttaacatattctgactttagtgcctggacatatagtcagcacccagcaccaacaagtggtagccatgctctctatagctgtatgtcctgtcgctcaactaatgggtgaccgtgctggtttgggaacccagtactccacccagtgctctgggacccctggcttatwtcctgtctggactatggcactgggttggggggctgattgctacagcctgctttggtcagtactgtgccatcctaatgtggctaattgccttgggggtgtgcatttctttcagcaatacctgaacaccttctatggctgccccaaggagagctgcaacctgtttgtgctgaaggacacactaaagaagatgcagaagttctttggactgccccagacaggtgatcttgaccagaataccatcgagaccatgcggaagccacgctgcggcaacccagatgtggccaactacaacttcttccctcgcaagcccaagtgggacaagaaccagatcacatacaggtgccggggcagggcttggggaggcagggccatggggctgagggacacgagtctccttga

SEQ ID NO: 734413 - DNA, 569 bp, Homo sapiens
gccattatcaaacatcaaaatgtaagaagaaagggccttctcctgtggtagtgattccctccacaggtataacttatttctcaagtaagttacagttcccattatttcaaaagctattgtgacaacttccaaatccccttccttaaattaatttaaattaatatataaacacaattgatgtcgagatmtttaaaaactgttttattgactttactgaggcacactttccataccataaagttcacccattgtaaatatagaattcaataactttttgtaaattttcagagttgtgcaggcatcatcacaatcccattttagagcattgccctaactcccttatgttctgttctcctgcgtatcggaggctctaggtcctagacttcaaaatctctcaccaatatagccattctagcttgagttactgatctctccagtgtttatgctcacttgtagtgactccccatccccacccctagtcctagggaacaactgacctgctttctgtctctgtaaatttgcctgttctggactttttatatagttgcaatcatacaatgtatagtctt

SEQ ID NO: 734414 - DNA, 600 bp, Homo sapiens
tagtaaaaaaaattctctagctaaacaaaggtctcctaaacacactgtcattattacaaaagaggattctacaaagataggggatggggttggagtggatgggaattagcattactcgtgtcttgatggaaatcagkgcacccttgtgcttagtcaaaaggcctctatggagggctgtgtaccaagtgagtgacagatgagtgagcagaggtaaaaacaaatgactcgcaaaataatagacccatagacactccatggagagggctcaggtgaagaggatttcattaagtttgggaaatgctttccttcttagaagttattagcatattaaaagtactgagaaattttgtgatgaagaaacacaaataactttgtttaatcatgatttctcaagccttctgtgtccatcaaaaccttttcttttacaaataactccaaataaatttggtaaatactgctttggacagagattttctctctctgtctgaagttatctaaagtttgccagaatctgagtttgctcttttcaaagggctctgtttagagaccatagaaaaactcgcaaatgtttactaacctatctcatttcaagtcatggtt

SEQ ID NO: 734415 - DNA, 654 bp, Homo sapiens
taatgactattttaagctgaagacatctgagatttgaagacagatgcagaaagaagccttcttggagtttcccttctttgactaaaagcagcaacttttggaaaatgaagcttgtataaattgccacttcagactgaatccactcttggaatgaaaaatgcaaataaaacttaccccagttctcttcctggagcagtgttatggccctaaagtggatagaaagaccaatggtatctgcataggcaaacattatcacaaactttcttatctctcatttgttcttttaaaaacccatttgtctttcctaaagaaaccctcatatccttcccattggagcctttccccctccttcttttccctactaagttaggtgtatccaccccaaattttaaccaccactttgacttactaatccttgagcacctcatgtgtatgaatatagctacatcaataaatttttatcctgcttctgcctgttttcaatttaattcactgacytgcagatactgaacataggaagatagaggaaaagatatttttcctctcggatatagtagttataggcatatttccaaatacaaattgaagtatggaactcttaaagcacaatggagaaaagtgtgctgaggggtcatcacataggagaaaagaata

SEQ ID NO: 734416 - DNA, 543 bp, Homo sapiens
accagaggtcagcctgcctggagacttacacatctctctccacctggacgccaagctggcatgtttcagtttaacaggtccaaaaccaaactcctgctctttccccttaaacctgcttcaccctcagccttcctcatctgttgactgcaacaccatccttcctgttgtttgaacaactaaagattcatcatgcagtggcgtcatcagctcaccgcagcctggaactcctgggcttaagcgatcctcccatctcagcctcctgagtagctggaagcgcgcaccaccaaacctggstgagttttaaaacatttttttgtagagaaggggtcttgctatattatccaggctgatctcaaactcctggcctcgagtgatcctcccacctcggcctcccaaagttcttggatcacaggcgtgagccactgcacctggccaggattcatctttgactcttctctcccacacctgtcttttccactcacaattcctatcaactccaccttcaaatacatccaggatcctctccccatctctgtctggtgc

SEQ ID NO: 734417 - DNA, 567 bp, Homo sapiens
atgttgcccaggctggtctcaaactcctgagctaaagcaatccttctgtgttggcctcgcaaagtgctaggattacagatgtgagccactaagcctggctgtgttaatctttaatagaacaagtgccaaatggttttcatcccatcttttctttctttcatgttttatttatttatttttgagacagggtcttgttctgttgcccagcctgaagtgcagtggtgcaatcatgactcactgcagcctcggcctcctaggatcaactgatcctcccatctcagcctcccgagtagctgagattacaagtgcacatcagcatgcctggctaatttttgtwttttttttttgtagaaacagggtttcactatgttgtccagactagtctcgaactcctggcctcaatccttcctggcctcagcctcccaaagtgctgggattataggtgtgagccaccgtgcccggcccggctttaccctttctttagagtgtttactctcagatcaccttctgcagggaagcgatgttaagtggcttgttccaggccacatgcccagcagtggtagagct

SEQ ID NO: 734418 - DNA, 577 bp, Homo sapiens
aatcagttgagcccttaaaaggcctgagtccttttggaagtcagagatttaaagtgtgagaagaggccacattgcaaatataacagaatgatctctaggagctgggagtggtccctagtcaacagctatcaaaaccactggggccttagtcctacagttgcaaggatattagttctgacaacctgagggaaaccaggagtggatcttcccctagtggagcctccagatgaaggctgctggctgacaccttgatggcaaggtgagaccctgagcaaacaccccagytacactgtgcccaaacctcagacctatatgaattagctgatggccaggcacggtggctcatgcctgtaatcccagcacttcgggagccaaggtgggtggatcacctgagatcaagagtttgagacagcctgaccaaaaattagctgggcgtggtgatgggtgcctgtaatcccagctactcggtaggctgaggcaggagaattgcttgaactggggaggtgaatattgcagtgagcaaagattgcaccactgcactccagtctgagtgacagagtgagactcagtctcaaaa

SEQ ID NO: 734419 - DNA, 617 bp, Homo sapiens
aggagtgcacatcgaacggaaaaaattactccaactctctccgtaggagaacatctgccagctggccgaccaaagtagctggttgctaagaaatcacaccgggtgacatcacctgatcacttactacaggcaagacatggccagggtcagagttcaaaacagtttctggaaatctttccagcgaagccccttttccgtgcagggatgggaggatgggaaagtatcttgatgggtacccacctgtgaccccctgccctatgacagaggtactattacagatagggaaactgaggccccgagggggaaggtcactgctagagggtggtagaagaggggttccagcttcttctgagcatcgaggtgcttcccgggataccaggttctgagccccgctgtgtgcacccctctcatgcakaaagaggtcaacagagaagtccagcgcatggtaaagaccagcgtgaccacaggctgcagcttttccacatggacaatgcggtttctatggagtccaggggctacggtcccatctccacggcattaaataaagagacgaggaaggtggcgaaacagcataggagagtaacctcctctcaagccaaggcaccactccacagggg

SEQ ID NO: 734420 - DNA, 655 bp, Homo sapiens
ttgtcaatgaggaaaaaaaaaaaacaaggctcaggagcccattcaaagcacgtgccaggaagggcagagaggaatttgtatccaggtcttctgactctagatcctgactcttttttttttttccaagacagagtttcactctgtcacccaggctggagtgcaatggtgcaatctcagctcacsgcaacctctgtcttccaggttcaagtgattctcctgcctcagcctcctgagtagctgggattacaggcaagcaccatcatgcctggctaattttcatatttttagcagagacagggttttgccatgttggccaggctggtctcaaacttctgatccacccgcctcggcctcccgaagtgctgggaatacaggtgtgagccaccgcacccagctgatcctgactcttaaccactacacggaaaggcagaaagggaatgcctgcaaaatcacggggcaggggacagctggctgggtccactgccaggaaaaggggaacggggagaggccccaggggaccagactgcccacaggctgccaggtctgagaacagcacatttcctaccttcccagcagggcttcgcgaggtcatgagccagggccaccagggcctcaccctcccaagggccagctagaaaagggtcagccaatgtcg

SEQ ID NO: 734421 - DNA, 573 bp, Homo sapiens
ccacttatggcacagatggtggttttcagaaaagtcattttttctctaacaaattcatgactaaactaaaaagaccactatcaacttcattatgctttccaattgacttgctttaagggttattcttttattatagctcttaagctccygtttcttttttaaagtacttcttttagtaccaattttcacagcactaagaaatttaacactcttcagtggttatattaatggcaaggaactgttgcaggctgaagagtagcatgaaagacactggtattggtcatttgttatctcgtctaccacaagttacggacccggatcccagggggtgacactgaggacagtggtgatgagagaaagctggtgacatacctcctttctacaacataagagtttatgacacacagcatattccatattgctctcttcaaacacaatcctacttcaagcctctcctatccaagtgtgcccagttagctctttcaagtgaccagaagatctaattaattgcacaaacaaatccgtaagtattttacaaacatcgtcgcaagtaactgtaaacacagagataaa

SEQ ID NO: 734422 - DNA, 593 bp, Homo sapiens
ccttctcgcatagaaaactatccctactcactctttcttttgtgggtgcctctatcaaactagctgcagaatgaagcttctacttcttttctttatcattttgagtgtttcctactgggataccaatagaaaatcaagacgatgtaaaaatatctcaaaatagtagcctctggctctggccagtctttcttgactttcatctgggagtatggtgaccgattcatccagtttgcctgggacttttcctgttttagcactgaaaatacctgtgtcctggagtctcctcactcctgggcaacgaggacagttggtcacctgaactgggaaggtaaatggacaaattttasataggcttggggaatgagaagattataaatgaacctcctaaaattgaacacaaattgtatgttgactagagacaggtagcagtcagactgctagtaaatggcagaaccaggtttcaaacacatgtcaggctaagtccaagctagacataccgtgtcctttccatgacggctctggaaaaatctctcctagggcaaggcatcaacagattatcaaaaaagaaaaaaaacatgtcctaggaaatggca

SEQ ID NO: 734423 - DNA, 520 bp, Homo sapiens
agttgaaagtgatgaagacatagcaagtgatcatgatgatgagctgggttcaaacaagatgatgaaattgctgaagaagaagcagaagaaggaagcatttctgaaatgtgagtattttgaaacatcctttactttgtgagctggaattgcccaatcagtgtttgtatttgtggttttcacatatgtttgttttaagaagttagatactctcctatcagatcttctcaagatagccagaggaaagtcactggatttaaacggacattagagatcatttaatgaaraaaaatattactgacagtagcaatcaaacctttcttaccaggaactttgatttggttttgtgcccccaaaatcctgttatttttgtgagataagaggtttgtattatagattgatgaataatttattttctatatattggaccctttttgtttcttacatagcatttcacttaaatgatagcttctcttccttaatacctgaatgattttggaagttctaagtatctggttgcatt

SEQ ID NO: 734424 - DNA, 573 bp, Homo sapiens
aatctcagctactcaggaggctgaggcaggagaatctcttgaactcaggaggtggaggttgcagtgagccaagattgtgccactgcactccaacctgggcaacagagcgaggctctgtctcaaaaaaaaaaaaaaaagaaaaagaaaaaggaaaagaaaagaaagaaagaaagaaatgaaggaaataaaatttttaaactggaaagaataaaattacctgtatcttcagaccatgtgattgtctatgcagaaaatccagaagaatatacagataaattattaagactagtaagagagttagcaaggttgttgaattcaagatcaacttaaaaaactattagcgttcctatacatcaataataacaaattagaaaatgtaatagaaaaagagattctattcacaatagcaacaaaacsctgagaatatatctagcaaaatatacaccaggccttttatgaagagcattgcgatagcctgaatgtgtctcccaaaattcatgtgttaaaacttaattcccaagatgatagcactaagaagtggggcctttaagaagtgattaagacgtaagggca

SEQ ID NO: 734425 - DNA, 622 bp, Homo sapiens
ccctttgtaagtgccaggagaactcttcccaggatgtgatggtgctctctccaccaatagcccaccagggaggggaaccaggcccatctccatgatgcatcccctatccatcaccccagcctttgtccctgcacccaacatgacgatcacagtgtggcttgagatgagactgtctaatcctattactcattcatcaaccagcggatgagagcaggcgctggatcgaacattgctgaggaagctgggagatgccttctccaccgctgtgaaactgggcttagctcaggcacaatargtgtgtaatttaaggttttgttgaggcagaatccaatcacatacttgactggtggatcacagagactcagaggctaaaggaatgagataattccacctcacacaaacactggcattcagctttgacttaatgacaaatgtgtgaccaaccttacactgcttcattctctcttttttgttttaatgcatttccacctccttcctccctctcctctctcctgtatcctccttggtacacagagacagaatgaggcttggcaaagtcctagagccagaaaataaaggcagagaagcagggagaagctttttaaatggcgatcggcaggtg

SEQ ID NO: 734426 - DNA, 622 bp, Homo sapiens
tagctgttgaggagacacaaacaagaatttggtccaagatatctttgtttaacaccatattttggctgtgcccagcttcaagtccaggagaaagggagagaccaaaacattaattagttgtgatgggaactctgcgtttaaatgcgtgccttcctttagcccagtggtttagaaatggtaagttgacttgaattttatggaaaagctccgaaacctcttgatctatgtatctatgttcctgcctcaactgaattttagaaccaacgtgggcaggatgtgattctaagcactgctgcaggtgcaaacacagatgccttcaaaggcctttaatctggtagaaggggctagatggggtgggatggggtgagtgtgtaaggcagaatgctagtgccataaggtgtgtaaaagacaaagcatggaggttttagggaagraagagttgaatccacagtggaattcattcatacatgcaatatacatatatatatgtatatatatatatatatatattcatctgtgtatatctatatacctatatatacactgagtgcctactgtatgactggcactgggaattcaacaaaatggtcaaggtcaaggatccctgtcctcacagatctca

SEQ ID NO: 734427 - DNA, 516 bp, Homo sapiens
ttgaatactacatgtaaggaactatgccaagtactagaaataattttctctagagccagaattatctacagtctcacacccaaggccaaaaatgaccagggaaagtattcaaaatgcagattccaggcctccatccaggtaattctgatccagtgagctgagactggggactggttatttgcacttggacaaatgcaaagtttgcctgctgaggccaatgagccatgcatgacatgtatgtttgtccctctatctggctatcatttactgagcacttgctatgtatcaaaccctgagtaggcactggggattggaataacccttgcactcaagtcactcatggttattgaaaaagattgggttcggcagctgtaatkgttcctgctatttcagatactacaatctttaaaaggtgcttttgcaaaaaatcttaagcaagaggcagaaacgtattcactaacttattggtccagttgttgtaaagtttatggtgaacaaaatgtacaaggcatttat

SEQ ID NO: 734428 - DNA, 516 bp, Homo sapiens
attccaatacaacacacacacagaatcagacgcacttggttttctaaatggaaattagatttgcattaaaagactaagtgtgttgttctctctacagagcctctggaggagacattccaggggggattctactcctttctttaaaaggacatttgaaatcccatgcamacatgagccccatagactttttctccacatgactaatccagtctcctgcgacctctctttagtgtgacggggacacagaaacgaagcctgcagcttccgccgaccccaaacatttggttacattaatcacagagcgtttttggactttgagcatccagaatgaaagactttctggggagacattgatcaaacagtctacaggtatctgtacatcgagggacattaatcatttctgcattatctcactcaccagtagaatatgtaaatgtgattcctgtcaatgataaggggaagtgaaattattcttagagattggtccatctggagctgttgatacaatcttaccta

SEQ ID NO: 734429 - DNA, 588 bp, Homo sapiens
gccgcctgtccatcaggctgagcatctgggcctgagattttaaaggcctggactcgtgagctctcctttaaagaatgacttagtcctgtcctctgctctcagctgtggataattacagccttctgtgcaggtggctctgggtcaaatcctgctgcttctaatgagctggtggcagggcaagtcatttagcctcaatacaggctggtttcctcatctgtaaaatgggcatgacattgcctattctgcagtgttgcagggagagtgggatgagttaattcatggagtcctcagcccctaaaagctgcccaagaactgttggctaatgctacaccagtgtggtgcctgttgttggcttgcttgtttgtttccacccctacattcattgtgtacctcctctgagccaggctctgtgttacatgaaattcagtggcaactgacaacaatgcagttytagccctcattgaccaaaatgactatttttccctggttatatatcactgatttttgcatctcttaaagatgagtcttttctaaatcttagtgggaaggtcatgaactcttacaaaagtcagacaagtgcacataggt

SEQ ID NO: 734430 - DNA, 631 bp, Homo sapiens
aagaaagaaagaaaaaagaaagcaagcaagcaggcaatcaagcagcaggcaggctgggcacagaggctcatgcctgtaatcccaacactttgagacacctaggtgggaaaatcacttgagcccaagagatagagaccagcctgggcaacatggcaaaatcctgtctctacaaaaaatacaataattagctgggcatggtggcgcatgcctgtagtcccagctactcagaaggctgaggtgggaggatcaactgagcctagggaggttgaggctgcagtgagtcaagattgagcctcttcagccttggagactctgtcaagaaagaaagaaagaaaagaaacaaagaaaaaatgggaaaaagaaaagaaagaaagaaagagaaaggaaggatggaaggaaggaaaagaaaggcaggcagacaaataaagaaagagagagagggaggaaggaaggaaaagaaagacagacagacagataataatatsatgacacaaagaaagaaaaaaagaaagagagaaagaaagaaagagccctccacaactatgattctctccgctctccctttaacaaatgtttctgttctctcaagttgctcagccaatcaggagactctccctcacccttctggaag

SEQ ID NO: 734431 - DNA, 628 bp, Homo sapiens
aggaatgaattacttcctttaagctgacctcatttatattccatacccaaagccagtcttactacaactgcaattgagcctaatccaattacgacaatttttatttcaaaatataacatgatcccccgaacttgagaaccaaatgtatttcaaggttcacaaaaaatgcaagatttctattygcatgaaaaaattaggcaagattatttgtgggctggattggagggctggattctgagagttagaaaaatggaaataccattccactctgtctctcagcaacaacctcagcctgaggggtgagatgtcctccttatctaggcagagaagttctggccttgaccatcgcctccaaatatcttcatttatatatttgtctttactctcaccttttacaagccccacctcttctgcatgcagcatcttaatgtcttcatgttagggaagttttatggttctttcaccaaccttttcttgttcttcttgtcacctttggtcacgtcttttcatcttctttcaaggctagtttgagactgagcaccctccacccttttccccattggaaaacagtctgagaagagacacacaagatgtccatgactccttacggttggttcgacctgagtct

SEQ ID NO: 734432 - DNA, 628 bp, Homo sapiens
aggaatgaattacttcctttaagctgacctcatttatattccatacccaaagccagtcttactacaactgcaattgagcctaatccaattacgacaatttttatttcaaaatataacatgatcccccgaacttgagaaccaaatgtatttcaaggttcacaaaaaatgcaagatttctattcgcatgaaaaaattagkcaagattatttgtgggctggattggagggctggattctgagagttagaaaaatggaaataccattccactctgtctctcagcaacaacctcagcctgaggggtgagatgtcctccttatctaggcagagaagttctggccttgaccatcgcctccaaatatcttcatttatatatttgtctttactctcaccttttacaagccccacctcttctgcatgcagcatcttaatgtcttcatgttagggaagttttatggttctttcaccaaccttttcttgttcttcttgtcacctttggtcacgtcttttcatcttctttcaaggctagtttgagactgagcaccctccacccttttccccattggaaaacagtctgagaagagacacacaagatgtccatgactccttacggttggttcgacctgagtct

SEQ ID NO: 734433 - DNA, 529 bp, Homo sapiens
gttgcattgagccaacatcacaccactgaactccagcctaggcggcagagccagataccatctcaaaaaaaaaaagattttaaagtgtattttattttcttaaggaatcccttaaaataaaaaggaatattttatttccttgcatataattttatcttcttgtacaacactgacctccttctctgagattactcaaattgaaaaggccaatagtttatttatacctgaactaaaggctatccatctgaattttgatctaaaggcttactaagaaaaatatttcacatttctgtatttttaatcttyttaatttttattctgagcctctatctactccttcctaagtctctgggaactgctttttagttgagaagccatccctttatcctcatgccatggggtcctcaacgaacatgagatttttggaaactaaagccaggaggctctgccacaaaccatcccaaagccaaggaaacacagaaactgcttcctgcctgatggggggaggtgaattattcaataatacaaa

SEQ ID NO: 734434 - DNA, 568 bp, Homo sapiens
tgcccttacgtcttaatcacttcttaaaggccccacttcttagtgctatcatcttgggaattaagttttaacacatgaattttgggagacacattcaggctatcgcaatgctcttcataaaaggcctggtgtatattttgctagatatattctcagsgttttgttgctattgtgaatagaatctctttttctattacattttctaatttgttattattgatgtataggaacgctaatagttttttaagttgatcttgaattcaacaaccttgctaactctcttactagtcttaataatttatctgtatattcttctggattttctgcatagacaatcacatggtctgaagatacaggtaattttattctttccagtttaaaaattttatttccttcatttctttctttctttcttttcttttcctttttctttttcttttttttttttttttgagacagagcctcgctctgttgcccaggttggagtgcagtggcacaatcttggctcactgcaacctccacctcctgagttcaagagattctcctgcctcagcctcctgagtagctg

SEQ ID NO: 734435 - DNA, 548 bp, Homo sapiens
ccaggctggtctccaactcctgacctcaggtgacctgccttctttggcctctcaaagtgctgggattacaggcataagccatctcgccctgccgatttatttctattataggttgaattacattcatttctgatgttgtgccactgcactccataacctaaaaataatayggcaatttcatatgtattagtctaacacattacctaggacctccagtgccatgttcaatagagacagcgatagaaggtacctttgtctacgtcctaactttgatgaaaagtgcttctacaattttactattaagtatgataattgctttacattaaggaagatatggccgggtgtgtgacgcacacctgtaaccttagcactttggaaggctatgaggaggattgcttgagctggggaggtggaggttgcagtgaaccaagctgttgatactgcactccagcctggggacagtgagaccttctcttaaaaaaaaaggaagctagcttgctaatagcgcattatctgatgttgactctgcccttgcattattgtaataa

SEQ ID NO: 734436 - DNA, 522 bp, Homo sapiens
ctaatgcaaccagatacttagaacttccaaaatcattcaggtattaaggaagagaagctatcatttaagtgaaatgctatgtaagaaacaaaaagggtccaatatatagaaaataaattattcatcaatctataatacaaacctcttatctcacaaaaataacaggattttgggggcacaaaaccaaatcaaagttcctggtaagaaaggtttgattgctactgtcagtaatatttttyttcattaaatgatctctaatgtccgtttaaatccagtgactttcctctggctatcttgagaagatctgataggagagtatctaacttcttaaaacaaacatatgtgaaaaccacaaatacaaacactgattgggcaattccagctcacaaagtaaaggatgtttcaaaatactcacatttcagaaatgcttccttcttctgcttcttcttcagcaatttcatcatcttgtttgaacccagctcatcatcatgatcacttgctatgtcttcatcactttcaact

SEQ ID NO: 734437 - DNA, 512 bp, Homo sapiens
acactgtacactgttatgcctcttagggttatttttaaaccaatgctttttgccttcagtatgatatatggaagatttaaacaccattcattctttgtttttccacaaaggaccgtcctccttctaatatttggaagaaaatagatcaatccagggactataaaaatggcaatcaactcagggaatatcaactggaaggactcaactggctcttgttcaattggtacaataggtatgtagtatatcttaataaaaaaaatttatttttttaatgtgtgccaaaatgtgtcaagtaaaatagatactgttgttgctatattgttattgttwtgaagtcttcattatttaaagtgaggttacctcaggaacatatgtaaattgcaacttaggtttcaactacaattgttttctttaaatgtataccaatcagaatagaagaaagttggtatgttgattaatacttaaatttgaaatacctttccaagagtcctaagaaaccttctgtgttatat

SEQ ID NO: 734438 - DNA, 631 bp, Homo sapiens
tcacatcaagcatgacatcttcctttggggagaaattttcctggttagttttaccttaagggttccaatgggtgtgtacttctaagagtgtcgacggactcttctcagttgtaagattatgaacccaggtttcaaggtgtcaaaattttgttgcaatgtggatggcaaggacagcctttctctgatgtcctcagaagatccagtcttcaagttctagattgtgaaggggttgattgtcctcagtgaaccataaaaaatctttctttacctgattaaaatatactgtggcataataatttttataacctaaaacatgcattaaaaatgacaactgaatgaaactccttaataaatgtwtaagtgacccatcaggtagccaaatgtaccaggtggttttattgtcttcccaggaatatggaaccaaacattggttttaaactatttttgcattttataagtcaccacattaatatatttaactgggattattttattttttccatcatgagtcatggaatgcagaaccctcaataacaaaaagctttaaggactcaggaaggacaaggcagccaccctggttctccatgaatccatgcttaacattcaacttatgtcctcttgaataccagtt

SEQ ID NO: 734439 - DNA, 596 bp, Homo sapiens
gtagcatatgtcagaatgtcctctttttaaaggccagttaatattccattgtctgtatataccacatttggtttatctgttcatctgttgatggacactggggttgattccaccttgtggctattgcgaaatgctgctatgaacatgggtaaacaaatatctgttcgaatccctgtcttcacactttctgggtatgtacccggaagtgaaattgctgggtcatatagtcattctatacttaattttttgaggaagctctatactgttttctgtagcagttttttttttttttttwaagtagagatgggatctcactatgctgttgcctgggcaggtctcaaactcctgggctcgtgcgatcctcccactttggcctcccaaagtgcgtttacagacatgagcccacacccagccttctatagtagtttcaccattttacttttcttttttatttttaccttttttattgagatataatgcacaaataataaattgtgtaaatcttaattatatagcttaatgaaattttactcataaataaacccctgcaatgaccaccaagataaaaatatagatttcactttttttgtaagaga

SEQ ID NO: 734440 - DNA, 612 bp, Homo sapiens
tcctattatggttttgatttgcatttctctaatgacttgtgatgttgagcagcttttcatgtgcttgctggctatttgtatatcttctttggagaaatatttattcaagtactttgcccattttttaattgggttgattttttgttgttgagttgtaggwgttcttagatattctggatatcaatcacttacagatatgtgatttgcaaatattttctccccttctatgaattgcctttgcactctgttgatagtgccctttgacacacaaagtttttaatttaagtgaagtccaacttttctcttttttcttttgttacttgtagtttttgtgtcatacctgagaaatacttgccaatgccaatgcaatgaagctttttcctatgttttcttctaaaagctttaattcttacaattggagctttcatccattttgaggtaacttttgtatattgtataaagtcagggtctaacttcatttttttttcatgtggatgtttccaaaatcatttgttgaaaagactgttctggaaaaccaaatactgtgtgttctcatttataagtaggagctaagcattgggcacacatgactataaagatgggaacaataga

SEQ ID NO: 734441 - DNA, 612 bp, Homo sapiens
tcctattatggttttgatttgcatttctctaatgacttgtgatgttgagcagcttttcatgtgcttgctggctatttgtatatcttctttggagaaatatttattcaagtactttgcccattttttaattgggttgattttttgttgttgagttgtaggtgttcttagatattctggatatcaatcacttacagatatgtgatttgcaaatattttctccccttctatgaattgcctttgcactctgttgatagtgccctttgacacacaaagtttttaatttaagtgaagtccaacttttctcttttttcttttgttacttgtagtttttgtgtcatacctgagaaatacttgccaatgccaatgcaatgaagctttttcctatgttttcttctaamagctttaattcttacaattggagctttcatccattttgaggtaacttttgtatattgtataaagtcagggtctaacttcatttttttttcatgtggatgtttccaaaatcatttgttgaaaagactgttctggaaaaccaaatactgtgtgttctcatttataagtaggagctaagcattgggcacacatgactataaagatgggaacaataga

SEQ ID NO: 734442 - DNA, 625 bp, Homo sapiens
ttcttaaaaataatttattacacgtacaaaaatatgtcattatatgattttaatcttttattatcttagctctattttctaaatctgtaagttgtaggtaatgacacacatgcaaattctgttctatctagtaggtttaattggttttcttctcccattatggaaaaatcagtttttcctccatctgctcatttttttsaacatttattttctccataaatgtgtgcctttttttttttaaccttttctttggatgtaacatctctctatttccctcagtatgagtaaaataaactctttaacacaggttcatttttatatctatatgacagcttgatttacctgtttttgaaaattatcttttaaagtataagtaatacaagtttgcttattgtatgaaaaaataaaaaataactactgttcaattttgatgaatatacaaacatcaataaaatattcttaaaaatgagatcatagtgcacatgtaattgtaatgtgctttttttaaaaaaaaaacttaaagtattattaagatttttctatctcaataaataaatgttggtatcatttcaacataaacaccttcacattcctttgcagaataggaagatgggcttttcccaag

SEQ ID NO: 734443 - DNA, 616 bp, Homo sapiens
tacatacatatatatacatattttaaatgaaccttattttttagagaagttttaggttcacagataagccaagtggaaagtccagaattcctgtacttcacctgctcccacacacacacagcctccctcactgtgttagtctgttctcacactgctaataaagactgggtaatctataaaagaaacaggtttaattgactcaaagttcagcatggctggggaggcctcaggaaacttacaatcatggcagaaggggaagcaaacacatccttcttcacatggcagtagcaaggagaaatgctgagcaaaaaccaggaaagccccttataaaccatcagaccttgtaagaaactcactcactatcacgagarcagcatgaagataactggccctatgattaaattacatcccactaggttcttcccacatgtgagcattatgggaactacaattcaagatgagatttgggtggggacacagccaaactatatcactcactaatcaacatctcccaccagaggggtacatttcttacaatctgtggacttaacactgacacatcattatcactcatagtctatatagtttacattactgttcaatcttggtggtggac

SEQ ID NO: 734444 - DNA, 522 bp, Homo sapiens
ttaattacacacacacacacacatatataacatattatatgataataatatggggttatttttaggattaaatgagatgatgataaatatatagcatagagtgaataataaatagtaatggccactattatagccattatatcagtgtatatatttaccagaatataatcccaggcatgttgatagctattatgagataaaagrgttggacagttgaataagtttgggatttcaaacaggtttctttgctgtaggactttttagatccttgatttattgattgattgagacagggtcttgctgtcacccaggctgggctggagtgcagtggtgtgatcataactcactgcagtctgaaattcttggcctcaagcaatcctcctgcttcagcctcctgagtagctaggactacaggcacatgctgtcacaactggctaattctttttgatttttttgtggagatgaggtcttactctgttgcccaggctggtcttaaactcctgagctcaagtgatccttcgc

SEQ ID NO: 734445 - DNA, 441 bp, Homo sapiens
tttatatttggctttccagacctgtctcttgaccttctaattactttatttgaaacagcagtgagggtataataaacctggaggttgtctctcctttgctttatcataaattaaagctgctggtttgttgaggtgaaagtggaggctgaatgttcattactgctcaagtgacggcttgtcaatagcagtgctttttagtttgttctagtcagcacttgctgtgcattttgttggaccactgggaaataaatacaacaagattatacatttggaataccacaasagttcacaaaaaaaaccacaaatgataaattatacacttggtagaaagtgacatgctatcttgtgctattaacaaccaaagataattgcaacgaattgtaattgcagtttgcaacttacagtacagtgtgtccaacatcaatcttaatagtgaacaaa

SEQ ID NO: 734446 - DNA, 689 bp, Homo sapiens
tgccttctcatggtttttccacactgtaaaacagaagttaaactctagggtcagaaatagttaacaaagagagcctttgtgctaagcaggagtctgtggattgagttctggctcagccagtatatttctgtgtcatttggctttttataagctcattgcctcagtttctcttccataaatggaggcaataatattattgcatttctatcttctaaaattaccaagaggtatagatgtgtagtaatacagaggacacttatgaagactgttaactgtgagtcctttttgctatgtgagatataccagtaaaataagggacatgattgttttggtaggcctctgtacggatacaggatagctcattgaacccgatctcaggaattatagattagaaagttgtcagtctttgatttctgcatctccccgtgtgtccacttgctcccctctttcagcaaaccaactgccactgtatctttgggccacgtgaccaaaaagatggttaccartgggttttgagttttcatgtctcaggtccaacaacctgggtagagacagaatctctttaggatctcaattccagattcccagggagagaattctgattgtttcacccacttctggaactaacagctgtggctagggagttcaggccaccccgagcgagcatggctgcctggaacctgctactt

SEQ ID NO: 734447 - DNA, 606 bp, Homo sapiens
attagtttatcttaaaagaaaaccacctagctctgtccccaaaaagggctaaaaaataatgaccaaccaagaaccactgcatcgtggtgtgcaatgaccataaacacaactcatgcttagattctggtcactaaatatcatttcccactacaagtaatcaaggcttcacagagaaaaggcaggaaacataaagataaacctggaacactccatcataccagaatgccagaaagttatcaaagrcgtaaggggtcctcccaataggactcagatgccaacccaatggtgttcctacttgttccagacaggataacttagaaactaataacgacagtaactgcaacatattgagacacaattctgtttaaaagcatgatttcctactcaacccctgcccccaaatgcctcattgttcttctttgaaagatgcttactattttgaaaactggtaaagagaatcaagtatttatcctgcctaccatatgtaaattgtataactttaggataaccaaatagttgatgaggccagtttctctttatatatccctttaataaagaaggaataataaaattaggatatcaaccttttgcaacctctaatggttc

SEQ ID NO: 734448 - DNA, 598 bp, Homo sapiens
tggaaggaaaatgataagcattagagttacggtctttgctcctgcaacaaccagtatttagctgtcagagcctcatagcttagtacagctcctggcacagtggattgcttagtaaaattgaaatgaatccattgtcggcttccatcgagaaagatgatgatcttctctttggtgcctttttgatctctgtgcctagtactggcagcctcacaattaatttaatttaatttaatttaatttaatttaatttaattttttgagatggagtctcactctgtcacccaggccagagtgcagtggcrcgatctcggctcactgcaacctccgcctcccgaattcaagcgattctcctgcctcagcctccctgagtagatgggacaacaggcacccaccaccatgcccagctcatttctgtatttttagtagagacggggtttcgccacattggcctggctggtcttgaactcctgacctcaggtgatccatctgccttggcctcccaaagtgccgggattatagacgtgagccaccacacccggcccacaattaattttaataatctcacttctgcttcctaggaaccggaagacagtaaagg

SEQ ID NO: 734449 - DNA, 634 bp, Homo sapiens
ctgggtttaggttcctatcctcttcccagttttaatgatctataaacaaataaagcagtgtcttaacgaggagatgtcatcaactatattcaaagcattctaatttagaaggccattttttatggtttcatgaatatgccctattttatctgttttaaaaatcatggtttaatatttgtttttttataacrtgcaaggaactacatacagcttgagatagttaatacggtttcagaccaggagaagatcttgcagtagtattggccaaaagacctttctgagatggtggaaatgttccatgactctctgctgtccaatatggtggccattagccacagctggccattgtgcacttaaaatgtggctagtgcaactaaggaattaaatttctaattttatttactattaatttatttaaaattaaatagtcgcaggtggcaaatgactatcacattggacaacacagccttagagaatgtcccacatgatccatattaggcacaggaaatcccataacaccttctaaagcaggctttctcaacaatgatgctattgacattttaggccagataattctttgttgagcggggaggatagtcctgtgtattgtaagctatttaggggcattcaaacc

SEQ ID NO: 734450 - DNA, 674 bp, Homo sapiens
ggacaacacagccttagagaatgtcccacatgatccatattaggcacaggaaatcccataacaccttctaaagcaggctttctcaacaatgatgctattgacattttaggccagataattctttgttgagcggggaggatagtcctgtgtattgtaagctatttaggggcattcaaacctttacctactagatttcagtagcaccttggccccctatgcccgccccaccagttgtgacaatgtttgcagacatttccaaatgtctcctgcagggcatagatgccccaagttgagagtaagttgtccttgaaattactcagggattaggcaccctgccagatagaccacttttatgctrggttcttgaaattattaggaggttatttcatacatcttgctgctcataatttcttctccttgctagtctttatacttggtaattgtggtaagctgctgaggaggaaggtgaaaataaacaagctagttgaaatgtgtcagtgtcaacaggaaacacatcaatagtggttaagagtgtgagcactgaaactacagagaatgggttcagtttctggctctgtcaagaactagctgtgtgatcatttgcaagttaattcagttctctgtttctcagttttcctgtttgtaaaatagaaatggtataaccagagttgttt

SEQ ID NO: 734451 - DNA, 467 bp, Homo sapiens
aaaggattgaagtaaggcagttttccatggaaggtgtgtaagttggtcaccagtcaatatttctaaaatgtatagtttttaaaagtaactacatttgtgaatttcatgggaccaaaagttctgtcttgtttgtaacattcaagacaagaaatgaactcaatatctttaatggaagcaaaaataaataaatctctgttcccttaaaaaaagaaaataaaagtgactctaccattttgcattcccttytattatataaagtttcgagtacttttttgtgtccaggtctcccagttgacactacttgaagcagaagaattgctcagttgagacaatcaacaaaaaagagaataaaatggtcattgttctaagcctgtaactgttggggtcatttgtatgtaacagtagataatcagaacagggtgtgagattggaggttggtgtattgtcagccagttgagttggcctca

SEQ ID NO: 734452 - DNA, 598 bp, Homo sapiens
taattaaccagaatcctttaagtcaatctgattctttctttttgagtacttaagcctactcttgatggaaatgaccagtagtgagtgagtgaatgagcagtgtgtgagccatgtggctttgacatgagccttggcaacctctccatggtctctgtttccttagttccctgtaaacaggggataaggacaactgcatgtggagggttattgtgaaatttaaatgataaagtatgaggaatgcatagcactcagtctagtgtatagcagataataaatattaaattatattcaagagaaaggactcaagaggacaaaactgcagtgggaagaaaaygtcctttagggtcagacaaaattaggtttgatttttggttctactactcttgtgttgcatgacctcaatttcttcacctataaaaagggaaatactcagctcataaggttcttgtgcatcttaataacagtgattataaaatctctaatgttcattaaatcttaataggtcataagtattaaatccttatcactaacccaatgttatcacataagtaaaatatcgaataagatatttgttatatagcaagtgctccctaaatgt
